(19) United States
(12) Patent Application Publication
(10) Pub. No.: US 2011/0166335 A1
(43) Pub. Date: Jul. 7, 2011

(54) Xenorhabdus sp. genome sequences and uses thereof

(76) Inventors: David R. Corbin, Chesterfield, MO (US); Barry S. Goldman, Acton, MA (US); Gregory J. Hinkle, Plymouth, MA (US); Joseph E. Huesing, Chesterfield, MO (US); Thomas M. Malvar, Troy, MO (US); Karina C. Krasomil-Osterfeld, Ellisville, MO (US); Steven C. Slater, Acton, MA (US); Sergei Spirodonov, Moscow (RU)

(21) Appl. No.: 12/289,606

(22) Filed: Oct. 30, 2008

Related U.S. Application Data
(63) Continuation of application No. 09/897,516, filed on Jun. 29, 2001, now abandoned.
(60) Provisional application No. 60/215,161, filed on Jun. 30, 2000.

(51) Int. Cl. C07H 21/04

(52) U.S. Cl. 536/23.5

(57) ABSTRACT

The present invention relates to nucleic acid sequences from Xenorhabdus and, in particular, to genomic DNA sequences, and to the insecticidal Xenorhabdus strain Xs85816. The invention encompasses nucleic acid molecules present in non-coding regions as well as nucleic acid molecules that encode proteins, fragments of proteins, tRNA's, fragments of tRNA's, rRNA's and fragments of rRNA's. In addition, proteins and fragments of proteins so encoded and antibodies capable of binding the proteins are encompassed by the present invention. The invention also relates to methods of using the disclosed nucleic acid molecules, proteins, fragments of proteins, RNA's, and antibodies, for example, for gene identification and analysis, and preparation of constructs.

### CROSS REFERENCE TO RELATED APPLICATIONS

[0001] This application claims the benefit of priority to U.S. Provisional Application 60/215,161 filed Jun. 30, 2000.

### FIELD OF THE INVENTION

[0002] The present invention relates to genomic nucleic acid sequences from Xenorhabdus sp., in particular, and to Photorhabdus sp., and includes nucleic acid molecules present in both coding and in non-coding regions. Nucleic acid sequences that encode proteins and/or enzymes and homologues and fragments thereof are encompassed by the invention including but not limited to insect inhibitory proteins, proteins capable of conferring antibiotic resistance, microbial inhibitory proteins including bactericidal, bacteriostatic, fungicidal, and fungistatic proteins, proteins capable of conferring resistance to heavy metals or other toxic compositions, proteins and compositions capable of conferring pharmaceutical advantages such as antineoplastic, acaricidal, anti-inflammatory and anti-ulcerogenic properties, polyketide synthases, transposons and mobile genetic elements and their corresponding transposases, excisases and integrases, phage and phage particle proteins, other useful Xenorhabdus, Photorhabdus, Serratia, Yersinia, Salmonella, E. coli, and Erwinia sp. protein homologues, ribosomal RNA (rRNA), and transfer RNA (tRNA). In addition, proteins and fragments thereof so encoded and antibodies capable of binding the proteins are encompassed by the present invention. The invention also relates to methods of using the disclosed nucleic acid molecules, proteins, fragments of proteins, and antibodies, for example, for gene identification and analysis, preparation of constructs, transformation of cells with nucleotide compositions disclosed herein to produce Xenorhabdus proteins or fragments thereof, in particular novel insect inhibitory, bactericidal, fungicidal and nematicidal proteins.

### BACKGROUND OF THE INVENTION

[0003] Xenorhabdus sp. and Photorhabdus sp. strains have previously been shown to produce an array of extracellular proteins and small molecules or secondary metabolites having specialized functions. Among the more commercially interesting are proteins and small molecules having antibiotic properties or proteins which exhibit insect inhibitory activity. A small number of insect inhibitory proteins have previously been identified from these bacteria, symbionts of insect-parasitic nematodes. In view of the biotechnology methods which are now available, such proteins and compositions have great potential for use as biologically safe and effective pest control agents. Unlike chemical pesticide compositions, these proteins have no effect upon the environment in general, can be targeted to direct their effect primarily upon target insect species, and have no effect on non-target species. These proteins are comparable in nature to BT proteins, which are the most widely used biological insect pest control agents derived from various strains of Bacillus thuringiensis. BT compositions have been in commercial use for more than twenty years as topically applied insect control agents and more recently genes encoding various BT proteins have been expressed in transgenic plants, and in particular in agronomically important crops such as soybean, corn, wheat, rice, and cotton. However, one issue related to the use of BT proteins is resistance management. The concern is that target insect pests feeding on a plant expressing a single BT protein that is generally effective against that pest species will develop resistance to the protein in some calculable period of time. The answer to this problem has been to include in the plant another BT protein also toxic to the same target pest species. The idea is similar in nature to bacterial resistance management, in that the development of resistance to either of the BT proteins will be delayed because pest will not produce progeny that are resistant to either of the BT proteins, in particular if the two proteins that are expressed in the plant have different modes of action or bind different receptors in the insect midgut. Unfortunately, BT proteins are highly related and often it is difficult to distinguish whether two BT proteins toxic to the same insect species have different modes of action. Thus, even though a great variety of BT proteins have been identified, characterized and categorized into distinct classes of proteins, all appear to act in a very similar fashion. Therefore, a different resistance management strategy which takes advantage of insect inhibitory proteins derived from distinct microbial sources other than Bacillus thuringiensis would be desirable. Insect inhibitory proteins isolated from Xenorhabdus and Photorhabdus species of bacteria seem to have all the prerequisites for the delivery of novel genes for transgenic expression of insect pest inhibiting proteins to provide pest resistance to plants, either alone or in combination with Bacillus thuringiensis insecticidal crystal proteins.

[0004] Xenorhabdus sp. is a Gram-negative bacterium, member of the family of Enterobacteriaceae, and symbiotically associated with nematodes of the genus Steinernema. The nematode-bacterial complex can be characterized as an obligate and lethal parasitic relationship, specializing in parasitizing and proliferating in soil insect larvae. Infective, non-feeding stages of these nematodes live in soil and carry their nematode-genus-specific symbiotic bacteria in the gut. It is believed that the nematodes actively search for the appropriate insect host, invade the insect larvae through natural openings or lesions in the cuticle and, once inside the hemolymphe, release their symbiotic bacteria. The nematode-bacterial complex secretes a variety of highly efficient extracellular metabolites and proteins exhibiting insectic inhibitory, bactericidal, fungicidal and nematicidal properties to secure the larval mass as a source of nutrition. An array of extracellular enzymes such as lipases, phospholipases, proteases, nucleases as well as several broad spectrum antibiotics, and antifungal and nematicidal compositions are also secreted (Boemare & Akhurst, J. Gen. Microbiol. 134: 751-761 (1988); Li et al., Can. J. Microbiol. 43 (8):770-773 (1997); McInerney et al., J. Nat. Prod. 54 (3):774-84 (1991); McInerney et al., J. Nat. Prod. 54 (3):785-95 (1991); Sundar and Chang, J. Gen. Microbiol. 139 (Pt 12):3139-48 (1993)). It has been discovered that some compounds secreted by Xenorhabdus exhibit anti-neoplastic (U.S. Pat. No. 5,827,872), acaricidal, anti-inflammatory and anti-ulcerogenic properties (U.S. Pat. No. 4,837,222). U.S. Pat. No. 6,048,838 describes insect inhibitory proteins which exhibit a molecular weight of greater than 100 kDa produced by Xenorhabdus sp. which are orally active against a variety of insect species including the orders Lepidoptera, Coleoptera, Diptera, and Acarina.

[0005] The nomenclature and taxonomic characterization of Xenorhabdus has recently been subject to innovations in the state of the art. The genus Photorhabdus was separated from the genus Xenorhabdus in 1993 because of significant differences in biochemical and molecular characterization (Boemare et al., Int. J. Syst. Bacteriol. 43: 249-255 (1993)). Xenorhabdus exists of at least 4 known species: X. nematophilus, X. beddingii, X. poinarii and X. bovienii. (Brunel et al., Appl. & Environm. Microbiol. 63: 574-580 (1997)). Species of Xenorhabdus as well as Photorhabdus species can be distinguished from each other by restriction analysis of thermally amplified 16S rRNA genes (Brunel et al., Appl. Environm. Microbiol. 63: 574-580 (1997)).

[0006] The genetic diversity of symbiotic Xenorhabdus and Photorhabdus bacteria associated with entomopathogenic nematodes appears to be quite large. The genus Xenorhabdus appears more diverse than the genus Photorhabdus, and for both genera, the bacterial genotype diversity is in congruence with the host-nematode taxonomy. It has been found that the occurrence of symbiotic bacterial genotypes was related to the ecological distribution of host nematodes (Fisher-Le Saux et al., Appl. Environ. Microbiol. 64 (11):4246-54 (1998)). Xenorhabdus bacteria isolated from the same geographical location seem to be more similar to each other, regardless of nematode species than bacteria from one nematode species found in very diverse geographical locations (Liu et al., Intl. J. Syst. Bacteriol. 47:948-951; 1997).

[0007] Therefore, there is a great deal of interest in identifying the genes that encode new insect inhibiting proteins, and proteins involved in the biosynthetic pathways of novel antibiotics produced by Xenorhabdus and Photorhabdus bacteria, as well as other useful proteins. Sequencing of the entire genome of Xenorhabdus would facilitate such an endeavor, because it would allow dissection and analysis of the genome into discrete genes encoding proteins having beneficial properties as described herein.

### SUMMARY OF THE INVENTION

[0008] The present invention provides an isolated and purified nucleic acid molecule having a nucleotide sequence, wherein: (1) the nucleotide sequence hybridizes under stringent conditions to a second isolated and purified nucleic acid molecule selected from the group consisting of SEQ ID NO: 1 through SEQ ID NO: 4384 or complement thereof; (2) the nucleotide sequence is a portion of any sequence selected from the group consisting of SEQ ID NO:1 through SEQ ID NO: 4384; or (3) the nucleotide sequence is the complement of (1) or (2).

[0009] The present invention also provides an isolated and purified nucleic acid molecule comprising a nucleotide sequence, wherein: (1) the nucleotide sequence hybridizes under stringent conditions to a second isolated and purified nucleic acid molecule, wherein the hybridizing portion of the nucleotide sequence of the second nucleic acid molecule encodes a polypeptide or protein having an amino acid sequence selected from the group consisting of SEQ ID NO: 4385 to SEQ ID NO: 8409; (2) the nucleotide sequence encodes a polypeptide or protein, wherein the amino acid sequence of the polypeptide or protein is substantially identical to any one set forth in SEQ ID NO: 4385 to SEQ ID NO: 8409; or (3) the nucleotide sequence is the complement of (1) or (2). In alternative embodiments, the amino acid sequence of the above described polypeptide or protein is at least 70% identical, at least 80% identical, at least 85% identical, at least 90% identical, or at least 95% identical to an amino acid sequence selected from the group consisting of SEQ ID NO: 4385 to SEQ ID NO: 8409. In a preferred embodiment, the amino acid sequence of the above described polypeptide or protein is one of the sequences set forth in SEQ ID NO: 4385 to SEQ ID NO: 8409, or one of the sequences set forth in SEQ ID NO: 4385 to SEQ ID NO: 8409 with conservative amino acid substitutions.

[0010] The present invention further provides a method for obtaining a nucleic acid molecule comprising a nucleotide sequence encoding a polypeptide or protein the amino acid sequence of which is at least 70% identical to a member selected from the group consisting of SEQ ID NO: 4385 to SEQ ID NO: 8409.

[0011] The present invention, in another aspect, provides a substantially purified polypeptide or protein comprising an amino acid sequence, wherein the amino acid sequence is defined as follows: (1) the amino acid sequence is encoded by a first nucleotide sequence which specifically hybridizes to the complement of a second nucleotide sequence selected from the group consisting of SEQ ID NO: 1 through SEQ ID NO: 4150; (2) the amino acid sequence is encoded by a third nucleotide sequence that is at least 50% identical to a sequence selected from the group consisting of SEQ ID NO: 1 through SEQ ID NO: 4150; or (3) the amino acid sequence is at least 70% identical to a member selected from the group consisting of SEQ ID NO: 4385 to SEQ ID NO: 8409. In alternative embodiments, the above described third nucleotide sequence is at least 55% identical, at least 60% identical, at least 65% identical, at least 70% identical, at least 75% identical, at least 80% identical, at least 85% identical, at least 90% identical, or at least 95% identical to a sequence selected from the group consisting of SEQ ID NO: 1 through SEQ ID NO: 4150; and, the above described third nucleotide sequence can have one of the sequences set forth in SEQ ID NO: 1 through SEQ ID NO: 4150. In a preferred embodiment, the above described amino acid sequence is at least 70% identical, at least 80% identical, at least 90% identical, or at least 95% identical to a member selected from the group consisting of SEQ ID NO: 4385 to SEQ ID NO: 8409.

[0012] The present invention also provides a recombinant construct comprising: (A) a promoter region which functions in a host cell to cause the production of a mRNA molecule; which is operably linked to (B) a structural nucleotide sequence, wherein the structural nucleotide sequence is substantially identical to a member selected from the group consisting of SEQ ID NO: 1 to SEQ ID NO: 125; which is operably linked to (C) a 3′ non-translated sequence that functions in said cell to cause termination of transcription.

[0013] The present invention also provides a recombinant construct comprising: (A) a promoter region which functions in a host cell to cause the production of a mRNA molecule; which is operably linked to (B) a structural nucleotide sequence, wherein the structural nucleotide sequence encodes a polypeptide or protein the amino acid sequence of which is substantially identical to a member selected from the group consisting of SEQ ID NO: 4385 to SEQ ID NO: 8409; which is operably linked to (C) a 3′ non-translated sequence that functions in said cell to cause termination of transcription.

[0014] The present invention also provides a recombinant construct comprising: (A) a promoter region which functions in a host cell to cause the production of a mRNA molecule wherein the promoter region is selected from the group consisting of promoter sequences located within SEQ ID NO: 1 through SEQ ID NO: 4384 or complements thereof; which is linked to (B) a structural nucleotide sequence encoding a polypeptide; which is linked to (C) a 3′ non-translated sequence that functions in said cell to cause termination of transcription.

[0015] The present invention also provides a transformed cell having an exogenous nucleic acid molecule which comprises: (A) a promoter region which functions in said cell to cause the production of a mRNA molecule; which is operably linked to (B) a structural nucleic acid molecule, wherein the structural nucleotide is substantially identical to a sequence selected from the group consisting of SEQ ID NO: 1 to SEQ ID NO: 125; which is operably linked to (C) a 3′ sequence that functions in said cell to cause termination of transcription.

[0016] The present invention also provides a transformed cell having an exogenous nucleic acid molecule which comprises: (A) a promoter region which functions in said cell to cause the production of a mRNA molecule; which is operably linked to (B) a structural nucleic acid molecule, wherein the structural nucleotide encodes a polypeptide or protein the amino acid sequence of which is substantially identical to a if member selected from the group consisting of SEQ ID NO: 4385 to SEQ ID NO: 8409; which is operably linked to (C) a 3′ sequence that functions in said cell to cause termination of transcription.

[0017] The present invention also provides a transformed cell having an exogenous nucleic acid molecule which comprises: (A) a promoter region which functions in said cell to cause the production of a mRNA molecule wherein the promoter region is selected from the group consisting of promoter sequences located within SEQ ID NO: 1 through SEQ ID NO: 4384 or complements thereof; which is operably linked to (B) a structural nucleotide sequence encoding a polypeptide; which is operably linked to (C) a 3′ sequence that functions in said cell to cause termination of transcription.

[0018] The present invention also provides a plant cell, a mammalian cell, a bacterial cell, an algal cell, an insect cell and a fungal cell transformed with an isolated nucleic acid molecule of the present invention.

[0019] The invention also provides isolated nucleic acid molecules comprising nucleotide sequences encoding polypeptides or proteins exhibiting insect inhibitory activity, wherein said activity is manifested by inhibiting the growth or development of, or contributing substantially to, or causing the death of a Coleopteran, a Dipteran, a Lepidopteran, a Hemipteran, a Hymenopteran, or a sucking and piercing insect or insect larvae thereof. Also provided are nucleotide sequences encoding novel proteins comprising polypeptides which augment the activity of polypeptides exhibiting insect inhibitory activity when fed to Coleopteran, Dipteran, Lepidopteran, Hemipteran, Hymenopteran, or sucking and piercing insects or insect larvae thereof.

[0020] The present invention also provides a method for using insect inhibitory proteins for controlling target insect pests, i.e. also known as insect pest control.

[0021] The present invention also provides a computer readable medium having recorded thereon one or more of the nucleotide sequences depicted in SEQ ID NO: 1 through SEQ ID NO: 4384 or complements thereof.

[0022] The present invention also provides a computer readable medium having recorded thereon one or more of the nucleotide sequences encoding a protein or fragment thereof, wherein the amino acid sequence of the protein or fragment thereof is selected from the group consisting of SEQ ID NO: 4385 through SEQ ID NO: 8409.

[0023] The present invention also provides a method for using the computer media of the present invention in isolating/identifying nucleic acids encoding insect inhibitory proteins, or proteins involved in biosynthesis of antibiotics.

[0024] A specific Xenorhabdus species, Xs85816, deposited according to the Budapest Treaty on the International Recognition of the Deposit of Microorganisms for the Purpose of Patent Procedures with the Agriculture Research Culture Collection (NRRL) International Depositary Authority at 1815 North University Street, in Peoria, Ill. ZIP 61604 U.S.A. on Jun. 22, 2000 and designated as NRRLB-30306, exhibiting insecticidal activity against piercing and sucking insects and against boll weevil is contemplated as a source for DNA sequences encoding insecticidal proteins, and when formulated into a composition of matter as a spray, powder or emulsion, for the treatment of plants or animals to inhibit insect infestation.

[0025] Another aspect of the present invention provides a method for isolating novel Xenorhabdus and Photorhabdus insect inhibitory species and their symbiont specific host entomopathogenic nematodes, wherein an entomopathogenic nematode containing sample of leaf litter, soil, or other earth derived organic sample is collected, and infested with one or more insect larvae. Insect larvae used for such isolation should be preferred target insect larvae commonly associated with insect infestation or pest pressure. The insect infested sample should be incubated for a period of time in order to allow for nematode ingress into the body(ies) of the target insect larvae, and in order for the symbiont Xenorhabdus or Photorhabdus insect inhibitory bacteria to be released into the contents of the larvae, and for a period of time such that the bacteria proliferate within the body of the larvae. Preferably, the insect larvae are growth inhibited by the infestation, and more preferably, the infested larvae are killed by the infestation of the entomopathogenic compositions produced from either the nematode or from the symbiont bacteria, or both. The bacteria are subsequently isolated and purified using established culture methods, and the nematode hosts can be similarly isolated and purified, and both isolates can be maintained using various means known in the art. Preferably, the entomopathogenic nematodes selectively target specific insect larvae, and more preferably specific strains of insect larvae, such that any given entomopathogenic nematode species is attracted preferentially to that category and class of insect, and preferably the symbiont insect inhibitory bacterium released into the selectively targeted specific insect larvae body is capable of overwhelming the insect larvae so as to elicit growth inhibition, feeding inhibition, death, or a combination of these effects. Evidence of these effects can be verified by selectively providing isolated and purified bacteria obtained from such entomopathogenic nematode infections, bacterial cell extracts, or culture extracts or compositions, to insect larvae in various types of bioassays, followed by monitoring of the insect larvae in comparison to control larvae in order to establish effective insect inhibition.

[0026] Yet another aspect of the present invention is the provision of a kit for isolating novel entomopathogenic nematodes and their symbiont insect inhibitory bacteria.

[0027] Additionally, a novel method for assaying Xenorhabdus or Photorhabdus species for their insect inhibitory effects upon piercing and sucking insects, including Lygus species, is provided comprising providing an entomopathogenic nematode composition to such an insect comprising a Xenorhabdus species or a Photorhabdus species wherein said composition is ingested by said insect through a saculus bounded on one side nearest and accessible to the insect by an insect probosis penetrable membrane and on the opposite side of said insect probosis penetrable membrane by a fluid reservoir, said reservoir forming a single layer, said layer having a first and a second surface, said first surface contacting said insect probosis penetrable membrane on the fluid side of the membrane, and said second surface contacting the first surface of a semipermeable membrane having two surfaces, wherein said semipermeable membrane restricts the molecules which are greater than about 100 K Da, greater than about 115 K Da, greater than about 120 k Da, and/or greater than about 130 k Da, from entry into said fluid reservoir, and wherein said second surface of said semipermeable membrane is contacted by a second fluid reservoir containing said molecules; the inhibition of growth or viability of the insect being monitored upon the ingestion of said molecules by the insect through its probosis.

[0028] Another aspect of the present invention is provided by a method for identifying an insect inhibitory protein produced from a Xenorhabdus or a Photorhabdus species which is specific for inhibiting a particular genus or species of insect larvae. The method consists of exposing a first larvae to a particular genus or species of nematode containing either a Xenorhabdus or a Photorhabdus species of bacterium so that the nematode is allowed to invade the larvae, and release the bacteria from its gut into the insect larvae haemolymphe. The bacteria are allowed to proliferate for a period of time, generally two or so days, and are subsequently harvested from the larvae heamolymphe and isolated by pure cultured onto indicator agar or other medium selective for identification of the bacterial strain. The bacterial strain are then stored for further use using a variety of means available in the art. The pure cultured bacterial strain is then grown in a specified medium, and the medium is harvested and filtered through a sub-micron filter to eliminate the presence of the bacterial cells. The protein profile of the filtered medium is then analyzed by a number of means known in the art and compared to the protein profile of medium harvested from the same pure culture of bacteria which were passaged through the haemolymphe of another genus or species of insect larvae. Different proteins appearing in the profile of the medium from the bacteria passaged through the haemolymphe of another genus or species of insect larvae are then isolated and purified. The isolated and purified protein(s) can then be used to produce antibodies directed to the protein(s), said antibodies being useful for identifying genomic DNA clones which express all or a portion of the target protein to which antibodies were raised. Alternatively, N or C-terminal sequence data can be obtained which would allow for the production of redundant oligonucleotides for use as probes to identify genomic DNA sequences obtained from the bacterium which hybridize to the oligonucleotides, presumably also being genomic DNA sequences encoding the protein(s) identified as being different in the profile analysis from the original bacterial strains' profiled proteins. Such proteins, and the genes encoding these proteins, are candidate for being the proteins and genes encoding these proteins which are insect inhibitory and insect species specific.

[0029] It is also conceived herein that the nematode may produce proteins or other accessory factors which, when combined with the particular symbiont bacteria, trigger, activate, or enhance the expression of the proper insect specific insect inhibitory protein(s).

[0030] A further embodiment of the invention provides a method for selecting one or more insect inhibitory protein exhibiting enhanced insect inhibitory properties directed to the control of a selected insect pest species from a Xenorhabdus or a Photorhabdus bacterium species. The method consists of infesting an insect pest larvae with an insect pathogenic nematode. The nematode infestation results in the production of juvenile nematodes obtained from the infested insect pest, and a Xenorhabdus or a Photorhabdus bacterium species isolated and purified from the haemolymphe of the infested insect pest larvae. The isolated and purified bacterium species is grown in liquid broth culture, and the culture broth is isolated and purified away from the bacterium species. The broth is tested for the presence of an insect inhibitory composition. The composition is identified, purified and characterized as one or more proteins. Each protein is used to produce antibodies or N-terminal sequence information. The antibodies are used to screen a recombinant genomic library produced from the genome of the isolated and purified bacterium species, resulting in the identification of one or more clones expressing the protein. The one or more clones expressing the protein can be partially sequenced to obtain DNA sequence information that can be used to scan the genomic library disclosed herein, allowing one or more loci corresponding to the partial sequence within the genome of the bacterium to be identified, as well as the complete coding sequence of the gene encoding the protein exhibiting enhanced insect inhibitory properties directed to the control of a selected insect pest species. The N-terminal sequence is used to screen for the presence of genomic nucleotide sequences encoding the N-terminal sequence from the genomic library described herein, which is used to obtain the full length sequence of the gene encoding the protein exhibiting enhanced insect inhibitory properties directed to the control of a selected insect pest species.

[0031] Alternatively, the nematode/bacterial symbiont pair can be infested into two or more different insect pests, the bacterial symbiont from the haemolymphe of each insect pest harvested, isolated and purified, and then each isolate grown in liquid broth culture to produce an extracellular protein profile determinable by size exclusion chromotography, SDS-PAGE, two dimensional gel electrophoresis, or a suitable method known in the art to identify protein or proteins produced by one isolate harvested from one insect pest which are not produced by another isolate harvested from a different pest. The gene or genes encoding the protein or proteins can be identified as described above.

### DETAILED DESCRIPTION OF THE INVENTION

[0032] In accordance with the present invention it has been discovered that the following compositions comprising Xenorhabdus species and Photorhabdus species of bacteria commonly symbiotically associated with insect pathogenic nematodes, the individual nematodes, and the nucleic acids and amino acids encoded by the said nucleic acids derived from these bacteria and their host nematodes are surprisingly useful in providing compositions comprising insect inhibitory proteins, proteins capable of conferring antibiotic resistance, microbial inhibitory proteins including bactericidal, bacteriostatic, fungicidal, and fungistatic proteins, proteins capable of conferring resistance to heavy metals or other toxic compositions, proteins and compositions capable of conferring pharmaceutical advantages such as antineoplastic, acaricidal, anti-inflammatory and anti-ulcerogenic properties, polyketide synthases, transposons and mobile genetic elements and their corresponding transposases, excisases, integrases, and invertases, phage and phage particle proteins, other useful proteins homologous to proteins derived from Xenorhabdus, Photorhabdus, Serratia, Yersinia, Salmonella, E. coli, and Erwinia sp. among others, ribosomal RNA (rRNA), and transfer RNA (tRNA). In addition, antibodies directed to the above mentioned proteins and fragments thereof have been discovered to be of particular utility in the present invention. The invention also relates to methods of using the disclosed nucleic acid molecules, proteins, fragments of proteins, and antibodies, for example, for gene identification and analysis, preparation of constructs, transformation of cells with nucleotide compositions disclosed herein to produce Xenorhabdus or Photorhabdus proteins or fragments thereof, in particular novel insect inhibitory, bactericidal, fungicidal and nematicidal proteins.

### Agents of the Present Invention

[0033] Nucleic Acid Molecules

[0034] One aspect of the present invention relates to an isolated nucleic acid molecule having a nucleotide sequence, wherein: (1) the nucleotide sequence hybridized under stringent conditions to a second isolated nucleic acid molecule selected from the group consisting of SEQ ID NO: 1 through SEQ ID NO: 4384 or complements thereof; (2) the nucleotide sequence is a portion of any sequence selected from the group consisting of SEQ ID NO:1 through SEQ ID NO: 4384; or (3) the nucleotide sequence is the complement of (1) or (2).

[0035] The term “nucleic acid” means a single or double-stranded polymer of deoxyribonucleotide or ribonucleotide bases read from the 5′ to the 3′ end. Nucleic acids may also optionally contain synthetic, non-natural or altered nucleotide bases that permit correct read through by a polymerase and do not alter expression of a polypeptide encoded by that nucleic acid.

[0036] The term “an isolated nucleic acid” refers to a nucleic acid that is no longer accompanied by some of materials with which it is associated in its natural state or to a nucleic acid the structure of which is not identical to that of any of naturally occurring nucleic acid. Examples of an isolated nucleic acid include: (1) DNAs which have the sequence of part of a naturally occurring genomic DNA molecules but are not flanked by two coding sequences that flank that part of the molecule in the genome of the organism in which it naturally occurs; (2) a nucleic acid incorporated into a vector or into the genomic DNA of a prokaryote or eukaryote in a manner such that the resulting molecule is not identical to any naturally occurring vector or genomic DNA; (3) a separate molecule such as a cDNA, a genomic fragment, a fragment produced by polymerase chain reaction (PCR), or a restriction fragment; (4) recombinant DNAs; and (5) synthetic DNAs. An isolated nucleic acid may also be comprised of one or more segments of fly cDNA, genomic DNA or synthetic DNA.

[0037] The term “nucleotide sequence” refers to both the sense and antisense strands of a nucleic acid as either individual single strands or in the duplex. It includes, but is not limited to, self-replicating plasmids, chromosomal sequences, and infectious polymers of DNA or RNA.

[0038] A nucleotide sequence is said to be the “complement” of another nucleotide sequence if they exhibit complete complementarity. As used herein, molecules are said to exhibit “complete complementarity” when every nucleotide of one of the sequences is complementary to a nucleotide of the other.

[0039] A “coding sequence” is a nucleotide sequence which is translated into a polypeptide, usually via mRNA, when placed under the control of appropriate regulatory sequences. The boundaries of the coding sequence are determined by a translation start codon at the 5′-terminus and a translation stop codon at the 3′-terminus. A coding sequence can include, but is not limited to, genomic DNA, cDNA, and recombinant polynucleotide sequences.

[0040] The term “recombinant DNAs” refers to DNAs that contains a genetically engineered modification through manipulation via mutagenesis, restriction enzymes, and the like.

[0041] The term “synthetic DNAs” refers to DNAs assembled from oligonucleotide building blocks that are chemically synthesized using procedures known to those skilled in the art. These building blocks are ligated and annealed to form DNA segments which are then enzymatically assembled to construct the entire DNA. “Chemically synthesized”, as related to a sequence of DNA, means that the component nucleotides were assembled in vitro. Manual chemical synthesis of DNA may be accomplished using well established procedures, or automated chemical synthesis can be performed using one of a number of commercially available machines.

[0042] Stringent conditions are sequence dependent and will be different in different circumstances. Generally, stringent conditions are selected to be about 5° C. lower than the thermal melting point (Tm) for the specific sequence at a defined ionic strength and pH. The Tm is the temperature (under defined ionic strength and pH) at which 50% of the target sequence hybridizes to a perfectly matched probe. Appropriate stringent conditions are known to those skilled in the art or can be found in Current Protocols in Molecular Biology, John Wiley & Sons, N.Y. (1989), 6.3.1-6.3.6. For the purposes of this disclosure, stringent conditions include at least one wash (usually 2) in 0.2×SSC at a temperature of at least about 50° C., usually about 55° C., for 20 minutes, or equivalent conditions.

[0043] The hybridization portion of the two hybridizing nucleic acids is usually at least 40 nucleotides in length, more usually at least about 75 nucleotides in length, more particularly at least 100 nucleotides in lengths. The hybridizing portion of the hybridizing nucleic acid is at least 80%, at least 90%, or at least 98% identical to the sequence of a portion of a sequence set forth in SEQ ID NO: 4385 to SEQ ID NO: 8409.

[0044] Another aspect of the present invention relates to an isolated nucleic acid molecule comprising one or more open reading frames listed in Table 1. An “open reading frame” (ORF) is a region of a nucleotide sequence which encodes a polypeptide. This region may represent a portion of a coding sequence or a total coding sequence. Table 1 sets forth a list of open reading frames identified in the isolated nucleic acid molecules, wherein the open reading frames encode Xenorhabdus proteins or polypeptide or fragments thereof which are homologues of known proteins or unknown proteins, or of tRNA's or rRNA's or fragments thereof which are homologues of known tRNA's or rRNA's.

[0045] Open reading frames in genomic sequences can be screened for the presence of protein homologues utilizing one or a number of different search algorithms that have been developed, one example of which are the suite of programs referred to as BLAST programs. There are five implementations of BLAST, three designed for nucleotide sequences queries (BLASTN, BLASTX, and TBLASTX) and two designed for protein sequence queries (BLASTP and TBLASTN) (Coulson, Trends in Biotechnology 12:76-80 (1994); Birren et al., Genome Analysis 1:543-559 (1997)). Other examples of suitable programs that can be utilized are well known in the art. In addition, unidentified reading frames may be screened for by gene prediction software such as GenScan, which is located at http://gnomic.stanford.edu/GENSCANW.html. Novel genes, i.e., with no known homologs, can be predicted with the program GeneMark, which calculates the probability of a gene based on the presence of a gene-like ‘grammar’ in the DNA sequence (i.e., start and stop signals, and a significant open reading frame) and statistical analyses of protein-coding potential through biases in putative codon usage (see http://genemark.biology.gatech.edu/GeneMark for details).

[0046] The present invention also provides an isolated nucleic acid molecule comprising a nucleotide sequence, wherein: (1) the nucleotide sequence hybridizes under stringent conditions to a second isolated nucleic acid molecule, wherein the hybridizing portion of the nucleotide sequence of the second isolated nucleic acid molecule encodes a polypeptide or protein having an amino acid sequence selected from the group consisting of SEQ ID NO: 4385 to SEQ ID NO: 8409; (2) the nucleotide sequence encodes a polypeptide or protein, wherein the amino acid sequence of the polypeptide or protein is substantially identical to any one set forth in SEQ ID NO: 4385 to SEQ ID NO: 8409; or (3) the nucleotide sequence is the complement of (1) or (2).

[0047] In one embodiment, an isolated nucleic acid molecule comprises a nucleotide sequence, wherein the nucleotide sequence encodes a polypeptide or protein having an amino acid sequence that is substantial identical to a member selected from group consisting of SEQ ID NO: 4385 through SEQ ID NO: 8409.

[0048] The term “polypeptide” or “protein” refers to a linear polymer composed of amino acids connected by peptide bonds.

[0049] By “substantial identical” or “substantially identical” as used in reference to two amino acid sequences, it is meant that one amino acid sequence is identical to the other amino acid sequence or has at least 50% sequence identity, at least 70% sequence identity, preferably at least 80%, more preferably at least 90%, and most preferably at least 95% identity when compared to the other amino acid sequence as a reference sequence using the programs described herein; preferably BLAST using standard parameters, as described below.

[0050] “Percentage of sequence identity” is determined by comparing two optimally aligned sequences over a comparison window, wherein the portion of the polynucleotide sequence in the comparison window may comprise additions or deletions (i.e., gaps) as compared to the reference sequence (which does not comprise additions or deletions) for optimal alignment of the two sequences. The percentage is calculated by determining the number of positions at which the identical nucleic acid base or amino acid residue occurs in both sequences to yield the number of matched positions, dividing the number of matched positions by the total number of positions in the window of comparison and multiplying the result by 100 to yield the percentage of sequence identity.

[0051] Polypeptides which are “substantially similar” share sequences as noted above except that residue positions which are not identical may differ by conservative amino acid changes. Conservative amino acid substitutions refer to the interchangeability of residues having similar side chains. “Conservative amino acid substitutions” refer to substitutions of one or more amino acids in a native amino acid sequence with another amino acid(s) having similar side chains, resulting in a silent change. Conserved substitutes for an amino acid within a native amino acid sequence can be selected from other members of the group to which the naturally occurring amino acid belongs. For example, a group of amino acids having aliphatic side chains is glycine, alanine, valine, leucine, and isoleucine; a group of amino acids having aliphatic-hydroxyl side chains is serine and threonine; a group of amino acids having amide-containing side chains is asparagine and glutamine; a group of amino acids having aromatic side chains is phenylalanine, tyrosine, and tryptophan; a group of amino acids having basic side chains is lysine, arginine, and histidine; and a group of amino acids having sulfur-containing side chains is cysteine and methionine. Preferred conservative amino acids substitution groups are: valine-leucine, valine-isoleucine, phenylalanine-tyrosine, lysine-arginine, alanine-valine, aspartic acid-glutamic acid, and asparagine-glutamine.

[0052] Optimal alignment of sequences for comparison can use any means to analyze sequence identity (homology) known in the art, e.g., by the progressive alignment method of termed “PILEUP” (Morrison, Mol. Biol. Evol. 14:428-441 (1997), as an example of the use of PILEUP); by the local homology algorithm of Smith & Waterman (Adv. Appl. Math. 2: 482 (1981)); by the homology alignment algorithm of Needleman & Wunsch (J. Mol. Biol. 48:443 (1970)); by the search for similarity method of Pearson (Proc. Natl. Acad. Sci. USA 85: 2444 (1988)); by computerized implementations of these algorithms (e.g., GAP, BESTFIT, FASTA, and TFASTA in the Wisconsin Genetics Software Package, Genetics Computer Group, 575 Science Dr., Madison, Wis.); ClustalW (CLUSTAL in the PC/Gene program by Intelligenetics, Mountain View, Calif., described by, e.g., Higgins, Gene 73: 237-244 (1988); Corpet, Nucleic Acids Res. 16:10881-10890 (1988); Huang, Computer Applications in the Biosciences 8:155-165 (1992); and Pearson, Methods in Mol. Biol. 24:307-331 (1994); Pfam (Sonnhammer, Nucleic Acids Res. 26:322-325 (1998); TreeAlign (Hein, Methods Mol. Biol. 25:349-364 (1994); MES-ALIGN, and SAM sequence alignment computer programs; or, by manual visual inspection.

[0053] Another example of algorithm that is suitable for determining sequence similarity is the BLAST algorithm, which is described in Altschul et al, J. Mol. Biol. 215: 403-410 (1990). Software for performing BLAST analyses is publicly available through the National Center for Biotechnology Information (NCBI), http://www.ncbi.nlm.nih.gov/; see also Zhang, Genome Res. 7:649-656 (1997) for the “PowerBLAST” variation. This algorithm involves first identifying high scoring sequence pairs (HSPs) by identifying short words of length W in the query sequence that either match or satisfy some positive valued threshold score T when aligned with a word of the same length in a database sequence. T is referred to as the neighborhood word score threshold (Altschul et al, J. Mol. Biol. 215: 403-410 (1990)). These initial neighborhood word hits act as seeds for initiating searches to find longer HSPs containing them. The word hits are extended in both directions along each sequence for as far as the cumulative alignment score can be increased. Extension of the word hits in each direction are halted when: the cumulative alignment score falls off by the quantity X from its maximum achieved value; the cumulative score goes to zero or below, due to the accumulation of one or more negative-scoring residue alignments; or the end of either sequence is reached. The BLAST algorithm parameters W, T and X determine the sensitivity and speed of the alignment. The BLAST program uses as defaults a wordlength (W) of 11, the BLOSUM62 scoring matrix (see Henikoff, Proc. Natl. Acad. Sci. USA 89:10915-10919 (1992)) alignments (B) of 50, expectation (E) of 10, M=5, N=−4, and a comparison of both strands. The term BLAST refers to the BLAST algorithm which performs a statistical analysis of the similarity between two sequences; see, e.g., Karlin, Proc. Natl. Acad. Sci. USA 90:5873-5787 (1993). One measure of similarity provided by the BLAST algorithm is the smallest sum probability (P(N)), which provides an indication of the probability by which a match between two nucleotide or amino acid sequences would occur by chance. For example, a nucleic acid is considered similar to a reference sequence if the smallest sum probability in a comparison of the test nucleic acid to the reference nucleic acid is less than about 0.1, more preferably less than about 0.01, and most preferably less than about 0.001.

[0054] One skilled in the art will recognize that these values of sequence identity can be appropriately adjusted to determine corresponding sequence identity of two nucleotide sequences encoding the proteins of the present invention by taking into account codon degeneracy, conservative amino acid substitutions, reading frame positioning and the like. Substantial identity of nucleotide sequences for these purposes normally means sequence identity of at least 40%, preferably at least 60%, more preferably at least 90%, and most preferably at least 95%.

[0055] The term “codon degeneracy” refers to divergence in the genetic code permitting variation of the nucleotide sequence without effecting the amino acid sequence of an encoded polypeptide. The skilled artisan is well aware of the “codon-bias” exhibited by a specific host cell in usage of nucleotide codons to specify a given amino acid. Therefore, when synthesizing a gene for expression in a host cell, it is desirable to design the gene such that its frequency of codon usage approaches the frequency of preferred codon usage of the host cell.

[0056] The present invention also includes an isolated nucleic acid comprising a nucleotide sequence encoding a polypeptide having an amino acid sequence set forth in any of SEQ ID NO: 4385 to SEQ ID NO: 8409 with conservative amino acid substitutions.

[0057] In a preferred embodiment of the present invention, the isolated nucleic acid molecule comprising a nucleotide sequence encodes an insect inhibitory protein, wherein the nucleotide sequence is selected from the group consisting of SEQ ID NO: 428 through SEQ ID NO: 433 and SEQ ID NO: 435 through SEQ ID NO: 438 and SEQ ID NO: 3733. The term “insect inhibitory protein” refers to any polypeptide or protein or a substantial portion thereof that exhibits insect inhibitory activity, wherein said activity is manifested by inhibiting the growth or development of, or contributing substantially to, or causing the death of a Coleopteran, a Dipteran, a Lepidopteran, a Hemipteran, a Hymenopteran, or a sucking and piercing insect or insect larvae thereof. For instance, the present invention provides an isolated nucleic acid molecule comprising a nucleotide sequence encoding all or substantial portion of a polypeptide the amino acid sequence of which is substantially identical to any sequence set forth in SEQ ID NO: 4687 through SEQ ID NO: 4692 and SEQ ID NO: 4694 through SEQ ID NO: 4697 and SEQ ID NO: 7992.

[0058] The term “insect inhibitory protein” also refers to any polypeptide or protein with modified amino acid sequence, such as sequence which has been mutated, truncated, increased and the like and which maintains at least the insect inhibitory activity associated with the native protein. Accordingly, the isolated nucleic acids encoding those polypeptide or protein with such modification are also within the scope of the present invention.

[0059] In a preferred embodiment of the present invention, the isolated nucleic acid molecule comprising a nucleotide sequence encodes whole or a portion of a protein homologue capable of conferring antibiotic resistance, wherein the amino acid sequence of the protein homologue is substantially identical to any sequence set forth in SEQ ID NO: 4564 through SEQ ID NO: 4605.

[0060] In a preferred embodiment of the present invention, the isolated nucleic acid molecule comprising a nucleotide sequence encodes whole or a portion of a protein homologue capable of conferring resistance to heavy metals or other toxic compositions, wherein the amino acid sequence of the protein homologue is substantially identical to any sequence set forth in SEQ ID NO: 4396 through SEQ ID NO: 4402.

[0061] In a preferred embodiment of the present invention, the isolated nucleic acid molecule comprising a nucleotide sequence encodes whole or a portion of a polyketide synthase homologue the amino acid sequence of which is substantially identical to any sequence set forth in SEQ ID NO: 4385 through SEQ ID NO: 4395.

[0062] In a preferred embodiment of the present invention, the isolated nucleic acid molecule comprising a nucleotide sequence encodes whole or a portion of a transposon or transposase homologue the amino acid sequence of which is substantially identical to any sequence set forth in SEQ ID NO: 4614 through SEQ ID NO: 4684.

[0063] In a preferred embodiment of the present invention, the isolated nucleic acid molecule comprising a nucleotide sequence encodes whole or a portion of a phage or phage particle protein homologue the amino acid sequence of which is substantially identical to any sequence set forth in SEQ ID NO: 4403 through SEQ ID NO: 4563.

[0064] In a preferred embodiment of the present invention, the isolated nucleic acid molecule comprising a nucleotide sequence encodes whole or a portion of a cytotoxin protein the amino acid sequence of which is substantially identical to any sequence set forth in SEQ ID NO: 4606 through SEQ ID NO: 4613 and SEQ ID Nos: 4685, 4686 and 4693.

[0065] Another aspect of the present invention relates to a class of isolated nucleic acid molecules comprising promoter sequences or regulatory elements, particularly those found within SEQ ID NO: 1 through SEQ ID NO: 4384 or complements thereof.

[0066] The term “promoter sequence” means a nucleotide sequence that is capable of, when located in cis to a structural nucleotide sequence encoding a polypeptide or protein, functioning in a way that directs expression of one or more mRNA molecules that encodes the polypeptide or protein. Such promoter regions are typically found upstream of the trinucleotide ATG sequence at the start site of a protein coding region. Promoter sequences can also include sequences from which transcription of transfer RNA (tRNA) or ribosomal RNA (rRNA) sequences are initiated. Transcription involves the synthesis of an RNA chain representing one strand of a DNA duplex. By “representing” it is meant that the RNA is identical in sequence with one strand of the DNA; it is complementary to the other DNA strand, which provides the template for its synthesis. Transcription takes place by the usual process of complementary base pairing, catalyzed and scrutinized by the enzyme RNA polymerase. The reaction can be divided into three stages described as initiation, elongation and termination. Initiation begins with the binding of RNA polymerase to the double stranded (DS or ds) DNA. The sequence of DNA required for the initiation reaction defines the promoter. The site at which the first nucleotide is incorporated is called the startsite or startpoint of transcription. Elongation describes the phase during which the enzyme moves along the DNA and extends the growing RNA chain. Elongation involves the disruption of the DNA double stranded structure in which a transiently unwound region exists as a hybrid RNA-DNA duplex and a displaced single strand of DNA. Termination involves recognition of the point at which no further bases should be added to the chain. To terminate transcription, the formation of phosphodiester bonds must cease and the transcription complex must come apart. When the last base is added to the RNA chain, the RNA-DNA hybrid is disrupted, the DNA reforms into a duplex state, and the RNA polymerase enzyme and RNA molecule are both released from the DNA. The sequence of DNA required for the termination reaction is called the terminator.

[0067] Generally, for bacteria the optimal promoter is a sequence consisting of a −35 hexamer separated by about 17 base pairs from a −10 hexamer and lies from about 7 to about 10 base pairs upstream of the startpoint of transcription, but these sequences can vary among and between sequences which are recognized by the RNA polymerase. The startpoint of transcription generally lies from about 20 to about 50 base pairs upstream of the startpoint of translation of one or more open reading frames which comprise the entire length of an mRNA transcript. Some promoters can be recognized by RNA polymerase alone and in these cases, an accessible promoter will always be transcribed. Promoter availability may be determined by extraneous proteins, which either may act directly at the promoter to block access by RNA polymerase, or may function indirectly by controlling the structure of the genome in the region. Other promoters are not by themselves adequate to support transcription initiation and thus ancillary protein and or RNA factors are required to further initiation. The additional protein or RNA factors usually act by recognizing sequences of DNA that are close to, or overlap with, the sequence bound by RNA polymerase itself. Additionally, some of these ancillary factors must touch and concern the RNA polymerase in order to effect efficient transcription initiation as well as transcription elongation.

[0068] Promoters of the present invention can be included within sequences up to 10 kb upstream of the trinucleotide ATG sequence at the start site of a protein coding region, tRNA, or rRNA. Promoters of the present invention can preferably be included within sequences up to 5 kb upstream of the trinucleotide ATG sequence at the start site of a protein coding region, tRNA or rRNA. Promoters of the present invention can more preferably be included within sequences up to 2 kb upstream of the trinucleotide ATG sequence at the start site of a protein coding region, tRNA or rRNA. Promoters of the present invention can most preferably be included within sequences up to 500 bp upstream of the trinucleotide ATG sequence at the start site of a protein, tRNA, or rRNA coding region. While in many circumstances a 300 bp promoter may be sufficient for expression, additional sequences may act to further regulate expression, for example, in response to biochemical, developmental or environmental signals. In a preferred embodiment of the present invention, the promoter is upstream of an nucleic acid sequence that encodes a Xenorhabdus protein or fragment thereof.

[0069] The term “regulatory element” is intended to mean a series of nucleotides that determines if, when, and at what level a particular gene is expressed. Regulatory DNA sequences specifically interact with regulatory or other proteins. Many regulatory elements act in cis (“cis elements”) and are believed to affect DNA topology, producing local conformations that selectively allow or restrict access of RNA polymerase to the DNA template or that facilitate selective opening of the double helix at the site of transcriptional initiation, i.e., the transcriptional startsite referred to above. Cis elements occur within, near to, adjacent to, or at a distance from a particular promoter, but remain linked to the promoter sequence along the sequence of phosphodiester bonds which comprise the nucleotide sequence within which the promoter resides. Cis elements are not limited to promoters, but may be imparted to RNA sequences derived from transcription from DNA sequences of the present invention, wherein such RNA cis elements are involved in post transcriptional regulation of gene expression. For example, elements which are known as inverted repeat sequences can assist in the formation of hairpin structures which prevent, inhibit, or otherwise modulate the translational efficiency of the RNA sequence, or which regulate the survival of the RNA sequence. Other elements may function to bind ribosomes or components which enhance or suppress translational efficiency. Cis elements can be identified using known cis elements as a target sequence or target motif in the BLAST. Promoters of the present invention include homologues of cis elements known to effect gene regulation that show homology with the nucleic acid molecules of the present invention.

[0070] The isolated nucleic acid molecules of the present invention also include nucleic acid molecules that encode ribosomal RNA (rRNA), transfer RNA (tRNA) molecules, or other nucleic acid molecules which function to regulate gene expression, transcription, translation by acting alone or in combination with other cellular components in activating, inhibiting, terminating or anti-terminating gene expression functions, or by acting alone or in combination with other structural molecules to form or assist in the formation of said structural molecules.

[0071] It is contemplated by the inventors that the isolated nucleic acid molecules of the present invention also include those comprising a substantial portion of a nucleotide sequence selected from the group consisting of SEQ ID NO: 4385 through SEQ ID NO: 8409 or complements thereof.

[0072] A “substantial portion” of a nucleotide sequence comprises enough of the sequence to afford specific identification and/or isolation of a nucleic acid fragment comprising the sequence. In general, gene specific oligonucleotide probes comprising 20-30 contiguous nucleotides may be used in sequence-dependent methods of gene identification (e.g., Southern hybridization) and isolation (e.g., in situ hybridization of bacterial colonies or bacteriophage plaques). In addition, short oligonucleotides of 12-15 bases may be used as amplification primers in PCR in order to obtain a particular nucleic acid fragment comprising the primers. The skilled artisan, having the benefit of the sequences as reported herein, may now use all or a substantial portion of the disclosed sequences for purposes known to those skilled in this art. Accordingly, the instant invention comprises the complete sequences as reported in the accompanying Sequence Listing, as well as substantial portions of those sequences as defined above.

[0073] It is also contemplated by the inventors that the isolated nucleic acid molecules of the present invention also include known types of modifications, for example, labels which are known in the art, methylation, “caps”, substitution of one or more of the naturally occurring nucleotides with an analog. Other known modifications include internucleotide modifications, for example, those with uncharged linkages (methyl phosphonates, phosphotriesters, phosphoamidates, carbamates, etc.) and with charged linkages (phosphorothioates, phosphorodithioates, etc.), those containing pendant moieties, such as, proteins (including nucleases, metabolic toxins, antibodies, signal peptides, poly-L-lysine, etc.), those with intercalators (acridine, psoralen, etc.), those containing chelators (metals, radioactive metals, boron, oxidative metals, etc.), those containing alkylators, and those with modified linkages (alpha anomeric nucleic acids, etc.).

[0074] The nucleic acids of the present invention may be used to isolate nucleic acids encoding homologous proteins from the same or other species. Isolation of homologous genes using sequence-dependent protocols is well known in the art. Examples of sequence-dependent protocols include, but are not limited to, methods of nucleic acid hybridization, and methods of DNA and RNA amplification as exemplified by various uses of nucleic acid amplification technologies (e.g., polymerase chain reaction, ligase chain reaction).

[0075] For example, genes encoding homologous proteins, either as cDNAs or genomic DNAs, could be isolated directly by using all or a portion of the nucleic acids of the present invention as DNA hybridization probes to screen cDNA or genomic libraries from any desired organism employing methodology well known to those skilled in the art. Methods for forming such libraries are well known in the art. Specific oligonucleotide probes based upon the nucleic acids of the present invention can be designed and synthesized by methods known in the art. Moreover, the entire sequences of the nucleic acids can be used directly to synthesize DNA probes by methods known to the skilled artisan such as random primer DNA labeling, nick translation, or end-labeling techniques, or RNA probes using available in vitro transcription systems. In addition, specific primers can be designed and used to amplify a part or all of the sequences. The resulting amplification products can be labeled directly during amplification reactions or labeled after amplification reactions, and used as probes to isolate full length cDNA or genomic DNAs under conditions of appropriate stringency.

[0076] Alternatively, the nucleic acids of interest can be amplified from nucleic acid samples using amplification techniques. For instance, the disclosed nucleic acids may be used to define a pair of primers that can be used with the polymerase chain reaction (Mullis, et al., Cold Spring Harbor Symp. Quant. Biol. 51:263-273 (1986); Erlich et al., EP 50,424; EP 84,796, EP 258,017, EP 237,362; Mullis, EP 201,184; Mullis et al., U.S. Pat. No. 4,683,202; Erlich, U.S. Pat. No. 4,582,788; and Saiki, R. et al., U.S. Pat. No. 4,683,194) to amplify and obtain any desired nucleic acid or fragment directly from mRNA, from cDNA, from genomic libraries or cDNA libraries. PCR and other in vitro amplification methods may also be useful, for example, to clone nucleic acid sequences that code for proteins to be expressed, to make nucleic acids to use as probes for detecting the presence of the desired mRNA in samples, for nucleic acid sequencing, or for other purposes.

[0077] In addition, two short segments of the nucleic acids of the present invention may be used in polymerase chain reaction protocols, for example, the RACE protocol (Frohman et al., Proc. Natl. Acad. Sci. USA 85:8998 (1988)), to amplify longer nucleic acids encoding homologous genes from DNA or RNA from other sources.

[0078] Nucleic acids of interest may also be synthesized, either completely or in part, especially where it is desirable to provide plant-preferred sequences, by well-known techniques as described in the technical literature. See, e.g., Carruthers et al., Cold Spring Harbor Symp. Quant. Biol. 47:411-418 (1982), and Adams et al., J. Am. Chem. Soc. 105:661 (1983). Thus, all or a portion of the nucleic acids of the present invention may be synthesized using codons preferred by a selected plant host. Plant-preferred codons may be determined, for example, from the codons used most frequently in the proteins expressed in a particular plant host species. Other modifications of the gene sequences may result in mutants having slightly altered activity.

[0079] Availability of the nucleotide sequences encoding Xenorhabdus proteins facilitates immunological screening of DNA expression libraries. Synthetic polypeptides representing portions of the amino acid sequences of Xenorhabdus proteins may be synthesized. These polypeptides can be used to immunize animals to produce polyclonal or monoclonal antibodies with specificity for polypeptides or proteins comprising the amino acid sequences. These antibodies can be then be used to screen expression libraries to isolate genes of interest (Lemer, Adv. ImmunoL 36: 1 (1984); Sambrook et al., Molecular Cloning: A Laboratory Manual; Cold Spring Harbor Laboratory Press: Cold Spring Harbor, (1989)). It is understood that people skilled in the art are familiar with the standard resource materials which describe specific conditions and procedures for the construction, manipulation and isolation of antibodies (see, for example, Harlow and Lane, In Antibodies: A Laboratory Manual, Cold Spring Harbor Press, Cold Spring Harbor, N.Y. (1988)).

[0080] Another aspect of the present invention relates to a method for obtaining a nucleic acid comprising a nucleotide sequence encoding a Xenorhabdus protein homologue the amino acid sequence of which is at least 70% identical to a member selected from the group consisting of SEQ ID NO: 4385 to SEQ ID NO: 8409. In a preferred embodiment, the method of the present invention for obtaining a nucleic acid encoding all or a substantial portion of the amino acid sequence of a Xenorhabdus protein homologue comprising: (a) probing an expression library with a hybridization probe comprising a nucleotide sequence encoding a polypeptide having an amino acid sequence set forth in any of SEQ ID NO: 4385 to SEQ ID NO: 8409; or an amino acid sequence set forth in any of SEQ ID NO: 4385 to SEQ ID NO: 8409 with conservative amino acid substitutions; (b) identifying a DNA clone that hybridizes to the hybridization probe; (c) isolating the DNA clone identified in step (b); and (d) sequencing the DNA fragment that comprises the clone isolated in step (c) wherein the sequenced nucleic acid molecule encodes all or a substantial portion of the amino acid sequence of the Xenorhabdus protein homologue.

[0081] In another preferred embodiment, the method of the present invention for obtaining a nucleic acid fragment encoding a substantial portion of an amino acid sequence of a Xenorhabdus protein homologue comprising: (a) synthesizing a first and a second oligonucleotide primers corresponding to a portion of the coding sequence of a second nucleic acid molecule set forth in SEQ ID NO: 1 through SEQ ID NO: 4384; and (b) amplifying a DNA insert present in a cloning vector using the first and second oligonucleotide primers of step (a) wherein the amplified nucleic acid molecule encodes all or a substantial portion of the amino acid sequence of the Xenorhabdus protein homologue.

[0082] Protein and Polypeptide Molecules

[0083] The present invention, in another aspect, provides a substantially purified protein or polypeptide molecule comprising an amino acid sequence, wherein the amino acid sequence is defined as follows: (1) the amino acid sequence is encoded by a first nucleotide sequence which specifically hybridizes to the complement of a second nucleotide sequence set forth in SEQ ID NO: 1 through SEQ ID NO: 4384; (2) the amino acid sequence is encoded by a third nucleotide sequence that is at least 50% identical to all or a substantial portion of a coding sequence located within SEQ ID NO: 1 through SEQ ID NO: 4384; or (3) the amino acid sequence is substantially identical to a member selected from the group consisting of SEQ ID NO: 4385 to SEQ ID NO: 8409. In alternative embodiments, the third nucleotide sequence is at least 55% identical, at least 60% identical, at least 65% identical, at least 70% identical, at least 75% identical, at least 80% identical, at least 85% identical, at least 90% identical, at least 95% identical to all or a substantial portion of a coding sequence located within SEQ ID NO: 1 through SEQ ID NO: 4384. In a preferred embodiment, the third nucleotide sequence is 100% identical to all or a substantial portion of a coding sequence located within SEQ ID NO: 1 through SEQ ID NO: 4384. In a preferred embodiment, the amino acid sequence is at least 60% identical, at least 70% identical, at least 80% identical, at least 90% identical, at least 95% identical to a member selected from the group consisting of SEQ ID NO: 4385 to SEQ ID NO: 8409.

[0084] The term “substantially purified protein or polypeptide molecule” refers to a protein or polypeptide molecule separated from substantially all other molecules normally associated with it in its native state. More preferably a substantially purified protein or polypeptide molecule is the predominant species present in a preparation. A substantially purified molecule may be greater than 60% free, preferably 75% free, more preferably 90% free, and most preferably 95% free from the other molecules (exclusive of solvent) present in the natural mixture.

[0085] It is well known in the art that proteins or polypeptides may undergo modification, including post-translational modifications, such as, but not limited to, disulfide bond formation, glycosylation, phosphorylation, or oligomerization. Thus, as used herein, the term “protein molecule” or “polypeptide molecule” includes any protein molecule that is modified by any biological or non-biological process. The terms “amino acid” and “amino acids” refer to all naturally occurring L-amino acids. This definition is meant to include norleucine, ornithine, homocysteine, and homoserine.

[0086] The polypeptides or proteins of the present invention may be produced via chemical synthesis, or more preferably, by expression in a suitable bacterial or eukaryotic host. Suitable methods for expression are described by Sambrook, et al., (In: Molecular Cloning, A Laboratory Manual, 2nd Edition, Cold Spring Harbor Press, Cold Spring Harbor, N.Y. (1989)), or similar texts.

[0087] The polypeptides or protein molecule of the present invention may also include fusion protein or polypeptide molecules. A protein or polypeptide molecule that comprises one or more additional polypeptide regions not derived from that protein molecule is a “fusion” protein or polypeptide molecule. Such molecules may be derivatized to contain carbohydrate or other moieties (such as keyhole limpet hemocyanin, etc.). Fusion protein or polypeptide molecules of the present invention are preferably produced via recombinant means.

[0088] The protein or polypeptide molecules of the present invention may also include protein or polypeptide molecules encoded by all or a substantial portion of protein-encoding sequences in SEQ ID NO: 1 through SEQ ID NO: 4150 or complements thereof or, fragments or fusions thereof in which conservative, non-essential, or not relevant, amino acid residues have been added, replaced, or deleted. An example of such a homologue is the homologue protein from different strains or species. Such a homologue can be obtained by any of a variety of methods. For example, as indicated above, one or more of the disclosed sequences (all or a substantial portion of the protein-encoding sequences in SEQ ID NO: 1 through SEQ ID NO: 4150 or complements thereof) will be used to define a pair of primers that may be used to isolate the homologue-encoding nucleic acid molecules from any desired species. Such molecules can be expressed to yield homologues by recombinant means.

[0089] Antibodies

[0090] Another aspect of the present invention concerns antibodies, single-chain antigen binding molecules, or other proteins that specifically bind to one or more of the protein or polypeptide molecules of the present invention and their homologues, fusions or fragments. Such antibodies may be used to quantitatively or qualitatively detect the protein or polypeptide molecules of the present invention. As used herein, an antibody or polypeptide is said to “specifically bind” to a protein or polypeptide molecule of the present invention if such binding is not competitively inhibited by the presence of non-related molecules. In a preferred embodiment the antibodies of the present invention bind to protein or polypeptide molecules of the present invention, in a more preferred embodiment of the antibodies of the present invention bind to protein or polypeptide molecules derived from Xenorhabdus.

[0091] Nucleic acid molecules that encode all or part of the protein or polypeptide of the present invention can be expressed, via recombinant means, to yield protein or polypeptides that can in turn be used to elicit antibodies that are capable of binding the expressed protein or polypeptide. Such antibodies may be used in immunoassays for that protein or polypeptide. Such protein or polypeptide-encoding molecules, or their fragments may be “fusion” molecules (i.e., a part of a larger nucleic acid molecule) such that, upon expression, a fusion protein is produced. It may be desirable to derivatize the obtained antibodies, for example with a ligand group (such as biotin) or a detectable marker group (such as a fluorescent group, a radioisotope or an enzyme). Such antibodies may be used in immunoassays for that protein. In a preferred embodiment, such antibodies can be used to screen DNA expression libraries to isolate clones containing full-length insert of genes (Lerner, Adv. Immunol. 36: 1 (1984); Sambrook et al., Molecular Cloning: A Laboratory Manual; Cold Spring Harbor Laboratory Press: Cold Spring Harbor, (1989)).

[0092] The antibodies that specifically bind proteins and protein fragments of the present invention may be polyclonal or monoclonal, and may comprise intact immunoglobulins, or antigen binding portions of immunoglobulins (such as (F(ab′), F(ab′)₂ fragments), or single-chain immunoglobulins producible, for example, via recombinant means). It is understood that practitioners are familiar with the standard resource materials which describe specific conditions and procedures for the construction, manipulation and isolation of antibodies (see, for example, Harlow and Lane, Antibodies: A Laboratory Manual, Cold Spring Harbor Press, Cold Spring Harbor, N.Y. (1988)).

[0093] In a preferred embodiment, the antibodies of the present invention specifically bind to one or more of the insect inhibitory polypeptides or proteins of the present invention. Such antibodies may be used to detect the presence of such insect inhibitory polypeptides or proteins in a sample.

[0094] The present invention also provide a method for detecting an insect inhibitory polypeptide or protein in a biological sample, the method generally comprising: (1) obtaining a biological sample; (2) contacting the sample with an antibody that specifically binds to the polypeptide or protein, under conditions effective to allow the formation of complexes; and (3) detecting the complexes so formed.

[0095] Plant Constructs and Plant Transformants

[0096] The present invention also relates to a plant recombinant vector or construct comprising a structural nucleotide sequence encoding a Xenorhabdus protein or polypeptide. In a preferred embodiment, a plant recombinant vector or construct of the present invention comprises a structural nucleotide sequence encoding an insect inhibitory protein or polypeptide of the present invention. The present invention also relates to a transformed plant cell or plant comprising in its genome an exogenous nucleic acid encoding one or more Xenorhabdus or Photorhabdus proteins or polypeptides of the present invention. The present invention also relates to methods for creating a transgenic plant in which one or more Xenorhabdus or Photorhabdus proteins or polypeptides of the present invention are overexpressed.

[0097] By “exogenous” it is meant that a nucleic acid originates from outside the plant. An exogenous nucleic acid can have a naturally occurring or non-naturally occurring nucleotide sequence. One skilled in the art understands that an exogenous nucleic acid can be a heterologous nucleic acid derived from a different plant species than the plant into which the nucleic acid is introduced or can be a nucleic acid derived from the same plant species as the plant into which it is introduced.

[0098] The term “overexpression” refers to the expression of a polypeptide or protein encoded by an exogenous nucleic acid introduced into a host cell, wherein said polypeptide or protein is either not normally present in the host cell, or wherein said polypeptide or protein is present in said host cell at a higher level than that normally expressed from the endogenous gene encoding said polypeptide or protein. By “endogenous gene” refers to a native gene in its natural location in the genome of an organism.

[0099] The term “genome” as it applies to plant cells encompasses not only chromosomal DNA found within the nucleus, but organelle DNA found within subcellular components of the cell. DNAs of the present invention introduced into plant cells can therefore be either chromosomally integrated or organelle-localized. The term “genome” as it applies to bacteria encompasses both the chromosome and plasmids within a bacterial host cell. Encoding DNAs of the present invention introduced into bacterial host cells can therefore be either chromosomally integrated or plasmid-localized.

[0100] Method which are well known to those skilled in the art may be used to construct the plant recombinant construct or vector of the present invention. These method include in vitro recombinant DNA techniques, synthetic techniques, and in vivo genetic recombination. Such techniques are described in Sambrook et al., Molecular Cloning, A Laboratory Manual, Cold Spring Harbor Press, Plainview, N.Y. (1989); and Ausubel et al., Current Protocols in Molecular Biology, John Wiley & Sons, New York, N.Y. (1989).

[0101] A plant recombinant construct or vector of the present invention contains a structural nucleotide sequence encoding one or more Xenorhabdus or Photorhabdus proteins or polypeptides of the present invention and operably linked regulatory sequences or control elements.

[0102] The term “operably linked”, as used in reference to a regulatory sequence and a structural nucleotide sequence, means that the regulatory sequence causes regulated expression of the operably linked structural nucleotide sequence. “Expression” refers to the transcription and stable accumulation of sense or antisense RNA derived from the nucleic acid of the present invention. Expression may also refer to translation of mRNA into a polypeptide or protein. “Sense” RNA refers to RNA transcript that includes the mRNA and so can be translated into protein by the cell. “Antisense RNA” refers to a RNA transcript that is complementary to all or part of a target primary transcript or mRNA and that blocks the expression of a target gene (U.S. Pat. No. 5,107,065, incorporated herein by reference). The complementarity of an antisense RNA may be with any part of the specific gene transcript, i.e., at the 5′ non-coding sequence, 3′ non-translated sequence, introns, or the coding sequence. “RNA transcript” refers to the product resulting from RNA polymerase-catalyzed transcription of a DNA sequence. When the RNA transcript is a perfect complementary copy of the DNA sequence, it is referred to as the primary transcript or it may be a RNA sequence derived from post-transcriptional processing of the primary transcript and is referred to as the mature RNA.

[0103] “Regulatory sequences” or “control elements” refer to nucleotide sequences located upstream (5′ noncoding sequences), within, or downstream (3′ non-translated sequences) of a structural nucleotide sequence, and which influence the transcription, RNA processing or stability, or translation of the associated structural nucleotide sequence. Regulatory sequences may include promoters, translation leader sequences, introns, and polyadenylation recognition sequences.

[0104] The promoter sequence may consist of proximal and more distal upstream elements, the latter elements often referred to as enhancers. Accordingly, an “enhancer” is a DNA sequence which can stimulate promoter activity and may be an innate element of the promoter or a heterologous element inserted to enhance the level or tissue-specificity of a promoter. Promoters may be derived in their entirety from a native gene, or be composed of different elements derived from different promoters found in nature, or even comprise synthetic DNA segments. It is understood by those skilled in the art that different promoters may direct the expression of a gene in different tissues or cell types, or at different stages of development, or in response to different environmental conditions.

[0105] Promoters which are known or are found to cause transcription of DNA in plant cells can be used in the present invention. Such promoters may be obtained from a variety of sources such as plants and plant viruses. A number of promoters, including constitutive promoters, inducible promoters and tissue-specific promoters, that are active in plant cells have been described in the literature. It is preferred that the particular promoter selected should be capable of causing sufficient expression to result in the production of an effective amount of a protein to cause the desired phenotype. In addition to promoters that are known to cause transcription of DNA in plant cells, other promoters may be identified for use in the current invention by screening a plant cDNA library for genes that are selectively or preferably expressed in the target tissues and then determine the promoter regions.

[0106] The term “constitutive promoter” means a regulatory sequence which causes expression of a structural nucleotide sequence in most cells or tissues at most times. Constitutive promoters are active under most environmental conditions and states of development or cell differentiation. A variety of constitutive promoters are well known in the art. Examples of constitutive promoters that are active in plant cells include but are not limited to the nopaline synthase (NOS) promoters; the cauliflower mosaic virus (CaMV) 19S and 35S; the tobacco mosaic virus promoter; the figwort mosaic virus promoters; and actin promoters, such as the Arabidopsis actin gene promoter (see, e.g., Huang, Plant Mol. Biol. 33:125-139 (1997)).

[0107] The term “inducible promoter” refers to a regulatory sequence which causes conditional expression of a structural nucleotide sequence under the influence of changing environmental conditions or developmental conditions. Examples of inducible promoters include but are not limited to the light-inducible promoter from the small subunit of ribulose-1,5-bis-phosphate carboxylase (ssRUBISCO); the drought-inducible promoter of maize (Busk, Plant J. 11:1285-1295 (1997)); the cold, drought, and high salt inducible promoter from potato (Kirch, Plant Mol. Biol. 33:897-909 (1997)); a nitrate-inducible promoter derived from the spinach nitrite reductase gene (Back et al., Plant Mol. Biol. 17:9 (1991)); salicylic acid inducible promoter (Uknes et al., Plant Cell 5:159-169 (1993); Bi et al., Plant J. 8:235-245 (1995)); the auxin-response elements E1 promoter fragment (AuxREs) in the soybean (Glycine max L.) (Liu, Plant Physiol. 115:397-407 (1997)); the auxin-responsive Arabidopsis GST6 promoter (also responsive to salicylic acid and hydrogen peroxide) (Chen, Plant J. 10: 955-966 (1996)); the auxin-inducible parC promoter from tobacco (Sakai, 37:906-913 (1996)); a plant biotin response element (Streit, Mol. Plant Microbe Interact. 10:933-937 (1997)); the promoter responsive to the stress hormone abscisic acid (Sheen, Science 274:1900-1902 (1996)); the maize In2-2 promoter activated by benzenesulfonamide herbicide safeners (De Veylder, Plant Cell Physiol. 38:568-577 (1997)); a tetracycline-inducible promoter, such as the promoter for the Avena saliva L. (oat) arginine decarboxylase gene (Masgrau, Plant J. 11:465-473 (1997)); and a salicylic acid-responsive element (Stange, Plant J. 11:1315-1324 (1997)).

[0108] The term “tissue-specific promoter” means a regulatory sequence that causes transcriptions or enhanced transcriptions of DNA in specific cells or tissues at specific times during plant development, such as in vegetative tissues or reproductive tissues. Examples of tissue-specific promoters under developmental control include promoters that initiate transcription only (or primarily only) in certain tissues, such as vegetative tissues, e.g., roots, leaves or stems, or reproductive tissues, such as fruit, ovules, seeds, pollen, pistols, flowers, or any embryonic tissue. Reproductive tissue specific promoters may be, e.g., ovule-specific, embryo-specific, endosperm-specific, integument-specific, seed coat-specific, pollen-specific, petal-specific, sepal-specific, or some combination thereof. One of skill will recognize that a tissue-specific promoter may drive expression of operably linked sequences in tissues other than the target tissue. Thus, as used herein a tissue-specific promoter is one that drives expression preferentially in the target tissue, but may also lead to some expression in other tissues as well.

[0109] A variety of promoters specifically active in vegetative tissues, such as leaves, stems, roots and tubers, can also be used to express the nucleic acids of the invention. Examples of tuber-specific promoters include but are not limited to the class I and II patatin promoters (Bevan et al., EMBO J. 8: 1899-1906 (1986); Koster-Topfer et al., Mol Gen Genet. 219: 390-396 (1989); Mignery et al., Gene. 62: 27-44 (1988); Jefferson et al., Plant Mol. Biol. 14: 995-1006 (1990)), the promoter for the potato tuber ADPGPP genes, both the large and small subunits; the sucrose synthase promoter (Salanoubat and Belliard, Gene. 60: 47-56 (1987), Salanoubat and Belliard, Gene. 84: 181-185 (1989)); and the promoter for the major tuber proteins including the 22 kd protein complexes and proteinase inhibitors (Hannapel, Plant Physiol. 101: 703-704 (1993)). Examples of leaf-specific promoters include but are not limited to the ribulose biphosphate carboxylase (RBCS or RuBISCO) promoters (see, e.g., Matsuoka, Plant J. 6:311-319 (1994)); the light harvesting chlorophyll a/b binding protein gene promoter (see, e.g., Shiina, Plant Physiol. 115-477-483 (1997); Casal, Plant Physiol. 116:1533-1538 (1998)); and the Arabidopsis thaliana myb-related gene promoter (Atmyb5) (Li, FEBS Lett. 379:117-121 (1996)). Examples of root-specific promoter include but are not limited to the promoter for the acid chitinase gene (Samac et al., Plant Mol. Biol. 25: 587-596 (1994)); the root specific subdomains of the CaMV35S promoter that have been identified (Lam et al., Proc. Natl. Acad. Sci. (U.S.A.) 86:7890-7894 (1989)); the ORF13 promoter from Agrobacterium rhizogenes which exhibits high activity in roots (Hansen, Mol. Gen. Genet. 254:337-343 (1997)); the promoter for the tobacco root-specific gene TobRB7 (Yamamoto, Plant Cell 3:371-382 (1991)); and the root cell specific promoters reported by Conkling et al. (Conkling et al., Plant Physiol. 93:1203-1211 (1990)).

[0110] Another class of useful vegetative tissue-specific promoters are meristermatic (root tip and shoot apex) promoters. For example, the “SHOOTMERISTEMLESS” and “SCARECROW” promoters, which are active in the developing shoot or root apical meristems (Di Laurenzio, Cell 86:423-433 (1996); Long, Nature 379:66-69 (1996)), can be used. Another example of a useful promoter is that which controls the expression of 3-hydroxy-3-methylglutaryl coenzyme A reductase HMG2 gene, whose expression is restricted to meristematic and floral (secretory zone of the stigma, mature pollen grains, gynoecium vascular tissue, and fertilized ovules) tissues (see, e.g., Enjuto, Plant Cell. 7:517-527 (1995)). Also another example of a useful promoter is that which controls the expression of lad-related genes from maize and other species which show meristern-specific expression (see, e.g., Granger, Plant Mol. Biol. 31:373-378 (1996); Kerstetter, Plant Cell 6:1877-1887 (1994); Hake, Philos. Trans. R. Soc. Lond. B. Biol. Sci. 350:45-51 (1995). Another example of a meristematic promoter is the Arabidopsis thaliana KNAT1 promoter. In the shoot apex, KNAT1 transcript is localized primarily to the shoot apical meristem; the expression of KNAT1 in the shoot meristem decreases during the floral transition and is restricted to the cortex of the inflorescence stem (see, e.g., Lincoln, Plant Cell 6:1859-1876 (1994)).

[0111] Suitable seed-specific promoters can be derived from the following genes: MAC1 from maize (Sheridan, Genetics 142:1009-1020 (1996); Cat3 from maize (GenBank No. L05934, Abler, Plant Mol. Biol. 22:10131-1038 (1993); vivparous-1 from Arabidopsis (Genbank No. U93215); Atimyc1 from Arabidopsis (Urao, Plant Mol. Biol. 32:571-57 (1996); Conceicao, Plant 5:493-505 (1994); napA from Brassica napus (GenBank No. J02798); the napin gene family from Brassica napus (Sjodahl, Planta 197:264-271 (1995)).

[0112] The ovule-specific BEL1 gene described in Reiser (1995) Cell 83:735-742, GenBank No. U39944, can also be used. See also Ray (1994) Proc. Natl. Acad. Sci. USA 91:5761-5765. The egg and central cell specific FIEEI promoter is also a useful reproductive tissue-specific promoter.

[0113] A maize pollen-specific promoter has been identified in maize (Guerrero (1990) Mol. Gen. Genet. 224:161-168). Other genes specifically expressed in pollen are described, e.g., by Wakeley (1998) Plant Mol. Biol. 37:187-192; Ficker (1998) Mol. Gen. Genet. 257:132-142; Kulikauskas (1997) Plant Mol. Biol. 34:809-814; Treacy (1997) Plant Mol. Biol. 34:603-611.

[0114] Promoters derived from genes encoding embryonic storage proteins, which includes the gene encoding the 2S storage protein from Brassica napus (Dasgupta, Gene 133:301-302 (1993); the 2s seed storage protein gene family from Arabidopsis; the gene encoding oleosin 20 kD from Brassica napus (GenBank No. M63985); the genes encoding oleosin A (Genbank No. U09118) and oleosin B (Genbank No. U09119) from soybean; the gene encoding oleosin from Arabidopsis (Genbank No. Z17657); the gene encoding oleosin 18 kD from maize (GenBank No. J05212, Lee, Plant Mol. Biol. 26:1981-1987 (1994)); and the gene encoding low molecular weight sulphur rich protein from soybean (Choi, Mol Gen, Genet. 246:266-268 (1995)), can also be used.

[0115] Promoters derived from genes encoding for zein genes (including the 15 kD, 16 kD, 19 kD, 22 kD, 27 kD, and gamma genes) (Pedersen et al., Cell 29: 1015-1026 (1982)) can be also used. The zeins are a group of storage proteins found in maize endosperm.

[0116] Other promoters known to function, for example, in maize, include the promoters for the following genes: waxy, Brittle, Shrunken 2, Branching enzymes I and II, starch synthases, debranching enzymes, oleosins, glutelins, and sucrose synthases. A particularly preferred promoter for maize endosperm expression is the promoter for the glutelin gene from rice, more particularly the Osgt-1 promoter (Zheng et al., Mol. Cell. Biol. 13: 5829-5842 (1993), herein incorporated by reference in its entirety). Examples of promoters suitable for expression in wheat include those promoters for the ADPglucose pyrophosphorylase (ADPGPP) subunits, the granule bound and other starch synthases, the branching and debranching enzymes, the embryogenesis-abundant proteins, the gliadins, and the glutenins. Examples of such promoters in rice include those promoters for the ADPGPP subunits, the granule bound and other starch synthases, the branching enzymes, the debranching enzymes, sucrose synthases, and the glutelins. A particularly preferred promoter is the promoter for rice glutelin, Osgt-1. Examples of such promoters for barley include those for the ADPGPP subunits, the granule bound and, other starch synthases, the branching enzymes, the debranching enzymes, sucrose synthases, the hordeins, the embryo globulins, and the aleurone specific proteins.

[0117] A tomato promoter active during fruit ripening, senescence and abscission of leaves and, to a lesser extent, of flowers can be used (Blume, Plant J. 12:731-746 (1997)). Other exemplary promoters include the pistol specific promoter in the potato (Solarium tuberosum L.) SK2 gene, encoding a pistil-specific basic endochitinase (Ficker, Plant Mol. Biol. 35:425-431 (1997)); the Blec4 gene from pea (Pisum sativum cv. Alaska), active in epidermal tissue of vegetative and floral shoot apices of transgenic alfalfa. This makes it a useful tool to target the expression of foreign genes to the epidermal layer of actively growing shoots. The tissue specific E8 promoter from tomato is also useful for directing gene expression in fruits.

[0118] It is recognized that additional promoters that may be utilized are described, for example, in U.S. Pat. Nos. 5,378,619, 5,391,725, 5,428,147, 5,447,858, 5,608,144, 5,608,144, 5,614,399, 5,633,441, 5,633,435, and 4,633,436, all of which are herein incorporated in their entirety. In addition, a tissue specific enhancer may be used (Fromm et al., The Plant Cell 1:977-984 (1989), herein incorporated by reference in its entirety). It is further recognized that since in most cases the exact boundaries of regulatory sequences have not been completely defined, DNA fragments of different lengths may have identical promoter activity.

[0119] The “translation leader sequence” refers to a DNA sequence located between the promoter sequence of a gene and the coding sequence. The translation leader sequence is present in the fully processed mRNA upstream of the translation start sequence. The translation leader sequence may affect processing of the primary transcript to mRNA, mRNA stability or translation efficiency. Examples of translation leader sequences have been described (Turner, R. and Foster, G. D. (1995) Molecular Biotechnology 3:225).

[0120] The “3′ non-translated sequences” refer to DNA sequences located downstream of a structural nucleotide sequence and include sequences encoding polyadenylation and other regulatory signals capable of affecting mRNA processing or gene expression. The polyadenylation signal functions in plants to cause the addition of polyadenylate nucleotides to the 3′ end of the mRNA precursor. The polyadenylation sequence can be derived from the natural gene, from a variety of plant genes, or from T-DNA. An example of the polyadenylation sequence is the nopaline synthase 3′ sequence (NOS 3′; Fraley et al., Proc. Natl. Acad. Sci. USA 80: 4803-4807 (1983)). The use of different 3′ non-translated sequences is exemplified by Ingelbrecht et al., (1989) Plant Cell 1:671-680.

[0121] Generally, optimal expression in monocotyledonous and some dicotyledonous plants is obtained when an intron sequence is inserted between the promoter sequence and the structural gene sequence or, optionally, may be inserted in the structural coding sequence to provide an interrupted coding sequence. An example of such an intron sequence is the HSP 70 intron described in WO 93/19189.

[0122] A recombinant vector or construct of the present invention will typically comprise a selectable marker which confers a selectable phenotype on plant cells. Selectable markers may also be used to select for plants or plant cells that contain the exogenous nucleic acids encoding polypeptides or proteins of the present invention. The marker may encode biocide resistance, antibiotic resistance (e.g., kanamycin, G418 bleomycin, hygromycin, etc.), or herbicide resistance (e.g., glyphosate, etc.). Examples of selectable markers include, but are not limited to, a neo gene (Potrykus et al., Mol. Gen. Genet. 199:183-188 (1985)) which codes for kanamycin resistance and can be selected for using kanamycin, G418, etc.; a bar gene which codes for bialaphos resistance; a mutant EPSP synthase gene (Hinchee et al., Bio/Technology 6:915-922 (1988)) which encodes glyphosate resistance; a nitrilase gene which confers resistance to bromoxynil (Stalker et al., J. Biol. Chem. 263:6310-6314 (1988)); a mutant acetolactate synthase gene (ALS) which confers imidazolinone or sulphonylurea resistance (European Patent Application 154,204 (Sep. 11, 1985)); and a methotrexate resistant DHFR gene (Thillet et al., J. Biol. Chem. 263:12500-12508 (1988)).

[0123] A recombinant vector or construct of the present invention may also include a screenable marker. Screenable markers may be used to monitor expression. Exemplary screenable markers include a β-glucuronidase or uidA gene (GUS) which encodes an enzyme for which various chromogenic substrates are known (Jefferson, Plant Mol. Biol, Rep. 5:387-405 (1987); Jefferson et al., EMBO J. 6:3901-3907 (1987)); an R-locus gene, which encodes a product that regulates the production of anthocyanin pigments (red color) in plant tissues (Dellaporta et al., Stadler Symposium 11:263-282 (1988)); a β-lactamase gene (Sutcliffe et al., Proc. Natl. Acad. Sci. (U.S.A.) 75:3737-3741 (1978)), a gene which encodes an enzyme for which various chromogenic substrates are known (e.g., PADAC, a chromogenic cephalosporin); a luciferase gene (Ow et al., Science 234:856-859 (1986)) a xylE gene (Zukowsky et al., Proc. Natl. Acad. Sci. (U.S.A.) 80:1101-1105 (1983)) which encodes a catechol dioxygenase that can convert chromogenic catechols; an α-amylase gene (Ikatu et al., Bio/Technol. 8:241-242 (1990)); a tyrosinase gene (Katz et al., J. Gen. Microbiol. 129:2703-2714 (1983)) which encodes an enzyme capable of oxidizing tyrosine to DOPA and dopaquinone which in turn condenses to melanin; an α-galactosidase, which will turn a chromogenic α-galactose substrate.

[0124] Included within the terms “selectable or screenable marker genes” are also genes which encode a secretable marker whose secretion can be detected as a means of identifying or selecting for transformed cells. Examples include markers which encode a secretable antigen that can be identified by antibody interaction, or even secretable enzymes which can be detected catalytically. Secretable proteins fall into a number of classes, including small, diffusible proteins detectable, e.g., by ELISA, small active enzymes detectable in extracellular solution (e.g., α-amylase, β-lactamase, phosphinothricin transferase), or proteins which are inserted or trapped in the cell wall (such as proteins which include a leader sequence such as that found in the expression unit of extension or tobacco PR-S). Other possible selectable and/or screenable marker genes will be apparent to those of skill in the art.

[0125] In addition to a selectable marker, it may be desirous to use a reporter gene. In some instances a reporter gene may be used with or without a selectable marker. Reporter genes are genes which are typically not present in the recipient organism or tissue and typically encode for proteins resulting in some phenotypic change or enzymatic property. Examples of such genes are provided in K. Wising et al. Ann. Rev. Genetics, 22, 421 (1988), which is incorporated herein by reference. Preferred reporter genes include the beta-glucuronidase (GUS) of the uidA locus of E. coli; the chloramphenicol acetyl transferase gene from Tn9 of E. coli, the green fluorescent protein from the bioluminescent jellyfish Aequorea victoria, and the luciferase genes from firefly Photinus pyralis. An assay for detecting reporter gene expression may then be performed at a suitable time after said gene has been introduced into recipient cells. A preferred such assay entails the use of the gene encoding beta-glucuronidase (GUS) of the uidA locus of E. coli as described by Jefferson et al., (1987 Biochem. Soc. Trans. 15, 17-19) to identify transformed cells.

[0126] In preparing the DNA constructs of the present invention, the various components of the construct or fragments thereof will normally be inserted into a convenient cloning vector, e.g., a plasmid that is capable of replication in a bacterial host, e.g., E. coli. Numerous vectors exist that have been described in the literature, many of which are commercially available. After each cloning, the cloning vector with the desired insert may be isolated and subjected to further manipulation, such as restriction digestion, insertion of new fragments or nucleotides, ligation, deletion, mutation, resection, etc. so as to tailor the components of the desired sequence. Once the construct has been completed, it may then be transferred to an appropriate vector for further manipulation in accordance with the manner of transformation of the host cell.

[0127] A recombinant vector or construct of the present invention may also include a chloroplast transit peptide, in order to target the polypeptide or protein of the present invention to the plastid. The term “plastid” refers to the class of plant cell organelles that includes amyloplasts, chloroplasts, chromoplasts, elaioplasts, eoplasts, etioplasts, leucoplasts, and proplastids. These organelles are self-replicating, and contain what is commonly referred to as the “chloroplast genome,” a circular DNA molecule that ranges in size from about 120 to about 217 kb, depending upon the plant species, and which usually contains an inverted repeat region. Many plastid-localized proteins are expressed from nuclear genes as precursors and are targeted to the plastid by a chloroplast transit peptide (CTP), which is removed during the import steps. Examples of such chloroplast proteins include the small subunit of ribulose-1,5-biphosphate carboxylase (ssRUBISCO, SSU), 5-enolpyruvateshikimate-3-phosphate synthase (EPSPS), ferredoxin, ferredoxin oxidoreductase, the light-harvesting-complex protein I and protein II, and thioredoxin F. It has been demonstrated that non-plastid proteins may be targeted to the chloroplast by use of protein fusions with a CTP and that a CTP sequence is sufficient to target a protein to the plastid. Those skilled in the art will also recognize that various other chimeric constructs can be made that utilize the functionality of a particular plastid transit peptide to import the enzyme into the plant cell plastid depending on the promoter tissue specificity.

[0128] The present invention also provide a transgenic plant comprising in its genome an isolated nucleic acid which comprises: (A) a 5′ non-coding sequence which functions in the cell to cause the production of a mRNA molecule; which is linked to (B) a structural nucleotide sequence, wherein the structural nucleotide sequence encodes a Xenorhabdus protein or polypeptide of the present invention; which is linked to (C) a 3′ non-translated sequence that functions in said cell to cause termination of transcription. In a preferred embodiment, the amino acid sequence of the above described polypeptide or protein is substantially identical to a member selected from the group consisting of SEQ ID NO: 4385 to SEQ ID NO: 8409.

[0129] The term “transgenic plant” refers to a plant that contains an exogenous nucleic acid, which can be derived from the same plant species or from a different plant species. Transgenic plants of the present invention preferably have incorporated into their genome or transformed into their chloroplast or plastid genomes a selected polynucleotide (or “transgene”), that comprises at least a structural nucleotide sequence that encodes an insect inhibitory polypeptide the amino acid sequence of which is selected from the group consisting of SEQ ID NO: 4385 to SEQ ID NO: 8409. Transgenic plants are also meant to comprise progeny (descendant, offspring, etc.) of any generation of such a transgenic plant. A seed of any generation of all such transgenic insect-resistant plants wherein said seed comprises a DNA sequence encoding the polypeptide of the present invention is also an important aspect of the invention.

[0130] The DNA constructs of the present invention may be introduced into the genome of a desired plant host by a variety of conventional transformation techniques, which are well known to those skilled in the art. Preferred methods of transformation of plant cells or tissues are the Agrobacterium mediated transformation method and the biolistics or particle-gun mediated transformation method. Suitable plant transformation vectors for the purpose of Agrobacterium mediated transformation include those derived from a Ti plasmid of Agrobacterium tumefaciens, as well as those disclosed, e.g., by Herrera-Estrella et al., Nature 303:209 (1983); Bevan, Nucleic Acids Res. 12: 8711-8721 (1984); Klee et al., Bio-Technology 3 (7): 637-642 (1985); and EPO publication 120,516. In addition to plant transformation vectors derived from the Ti or root-inducing (Ri) plasmids of Agrobacterium, alternative methods can be used to insert the DNA constructs of this invention into plant cells. Such methods may involve, but are not limited to, for example, the use of liposomes, electroporation, chemicals that increase free DNA uptake, free DNA delivery via microprojectile bombardment, and transformation using viruses or pollen.

[0131] A plasmid expression vector suitable for the introduction of a nucleic acid encoding a polypeptide or protein of the present invention in monocots using electroporation or particle-gun mediated transformation is composed of the following: a promoter that is constitutive or tissue-specific; an intron that provides a splice site to facilitate expression of the gene, such as the Hsp70 intron (PCT Publication WO93/19189); and a 3′ polyadenylation sequence such as the nopaline synthase 3′ sequence (NOS 3′; Fraley et al., Proc. Natl. Acad. Sci. USA 80: 4803-4807 (1983)). This expression cassette may be assembled on high copy replicons suitable for the production of large quantities of DNA.

[0132] An example of a useful Ti plasmid cassette vector for plant transformation is pMON17227. This vector is described in PCT Publication WO 92/04449 and contains a gene encoding an enzyme conferring glyphosate resistance (denominated CP4), which is an excellent selection marker gene for many plants. The gene is fused to the Arabidopsis EPSPS chloroplast transit peptide (CTP2) and expressed from the FMV promoter as described therein.

[0133] When adequate numbers of cells (or protoplasts) containing the exogenous nucleic acid encoding a polypeptide or protein of the present invention are obtained, the cells (or protoplasts) are regenerated into whole plants. Choice of methodology for the regeneration step is not critical, with suitable protocols being en available for hosts from Leguminosae (alfalfa, soybean, clover, etc.), Umbelliferae (carrot, celery, parsnip), Cruciferae (cabbage, radish, canola/rapeseed, etc.), Cucurbitaceae (melons and cucumber), Gramineae (wheat, barley, rice, maize, etc.), Solanaceae (potato, tobacco, tomato, peppers), various floral crops, such as sunflower, and nut-bearing trees, such as almonds, cashews, walnuts, and pecans. See, for example, Ammirato et al., Handbook of Plant Cell Culture—Crop Species. Macmillan Publ. Co. (1984); Shimamoto et al., Nature 338:274-276 (1989); Fromm, UCLA Symposium on Molecular Strategies for Crop A Improvement, Apr. 16-22, 1990. Keystone, Colo. (1990); Vasil et al., Bio/Technology 8:429-434 (1990); Vasil et al., Bio/Technology 10:667-674 (1992); Hayashimoto, Plant Physiol. 93:857-863 (1990); and Datta et al., Bio-technology 8:736-740 (1990). Regeneration can also be obtained from plant callus, explants, organs, or parts thereof. Such regeneration techniques are described generally in Klee et al., Ann. Rev. Plant Phys. 38:467-486 (1987).

[0134] A transgenic plant formed using Agrobacterium transformation methods typically contains a single exogenous gene on one chromosome. Such transgenic plants can be referred to as being heterozygous for the added exogenous gene. More preferred is a transgenic plant that is homozygous for the added exogenous gene; i.e., a transgenic plant that contains two added exogenous genes, one gene at the same locus on each chromosome of a chromosome pair. A homozygous transgenic plant can be obtained by sexually mating (selfing) an independent segregant transgenic plant that contains a single exogenous gene, germinating some of the seed produced and analyzing the resulting plants produced for the exogenous gene of interest.

[0135] The development or regeneration of transgenic plants containing the exogenous nucleic acid that encodes a polypeptide or protein of interest is well known in the art. Preferably, the regenerated plants are self-pollinated to provide homozygous transgenic plants, as discussed above. Otherwise, pollen obtained from the regenerated plants is crossed to seed-grown plants of agronomically important lines. Conversely, pollen from plants of these important lines is used to pollinate regenerated plants. A transgenic plant of the present invention containing a desired polypeptide or protein of the present invention is cultivated using methods well known to one skilled in the art.

[0136] Transgenic plants, that can be generated by practice of the present invention, include but are not Ira limited to Acacia, alfalfa, aneth, apple, apricot, artichoke, arugula, asparagus, avocado, banana, barley, beans, beet, blackberry, blueberry, broccoli, brussels sprouts, cabbage, canola, cantaloupe, carrot, cassava, cauliflower, celery, cherry, cilantro, citrus, clementines, coffee, corn, cotton, cucumber, Douglas fir, eggplant, endive, escarole, eucalyptus, fennel, figs, gourd, grape, grapefruit, honey dew, jicama, kiwifruit, lettuce, leeks, lemon, lime, Loblolly pine, mango, melon, mushroom, nut, oat, okra, onion, orange, an ornamental plant, papaya, parsley, pea, peach, peanut, pear, pepper, persimmon, pine, pineapple, plantain, plum, pomegranate, poplar, potato, pumpkin, quince, radiata pine, radicchio, radish, raspberry, rice, rye, sorghum, Southern pine, soybean, spinach, squash, strawberry, sugarbeet, sugarcane, sunflower, sweet potato, sweetgum, tangerine, tea, tobacco, tomato, turf, a vine, watermelon, wheat, yams, and zucchini.

[0137] The present invention also provides parts of the transgenic plants of present invention. Plant parts, without limitation, include seed, endosperm, ovule and pollen. In a particularly preferred embodiment of the present invention, the plant part is a seed.

[0138] The present invention also further provides method for generating a transgenic plant comprising the steps of a) introducing into the genome of the plant an exogenous nucleic acid, wherein the exogenous nucleic acid comprises in the 5′ to 3′ direction i) a promoter that functions in the cells of said plant, said promoter operably linked to; ii) a structural nucleic acid sequence encoding a polypeptide or protein of the present invention, said structural nucleic acid sequence operably linked to; iii) a 3′ non-translated nucleic acid sequence that functions in said cells of said plant to cause transcriptional termination; b) obtaining transformed plant cells containing the nucleic acid sequence of step (a); and c) regenerating from said transformed plant cells a transformed plant in which said polypeptide or protein is overexpressed.

[0139] Any of the isolated nucleic acid molecules of the present invention may be introduced into a plant cell in a permanent or transient manner in combination with other genetic elements such as vectors, promoters, enhancers etc. Further any of the nucleic acid molecules encoding a Xenorhabdus protein or polypeptide of the present invention may be introduced into a plant cell in a manner that allows for over expression of the protein or polypeptide encoded by the nucleic acid molecule.

[0140] Antibodies have been expressed in plants (Hiatt et al., Nature 342:76-78 (1989); Conrad and Fielder, Plant Mol. Biol. 26:1023-1030 (1994)). Cytoplasmic expression of a scFv (single-chain Fv antibodies) has been reported to delay infection by artichoke mottled crinkle virus. Transgenic plants that express antibodies directed against endogenous proteins may exhibit a physiological effect (Philips et al., EMBO J. 16:4489-4496 (1997); Marion-Poll, Trends in Plant Science 2:447-448 (1997)). For example, expressed anti-abscisic antibodies reportedly result in a general perturbation of seed development (Philips et al., EMBO J. 16:4489-4496 (1997)).

[0141] Antibodies that are catalytic may also be expressed in plants (abzymes). The principle behind abzymes is that since antibodies may be raised against many molecules, this recognition ability can be directed toward generating antibodies that bind transition states to force a chemical reaction forward (Persidas, Nature Biotechnology 15:1313-1315 (1997); Baca et al., Ann. Rev. Biophys. Biomol. Struct. 26:461-493 (1997)). The catalytic abilities of abzymes may be enhanced by site directed mutagenesis. Examples of abzymes are, for example, set forth in U.S. Pat. No. 5,658,753; U.S. Pat. No. 5,632,990; U.S. Pat. No. 5,631,137; U.S. Pat. No. 5,602,015; U.S. Pat. No. 5,559,538; U.S. Pat. No. 5,576,174; U.S. Pat. No. 5,500,358; U.S. Pat. No. 5,318,897; U.S. Pat. No. 5,298,409; U.S. Pat. No. 5,258,289 and U.S. Pat. No. 5,194,585, all of which are herein incorporated in their entirety.

[0142] It is understood that any of the antibodies of the present invention may be expressed in plants and that such expression can result in a physiological effect. It is also understood that any of the expressed antibodies may be catalytic.

[0143] Microbial Constructs and Transformed Microbial Cells

[0144] The nucleotide sequences of the present invention may be introduced into a wide variety of prokaryotic and eukaryotic microorganism hosts to express the Xenorhabdus or Photorhabdus polypeptide or protein of interest, particularly the insect inhibitory polypeptides or proteins of the present invention. The term “microorganism” includes prokaryotic and eukaryotic microbial species such as bacteria and fungi. Fungi include yeast and filamentous fungi. Illustrative prokaryotes, both Gram-negative and Gram-positive, include Enterobacteriaceae, such as Escherichia, Erwinia, Shigella, Salmonella, and Proteus; Bacillaceae; Rhizobiceae, such as Rhizobium; Spirillaceae, such as photobacterium, Zymomonas, Serratia, Aeromonas, Vibrio, Desulfovibrio, Spirillum; Lactobacillaceae; Pseudomonadaceae, such as Pseudomonas and Acetobacter; Azotobacteraceae, Actinomycetales, and Nitrobacteraceae. Among eukaryotes are fungi, such as Phycomycetes and Ascomycetes, which includes yeast, such as Saccharomyces and Schizosaccharomyces; and Basidiomycetes yeast, such as Rhodotorula, Aureobasidium, Sporobolomyces, and the like.

[0145] For the purpose of plant protection against insects, a large number of microorganisms known to inhabit the phylloplane (the surface of the plant leaves) and/or the rhizosphere (the soil surrounding plant roots) of a wide variety of important crops may also be desirable host cells for manipulation, propagation, storage, delivery and/or mutagenesis of the disclosed recombinant constructs. These microorganisms include bacteria, algae, and fungi. Of particular interest are microorganisms, such as bacteria, e.g., genera Bacillus (including the species and subspecies B. thuringiensis kurstaki HD-1, B. thuringiensis kurstaki HD-73, B. thuringiensis sotto, B. thuringiensis berliner, B. thuringiensis thuringiensis, B. thuringiensis tolworthi, B. thuringiensis dendrolimus, B. thuringiensis alesti, B. thuringiensis galleriae, B. thuringiensis aizawai, B. thuringiensis subtoxicus, B. thuringiensis entomocidus, B. thuringiensis tenebrionis and B. thuringiensis san diego); Pseudomonas, Erwinia, Serratia, Klebsiella, Zanthomonas, Streptomyces, Rhizobium, Rhodopseudomonas, Methylophilius, Agrobacterium, Acetobacter, Lactobacillus, Arthrobacter, Azotobacter, Leuconostoc, and Alcaligenes; fungi, particularly yeast, e.g., genera Saccharomyces, Cryptococcus, Kluyveromyces, Sporobolomyces, Rhodotorula, and Aureobasidium. Of particular interest are such phytosphere bacterial species as Pseudomonas syringae, Pseudomonas fluorescens, Serratia marcescens, Acetobacter xylinum, Agrobacterium tumefaciens, Rhodobacter sphaeroides, Xanthomonas campestris, Rhizobium melioti, Alcaligenes eutrophus, and Azotobacter vinlandii; and phytosphere yeast species such as Rhodotorula rubra, R. glutinis, R. marina, R. aurantiaca, Cryptococcus albidus, C. diffluens, C. laurentii, Saccharomyces rosei, S. pretoriensis, S. cerevisiae, Sporobolomyces roseus, S. odorus, Kluyveromyces veronae, and Aureobasidium pollulans.

[0146] It is well known that exogenous nucleic acids encoding polypeptides of interest can be introduced into a microbial host cell, such as a bacterial cell or a fungal cell, using a recombinant construct. The present invention also relates to a fungal or bacterial recombinant construct comprising a structural nucleotide sequence encoding a Xenorhabdus or Photorhabdus protein or polypeptide. In a preferred embodiment, the structural nucleotide sequence encodes an insect inhibitory protein or polypeptide of the present invention. The present invention also relates to a bacterial or fungal cell comprising a bacterial or fungal recombinant vector. The present invention also relates to methods for obtaining a recombinant bacterial or fungal host cell, comprising introducing into a bacterial or fungal host cell an exogenous nucleic acid molecule.

[0147] The bacterial recombinant vector may be a linear or a closed circular plasmid. The vector system may be a single vector or plasmid or two or more vectors or plasmids which together contain the total DNA to be introduced into the genome of the bacterial host. In addition, the bacterial vector may be an expression vector. Nucleic acid molecules encoding Xenorhabdus proteins or polypeptide can, for example, be suitably inserted into a replicable vector for expression in a bacterium under the control of a suitable promoter for that bacterium. Many vectors are available for this purpose, and selection of the appropriate vector will depend mainly on the size of the nucleic acid to be inserted into the vector and the particular host cell to be transformed with the vector. Each vector contains various components depending on its function (amplification of DNA or expression of DNA) and the particular host cell with which it is compatible. The vector components for bacterial transformation generally include, but are not limited to, one or more of the following: a signal sequence, an origin of replication, one or more selectable marker genes, and an inducible promoter allowing the expression of exogenous DNA.

[0148] In general, plasmid vectors containing replicon and control sequences that are derived from species compatible with the host cell are used in connection with bacterial hosts. The vector ordinarily carries a replication site, as well as marking sequences that are capable of providing phenotypic selection in transformed cells. For example, E. coli is typically transformed using pBR322, a plasmid derived from an E. coli species (see, e.g., Bolivar et al., Gene 2:95 (1977)). pBR322 contains genes for ampicillin and tetracycline resistance and thus provides easy means for identifying transformed cells. The pBR322 plasmid, or other microbial plasmid or phage, also generally contains, or is modified to contain, promoters that can be used by the microbial organism for expression of the selectable marker genes.

[0149] Nucleic acid molecules encoding Xenorhabdus proteins or polypeptides may be expressed not only directly, but also as a fusion with another polypeptide, preferably a signal sequence or other polypeptide having a specific cleavage site at the N-terminus of the mature polypeptide. In general, the signal sequence may be a component of the vector, or it may be a part of the polypeptide encoding DNA that is inserted into the vector. The heterologous signal sequence selected should be one that is recognized and processed (i.e., cleaved by a signal peptidase) by the host cell. For bacterial host cells that do not recognize and process the native polypeptide signal sequence, the signal sequence is substituted by a bacterial signal sequence selected, for example, from the group consisting of the alkaline phosphatase, β-lactamase or heat-stable enterotoxin II leaders and the like.

[0150] Both expression and cloning vectors contain a nucleotide sequence that enables the vector to replicate in one or more selected host cells. Generally, in cloning vectors this sequence is one that enables the vector to replicate independently of the host chromosomal DNA, and includes origins of replication or autonomously replicating sequences. Such sequences are well known for a variety of bacteria.

[0151] Expression and cloning vectors also generally contain a selection gene, also termed a selectable marker. This gene encodes a protein necessary for the survival or growth of transformed host cells grown in a selective culture medium. Host cells not transformed with the vector containing the selection gene will not survive in the culture medium. Typical selection genes encode proteins that (a) confer resistance to antibiotics or other toxins, e.g., ampicillin, neomycin, methotrexate, or tetracycline, (b) complement auxotrophic deficiencies, or (c) supply critical nutrients not available from complex media, e.g., the gene encoding D-alanine racemase for Bacilli. One example of a selection scheme utilizes a drug to arrest growth of a host cell. Those cells that are successfully transformed with a heterologous protein homologue or fragment thereof produce a protein conferring drug resistance and thus survive the selection regimen.

[0152] The expression vector for producing a polypeptide can also contains an inducible promoter that is recognized by the host bacterial organism and is operably linked to the nucleic acid encoding, for example, the nucleic acid molecule encoding the Xenorhabdus protein or polypeptide of interest. Inducible promoters suitable for use with bacterial hosts include the β-lactamase, E. coli λ phage P_{L} and P_{R}, and E. coli galactose, arabinose, alkaline phosphatase, tryptophan (trp), and lactose operon promoter systems and variations thereof (Chang et al., Nature 275:615 (1978); Goeddel et al., Nature 281:544 (1979); Guzman et al., J. Bacteriol. 174:7716-7728 (1992); Goeddel, Nucleic Acids Res. 8:4057 (1980); EP 36,776) and hybrid promoters such as the tac promoter (deBoer et al., Proc. Natl. Acad. Sci. (USA) 80:21-25 (1983)). However, other known bacterial inducible promoters are suitable (Siebenlist et al., Cell 20:269 (1980)).

[0153] Promoters for use in bacterial systems also generally contain a Shine-Dalgarno (S.D.) sequence or a consensus sequence thereof operably linked to the DNA encoding the polypeptide of interest. The promoter can be removed from the bacterial source DNA by restriction enzyme digestion and inserted into the vector containing the desired DNA coding sequence, or vice versa.

[0154] Alternatively, the expression constructs can be integrated into the bacterial genome with an integrating vector. Integrating vectors typically contain at least one sequence homologous to the bacterial chromosome that allows the vector to integrate. Integrations appear to result from recombinations between homologous DNA in the vector and the bacterial chromosome. For example, integrating vectors constructed with DNA from various Bacillus strains integrate into the Bacillus chromosome (E.P.O. Pub. No. 127,328). Integrating vectors may also be comprised of bacteriophage or transposon sequences.

[0155] Construction of suitable vectors containing one or more of the above-listed components employs standard recombinant DNA techniques. Isolated plasmids or DNA fragments are cleaved, tailored, and re-ligated in the form desired to generate the plasmids required. Examples of available bacterial expression vectors include, but are not limited to, the multifunctional E. coli cloning and expression vectors such as Bluescript™ (Stratagene, La Jolla, Calif.), in which, for example, a xenorhabdus protein or polypeptide of the present invention, may be ligated into the vector in frame with sequences for the amino-terminal Met and the subsequent 7 residues of β-galactosidase so that a hybrid protein is produced; pIN vectors (Van Heeke and Schuster J. Biol. Chem. 264:5503-5509 (1989)); and the like. pGEX vectors (Promega, Madison Wis.) may also be used to express foreign polypeptides as fusion proteins with glutathione S-transferase (GST). In general, such fusion proteins are soluble and can easily be purified from lysed cells by adsorption to glutathione-agarose beads followed by elution in the presence of free glutathione. Proteins made in such systems are designed to include heparin, thrombin or factor XA protease cleavage sites so that the cloned polypeptide of interest can be released from the GST moiety at will.

[0156] It is, of course, necessary to select the appropriate bacteria taking into consideration replicability of the replicon in the cells of a bacterium. For example, E. coli, Serratia, or Salmonella species can be suitably used as the host when well known plasmids such as pBR322, pBR325, pACYC177, or pKN410 are used to supply the replicon. E. coli strain W3110 is a preferred host or parent host because it is a common host strain for recombinant DNA product fermentations. Preferably, the host cell should secrete minimal amounts of proteolytic enzymes.

[0157] Host cells are transfected and preferably transformed with the above-described vectors and cultured in conventional nutrient media modified as appropriate for inducing promoters, selecting transformants, or amplifying the genes encoding the desired sequences.

[0158] Numerous methods of transfection are known to the ordinarily skilled artisan, for example, calcium phosphate and electroporation. Depending on the host cell used, transformation is done using standard techniques appropriate to such cells. The calcium treatment employing calcium chloride, as described in section 1.82 of Sambrook et al., Molecular Cloning: A Laboratory Manual, New York: Cold Spring Harbor Laboratory Press, (1989), is generally used for bacterial cells that contain substantial cell-wall barriers. Another method for transformation employs polyethylene glycol/DMSO, as described in Chung and Miller (Chung and Miller, Nucleic Acids Res. 16:3580 (1988)). Yet another method is the use of the technique termed electroporation. In addition, bacterial cells can be readily transformed using various forms of phages (i.e., transducing, temperate, lytic and lysogenic), suicide vectors for inserting DNA directly into the chromosome, and through homologous recombination using either phages, suicide vectors or linear DNA.

[0159] Bacterial cells used to produce the polypeptide of interest for purposes of this invention are cultured in suitable media in which the promoters for the nucleic acid encoding the heterologous polypeptide can be artificially induced as described generally, e.g., in Sambrook et al., Molecular Cloning: A Laboratory Manual, New York: Cold Spring Harbor Laboratory Press, (1989). Examples of suitable media are given in U.S. Pat. Nos. 5,304,472 and 5,342,763.

[0160] A yeast recombinant construct can typically include one or more of the following: a promoter sequence, fusion partner sequence, leader sequence, transcription termination sequence, a selectable marker. These elements can be combined into an expression cassette, which may be maintained in a replicon, such as an extrachromosomal element (e.g., plasmids) capable of stable maintenance in a host, such as yeast or bacteria. The replicon may have two replication systems, thus allowing it to be maintained, for example, in yeast for expression and in a procaryotic host for cloning and amplification. Examples of such yeast-bacteria shuttle vectors include YEp24 (Botstein et al., Gene, 8:17-24 (1979)), pCl/1 (Brake et al., Proc. Natl. Acad. Sci. USA, 81:4642-4646 (1984)), and YRp17 (Stinchcomb et al., J. Mol. Biol., 158:157 (1982)). In addition, a replicon may be either a high or low copy number plasmid. A high copy number plasmid will generally have a copy number ranging from about 5 to about 200, and typically about 10 to about 150. A host containing a high copy number plasmid will preferably have at least about 10, and more preferably at least about 20.

[0161] Useful yeast promoter sequences can be derived from genes encoding enzymes in the metabolic pathway. Examples of such genes include alcohol dehydrogenase (ADH) (E.P.O. Pub. No. 284044), enolase, glucokinase, glucose-6-phosphate isomerase, glyceraldehyde-3-phosphate-dehydrogenase (GAP or GAPDH), hexokinase, phosphofructokinase, 3-phosphoglycerate mutase, and pyruvate kinase (PyK) (E.P.O. Pub. No. 329203). The yeast PHO5 gene, encoding acid phosphatase, also provides useful promoter sequences (Myanohara et al., Proc. Natl. Acad. Sci. USA, 80:1 (1983)). In addition, synthetic promoters which do not occur in nature also function as yeast promoters. Examples of such hybrid promoters include the ADH regulatory sequence linked to the GAP transcription activation region (U.S. Pat. Nos. 4,876,197 and 4,880,734). Other examples of hybrid promoters include promoters which consist of the regulatory sequences of either the ADH2, GAL4, GAL10, or PHO5 genes, combined with the transcriptional activation region of a glycolytic enzyme gene such as GAP or PyK (E.P.O. Pub. No. 164556). Furthermore, a yeast promoter can include naturally occurring promoters of non-yeast origin that have the ability to bind yeast RNA polymerase and initiate transcription. Examples of such promoters include, inter alia, (Cohen et al., Proc. Natl. Acad. Sci. USA, 77:1078 (1980); Henikoff et al., Nature 283:835 (1981); Hollenberg et al., Curr. Topics Microbiol. Immunol., 96:119 (1981); Mercerau-Puigalon et al., Gene, 11:163 (1980); and Panthier et al., Curr. Genet., 2:109 (1980)).

[0162] Intracellularly expressed fusion proteins provide an alternative to direct expression of the polypeptides of interest. Typically, a DNA sequence encoding the N-terminal portion of a stable protein, a fusion partner, is fused to the 5′ end of heterologous structural nucleotide sequence encoding the desired polypeptide. Upon expression, this construct will provide a fusion of the two amino acid sequences. The DNA sequence at the junction of the two amino acid sequences may or may not encode a cleavable site. See, e.g., E.P.O. Pub. No. 196056. Another example is a ubiquitin fusion protein. Such a ubiquitin fusion protein preferably retains a site for a processing enzyme (e.g. ubiquitin-specific processing protease) to cleave the ubiquitin from the polypeptide of the present invention. Through this method, therefore, a mature polypeptide can be isolated [sec, P.C.T. WO 88/024066].

[0163] Alternatively, polypeptides or proteins can also be secreted from the cell into the growth media by creating chimeric DNA molecules that encode a fusion protein comprised of a leader sequence fragment that provides for secretion in yeast of the polypeptides. Preferably, there are processing sites encoded between the leader fragment and the polypeptide-encoding sequence fragment that can be cleaved either in vivo or in vitro. The leader sequence fragment typically encodes a signal peptide comprised of hydrophobic amino acids which direct the secretion of the protein from the cell.

[0164] DNA encoding suitable signal sequences can be derived from genes for secreted yeast proteins, such as the yeast invertase gene (E.P.O. Pub. No. 12873; J.P.O. Pub. No. 62,096,086) and the A-factor gene (U.S. Pat. No. 4,588,684). Alternatively, leaders of non-yeast origin, such as an interferon leader, exist that also provide for secretion in yeast (E.P.O. Pub. No. 60057).

[0165] A preferred class of secretion leaders are those that employ a fragment of the yeast alpha-factor gene, which contains both a “pre” signal sequence, and a “pro” region. The types of alpha-factor fragments that can be employed include the full-length pre-pro alpha factor leader (about 83 amino acid residues) as well as truncated alpha-factor leaders (typically about 25 to about 50 amino acid residues) (U.S. Pat. Nos. 4,546,083 and 4,870,008; and E.P.O. Pub. No, 324274). Additional leaders employing an alpha-factor leader fragment that provides for secretion include hybrid alpha-factor leaders made with a pre-sequence of a first yeast, but a pro-region from a second yeast alpha factor. See, e.g., P.C.T. WO 89/02463.

[0166] Examples of transcription terminator sequence and other yeast-recognized termination sequences, such as those coding for glycolytic enzymes, are known to those of skill in the art.

[0167] Alternatively, the expression constructs can be integrated into the yeast genome with an integrating vector. Integrating vectors typically contain at least one sequence homologous to a yeast chromosome that allows the vector to integrate, and preferably contain two homologous sequences flanking the expression construct. Integrations appear to result from recombinations between homologous DNA in the vector and the yeast chromosome (Orr-Weaver et al., Methods in Enzymol., 101:228-245 (1983)). An integrating vector may be directed to a specific locus in yeast by selecting the appropriate homologous sequence for inclusion in the vector. See Orr-Weaver et al., supra. One or more expression constructs may integrate, possibly affecting levels of recombinant protein produced (Rine et al., Proc. Natl. Acad. Sci. USA, 80:6750 (1983)). The chromosomal sequences included in the vector can occur either as a single segment in the vector, which results in the integration of the entire vector, or as two segments homologous to adjacent segments in the chromosome and flanking the expression construct in the vector, which results in the stable integration of only the expression construct.

[0168] Expression and transformation vectors, either extrachromosomal replicons or integrating vectors, have been developed for transformation into many yeasts. For example, expression vectors have been developed for, inter alia, the following yeasts: Candida albicans (Kurtz, et al., Mol. Cell. Biol., 6:142 (1986)), Candida maltosa (Kunze et al., J. Basic Microbiol., 25:141 (1985)); Hansenula polymorpha (Gleeson et al., J. Gen. Microbiol. 132:3459 (1986); Roggenkamp et al., Mol. Gen. Genet. 202:302 (1986)); Kluyveromyces fragilis (Das et al., J. Bacteriol. 158:1165 (1984)); Kluyveromyces lactis (De Louvencourt et al., J. Bacteriol. 154:737 (1983); Van den Berg et al., Bio/Technology 8:135 (1990)); Pichia guillerimondii (Kunze et al., J. Basic Microbiol. 25:141 (1985)); Pichia pastoris (Cregg et al., Mol. Cell. Biol. 5:3376 (1985); U.S. Pat. Nos. 4,837,148 and 4,929,555); Saccharomyces cerevisiae (Hinnen et al., Proc. Natl. Acad. Sci. USA 75:1929 (1978); Ito et al., J. Bacteriol. 153:163 (1983)); Schizosaccharomyces pombe (Beach and Nurse, Nature 300:706 (1981)); and Yarrowia lipolytica (Davidow, et al., Curr. Genet. 10:380471 (1985); and Gaillardin et al., Curr. Genet. 10:49 (1985)).

[0169] Methods of introducing exogenous nucleic acids into yeast hosts are well-known in the art, and typically include either the transformation of spheroplasts or of intact yeast cells treated with alkali cations. Transformation procedures usually vary with the yeast species to be transformed. See e.g., Kurtz et al., Mol. Cell. Biol. 6:142 (1986); Kunze et al., J. Basic Microbiol. 25:141 (1985) for Candida. See, e.g., Gleeson et al., J. Gen. Microbiol. 132:3459 (1986); Roggenkamp et al., Mol. Gen. Genet. 202:302 (1986) for Hansenula. See, e.g., Das et al., J. Bacteriol. 158:1165 (1984); De Louvencourt et al., J. Bacteriol. 154:1165 (1983); Van den Berg et al., Bio/Technology 8:135 (1990) for Kluyveromyces. See, e.g., Cregg et al., Mol. Cell. Biol. 5:3376 (1985); Kunze et al., J. Basic Microbiol. 25:141 (1985); U.S. Pat. Nos. 4,837,148 and 4,929,555 for Pichia. See, e.g., Hinnen et al., Proc. Natl. Acad. Sci. USA 75:1929 (1978); Ito et al., J. Bacteriol. 153:163 (1983) for Saccharomyces. See, e.g., Beach and Nurse, Nature 300:706 (1981) for Schizosaccharomyces. See, e.g., Davidow et al., Curr. Genet. 10:39 (1985); Gaillardin et al., Curr. Genet. 10:49 (1985) for Yarrowia.

[0170] In order to obtain expression polypeptides or proteins of interest, recombinant microbial host cells derived from the transformants are incubated under conditions which allow expression of the recombinant polypeptide-encoding sequence. These conditions will vary, dependent upon the host cell selected. However, the conditions are readily ascertainable to those of ordinary skill and knowledge in the art.

[0171] Detection of polypeptides expressed in the transformed host cell may be performed by several methods. For example, a polypeptide or protein may be detected by its immunological reactivity with antibodies.

[0172] Polypeptides or proteins of the present invention may be isolated from the cell by lysis, if formed intracellularly, or isolated from the culture medium, if secreted, by conventional methods.

[0173] Computer Media

[0174] The nucleotide sequence provided in SEQ ID NO: 1 through SEQ ID NO: 4384 or fragment thereof, or complement thereof, or a nucleotide sequence at least 90% identical, preferably 95%, identical even more preferably 99% or 100% identical to the sequence provided in SEQ ID NO: 1 through SEQ ID NO: 4384 or fragment thereof, or complement thereof, can be “provided” in a variety of mediums to facilitate use. Such a medium can also provide a subset thereof in a form that allows a skilled artisan to examine the sequences.

[0175] In one application of this embodiment, a nucleotide sequence of the present invention can be recorded on computer readable media. As used herein, “computer readable media” refers to any medium that can be read and accessed directly by a computer. Such media include, but are not limited to: magnetic storage media, such as floppy discs, hard disc, storage medium, and magnetic tape: optical storage media such as CD-ROM; electrical storage media such as RAM and ROM; and hybrids of these categories such as magnetic/optical storage media. A skilled artisan can readily appreciate how any of the presently known computer readable mediums can be used to create a manufacture comprising computer readable medium having recorded thereon a nucleotide sequence of the present invention.

[0176] As used herein, “recorded” refers to a process for storing information on computer readable medium. A skilled artisan can readily adopt any of the presently known methods for recording information on computer readable medium to generate media comprising the nucleotide sequence information of the present invention. A variety of data storage structures are available to a skilled artisan for creating a computer readable medium having recorded thereon a nucleotide sequence of the present invention. The choice of the data storage structure will generally be based on the means chosen to access the stored information. In addition, a variety of data processor programs and formats can be used to store the nucleotide sequence information of the present invention on computer readable medium. The sequence information can be represented in a word processing text file, formatted in commercially-available software such as WordPerfect and Microsoft Word or represented in the form of an ASCII file, stored in a database application, such as DB2, Sybase, Oracle, or the like. A skilled artisan can readily adapt any number of data processor structuring formats (e.g. text file or database) in order to obtain computer readable medium having recorded thereon the nucleotide sequence information of the present invention.

[0177] By providing one or more of nucleotide sequences of the present invention, a skilled artisan can routinely access the sequence information for a variety of purposes. Computer software is publicly available which allows a skilled artisan to access sequence information provided in a computer readable medium. The examples which follow demonstrate how software which implements the BLAST (Altschul et al., J. Mol. Biol. 215:403-410 (1990)) and BLAZE (Brutlag et al., Comp. Chem. 17:203-207 (1993)) search algorithms on a Sybase system can be used to identify open reading frames (ORFs) within the genome that contain homology to ORFs or proteins from other organisms. Such ORFs are protein encoding fragments within the sequences of the present invention and are useful in producing commercially important proteins such as enzymes used in amino acid biosynthesis, metabolism, transcription, translation, RNA processing, nucleic acid and a protein degradation, protein modification, and DNA replication, restriction, modification, recombination, and repair.

[0178] The present invention further provides systems, particularly computer-based systems, which contain the sequence information described herein. Such systems are designed to identify commercially important fragments of the nucleic acid molecule of the present invention. As used herein, “a computer-based system” refers to the hardware means, software means, and data storage means used to analyze the nucleotide sequence information of the present invention. The minimum hardware means of the computer-based systems of the present invention comprises a central processing unit (CPU), input means, output means, and data storage means. A skilled artisan can readily appreciate that any one of the currently available computer-based system are suitable for use in the present invention.

[0179] As indicated above, the computer-based systems of the present invention comprise a data storage means having stored therein a nucleotide sequence of the present invention and the necessary hardware means and software means for supporting and implementing a search means. As used herein, “data storage means” refers to memory that can store nucleotide sequence information of the present invention, or a memory access means which can access manufactures having recorded thereon the nucleotide sequence information of the present invention. As used herein, “search means” refers to one or more programs which are implemented on the computer-based system to compare a target sequence or target structural motif with the sequence information stored within the data storage means. Search means are used to identify fragments or regions of the sequence of the present invention that match a particular target sequence or target motif. A variety of known algorithms are disclosed publicly and a variety of commercially available software for conducting search means are available can be used in the computer-based systems of the present invention. Examples of such software include, but are not limited to, MacPattern (EMBL), BLASTIN and BLASTIX (NCBIA). One of the available algorithms or implementing software packages for conducting homology searches can be adapted for use in the present computer-based systems.

[0180] The most preferred sequence length of a target sequence is from about 10 to 100 amino acids or from about 30 to 300 nucleotide residues. However, it is well recognized that during searches for commercially important fragments of the nucleic acid molecules of the present invention, such as sequence fragments involved in gene expression and protein processing, may be of shorter length.

[0181] As used herein, “a target structural motif,” or “target motif,” refers to any rationally selected sequence or combination of sequences in which the sequences the sequence(s) are chosen based on a three-dimensional configuration which is formed upon the folding of the target motif. There are a variety of target motifs known in the art. Protein target motifs include, but are not limited to, enzymatic active sites and signal sequences. Nucleic acid target motifs include, but are not limited to, promoter sequences, cis elements, hairpin structures and inducible expression elements (protein binding sequences).

[0182] Thus, the present invention further provides an input means for receiving a target sequence, a data storage means for storing the target sequences of the present invention sequence identified using a search means as described above, and an output means for outputting the identified homologous sequences. A variety of structural formats for the input and output means can be used to input and output information in the computer-based systems of the present invention. A preferred format for an output means ranks fragments of the sequence of the present invention by varying degrees of homology to the target sequence or target motif. Such presentation provides a skilled artisan with a ranking of sequences which contain various amounts of the target sequence or target motif and identifies the degree of homology contained in the identified fragment.

[0183] A variety of comparing means can be used to compare a target sequence or target motif with the data storage means to identify sequence fragments sequence of the present invention. For example, implementing software which implement the BLAST and BLAZE algorithms (Altschul et al., J. Mol. Biol. 215:403-410 (1990)) can be used to identify open frames within the nucleic acid molecules of the present invention. A skilled artisan can readily recognize that any one of the publicly available homology search programs can be used as the search means for the computer-based systems of the present invention.

### Exemplary Uses of the Agents of the Present Invention

[0184] Nucleic acid molecules and fragments thereof of the present invention may be employed to obtain other nucleic acid molecules from the same or closely related species. Such nucleic acid molecules include the nucleic acid molecules that encode the complete coding sequence of a protein and promoters and flanking sequences of such molecules. In addition, such nucleic acid molecules include nucleic acid molecules that encode for other isozymes or gene family members. Such molecules can be readily obtained by using the above-described nucleic acid molecules or fragments thereof to screen genomic libraries obtained from Xenorhabdus. Methods for forming such libraries are well known in the art.

[0185] Nucleic acid molecules and fragments thereof of the present invention may also be employed to obtain other nucleic acid molecules such as nucleic acid homologues. Such homologues include the nucleic acid homologues of non-Xenorhabdus species including the nucleic acid molecules that encode, in whole or in part, protein homologues of other species or other organisms, sequences of genetic elements such as promoters and transcriptional regulatory elements. Such molecules can be readily obtained by using the above-described nucleic acid molecules or fragments thereof to screen cDNA or genomic libraries. Methods for forming such libraries are well known in the art. Such homologue molecules may differ in their nucleotide sequences from those found in one or more of SEQ ID NO: 1 through SEQ ID NO: 4384 or complements thereof because complete complementarity is not needed for stable hybridization. The nucleic acid molecules of the present invention therefore also include molecules that, although capable of specifically hybridizing with the nucleic acid molecules may lack “complete complementarity.” In a particular embodiment, methods or 3′ or 5′ RACE may be used (Frohman, M. A. et al., Proc. Natl. Acad. Sci. (U.S.A.) 85:8998-9002 (1988); Ohara, O. et al., Proc. Natl. Acad. Sci. (U.S.A.) 86:5673-5677 (1989)) to obtain such sequences.

[0186] Any of a variety of methods may be used to obtain one or more of the above-described nucleic acid molecules (Zamechik et al., Proc. Natl. Acad. Sci. (U.S.A.) 83:4143-4146 (1986); Goodchild et al., Proc. Natl. Acad. Sci. (U.S.A.) 85: 5507-5511 (1988); Wickstrom et al., Proc. Natl. Acad. Sci. (U.S.A.) 85:1028-1032 (1988); Holt et al., Molec. Cell. Biol. 8:963-973 (1988); Gerwirtz et al., Science 242: 1303-1306 (1988); Anfossi et al., Proc. Natl. Acad. Sci. (U.S.A.) 86:3379-3383 (1989); Becker et al., EMBO J. 8:3685-3691 (1989)). Automated nucleic acid synthesizers may be employed for this purpose. In lieu of such synthesis, the disclosed nucleic acid molecules may be used to define a pair of primers that can be used with the polymerase chain reaction (Mullis et al., Cold Spring Harbor Symp. Quant. Biol. 51:263-273 (1986); Erlich et al., European Patent 50,424; European Patent 84,796, European Patent 258,017; European Patent 237,362; Mullis, European Patent 201,184; Mullis et al., U.S. Pat. No. 4,683,202; Erlich, U.S. Pat. No. 4,582,788; and Saiki et al., U.S. Pat. No. 4,683,194) to amplify and obtain any desired nucleic acid molecule or fragment.

[0187] The nucleic acid molecules of the present invention may be used for physical mapping. Physical mapping, in conjunction with linkage analysis, can enable the isolation of genes. Physical mapping has been reported to identify the markers closest in terms of genetic recombination to a gene target for cloning. Once a DNA marker is linked to a gene of interest, the chromosome walking technique can be used to find the genes via overlapping clones. For chromosome walking, random molecular markers or established molecular linkage maps are used to conduct a search to localize the gene adjacent to one or more markers. A chromosome walk (Bukanov and Berg, Mo. Microbiol. 11:509-523 (1994); Birkenbihl and Vielmetter Nucleic Acids Res. 17:5057-5069 (1989); Wenzel and Herrmann, Nucleic Acids Res. 16:8323-8336 (1988) is then initiated from the closest linked marker. Starting from the selected clones, labeled probes specific for the ends of the insert DNA are synthesized and used as probes in hybridizations against a representative library. Clones hybridizing with one of the probes are picked and serve as templates for the synthesis of new probes; by subsequent analysis, contigs are produced.

[0188] The degree of overlap of the hybridizing clones used to produce a contig can be determined by comparative restriction analysis. Comparative restriction analysis can be carried out in different ways all of which exploit the same principle; two clones of a library are very likely to overlap if they contain a limited number of restriction sites for one or more restriction endonucleases located at the same distance from each other. The most frequently used procedures are, fingerprinting (Coulson et al, Proc. Natl. Acad. Sci. (U.S.A.) 83:7821-7821, (1986); Knott et al., Nucleic Acids Res. 16:2601-2612 (1988); Eiglmeier et al., Mol. Microbiol. 7:197-206 (1993), 1993), restriction fragment mapping (Smith and Birnstiel, Nucleic Acids Res. 3:2387-2398 (1976)); or the “landmarking” technique (Charlebois et al. J. Mol. Biol. 222:509-524 (1991)).

[0189] It is understood that the nucleic acid molecules of the present invention may in one embodiment be used in physical mapping. In a preferred embodiment, nucleic acid molecules of the present invention may in one embodiment be used in the physical mapping of Xenorhabdus.

[0190] Nucleic acid molecules of the present invention can be used in comparative mapping. Comparative mapping within families provides a method to assess the degree of sequence conservation, gene order, ploidy of species, ancestral relationships and the rates at which individual genomes are evolving. Comparative mapping has been carried out by cross-hybridizing molecular markers across species within a given family. As in genetic mapping, molecular markers are needed but instead of direct hybridization to mapping filters, the markers are used to select large insert clones from a total genomic DNA library of a related species. The selected clones, each a representative of a single marker, can then be used to physically map the region in the target species. The advantage of this method for comparative mapping is that no mapping population or linkage map of the target species is needed and the clones may also be used in other closely related species. By comparing the results obtained by genetic mapping in model organisms, with those from other species, similarities of genomic structure among species can be established. Cross-hybridization of RFLP markers has been reported and conserved gene order has been established in many studies. Such macroscopic synteny is utilized for the estimation of correspondence of loci among these organisms. It is understood that markers of the present invention may in another embodiment be used in comparative mapping. In a preferred embodiment the markers of present invention may be used in the comparative mapping of spore-forming Gram-positive bacteria.

[0191] In an aspect of the present invention, one or more of the agents of the present invention may be used to detecting the presence, absence or level of an organism, preferably a Xenorhabdus in a sample. In another aspect of the present invention, one or more of the nucleic molecules of the present invention are used to determine the level (i.e., the concentration of mRNA in a sample, etc.) or pattern (i.e., the kinetics of expression, rate of decomposition, stability profile, etc.) of the expression encoded in part or whole by one or more of the nucleic acid molecule of the present invention (collectively, the “Expression Response” of a cell or tissue). As used herein, the Expression Response manifested by a cell or tissue is said to be “altered” if it differs from the Expression Response of cells or tissues of organisms not exhibiting the phenotype. To determine whether a Expression Response is altered, the Expression Response manifested by the cell or tissue of the organism exhibiting the phenotype is compared with that of a similar cell or tissue sample of a organism not exhibiting the phenotype. As will be appreciated, it is not necessary to re-determine the Expression Response of the cell or tissue sample of organisms not exhibiting the phenotype each time such a comparison is made; rather, the Expression Response of a particular organism may be compared with previously obtained values of normal organism. As used herein, the phenotype of the organism is any of one or more characteristics of an organism.

[0192] Nucleic acid molecules of the present invention can be used to monitor expression. A microarray-based method for high-throughput monitoring of gene expression may be utilized to measure gene-specific hybridization targets. This ‘chip’-based approach involves using microarrays of nucleic acid molecules as gene-specific hybridization targets to quantitatively measure expression of the corresponding genes (Schena et al., Science 270:467-470 (1995); Shalon, Ph.D. Thesis, Stanford University (1996)). Every nucleotide in a large sequence can be queried at the same time. Hybridization can be used to efficiently analyze nucleotide sequences.

[0193] Several microarray methods have been described. One method compares the sequences to be analyzed by hybridization to a set of oligonucleotides or cDNA molecules representing all possible subsequences (Bains and Smith, J. Theor. Biol. 135:303 (1989)). A second method hybridizes the sample to an array of oligonucleotide or cDNA probes. An array consisting of oligonucleotides or cDNA molecules complementary to subsequences of a target sequence can be used to determine the identity of a target sequence, measure its amount, and detect differences between the target and a reference sequence. Nucleic acid molecules microarrays may also be screened with protein molecules or fragments thereof to determine nucleic acid molecules that specifically bind protein molecules or fragments thereof.

[0194] The microarray approach may also be used with polypeptide targets (U.S. Pat. No. 5,445,934; U.S. Pat. No. 5,143,854; U.S. Pat. No. 5,079,600; U.S. Pat. No. 4,923,901). Essentially, polypeptides are synthesized on a substrate (microarray) and these polypeptides can be screened with either protein molecules or fragments thereof or nucleic acid molecules in order to screen for either protein molecules or fragments thereof or nucleic acid molecules that specifically bind the target polypeptides (Fodor et al., Science 251:767-773 (1991)).

[0195] It is understood that one or more of the molecules of the present invention, preferably one or more of the nucleic acid molecules or protein molecules or fragments thereof of the present invention may be utilized in a microarray based method. In a preferred embodiment of the present invention, one or more of the Xenorhabdus nucleic acid molecules or protein or polypeptide molecules or fragments thereof of the present invention may be utilized in a microarray based method. A particular preferred microarray embodiment of the present invention is a microarray comprising nucleic acid molecules encoding genes or fragments thereof that are homologues of known genes or nucleic acid molecules that comprise genes or fragments thereof that elicit only limited or no matches to known genes. A fluffier preferred microarray embodiment of the present invention is a microarray comprising nucleic acid molecules having genes or fragments thereof that are homologues of known genes and nucleic acid molecules that comprise genes or fragment thereof that elicit only limited or no matches to known genes.

[0196] In a preferred embodiment, the microarray of the present invention comprises at least 10 nucleic acid molecules that specifically hybridize under stringent conditions to at least 10 nucleic acid molecules encoding Xenorhabdus proteins or polypeptides or fragments thereof set forth in Table 1. In a more preferred embodiment, the microarray of the present invention comprises at least 100 nucleic acid molecules that specifically hybridize under stringent conditions to at least 100 nucleic acid molecules that encode a Xenorhabdus protein or polypeptide or fragment thereof set forth in Table 1. In an even more preferred embodiment, the microarray of the present invention comprises at least 1,000 nucleic acid molecules that specifically hybridize under stringent conditions to at least 1,000 nucleic acid molecules that encode a Xenorhabdus protein or polypeptide or fragment thereof set forth in Table 1. In a further even more preferred embodiment, the microarray of the present invention comprises at least 2,500 nucleic acid molecules that specifically hybridize under stringent conditions to at least 2,500 nucleic acid molecules that encode a Xenorhabdus protein or polypeptide or fragment thereof set forth in Table 1. While it is understood that a single nucleic acid molecule may encode more than one protein homologue or fragment thereof, in a preferred embodiment, at least 50%, preferably at least 70%, more preferably at least 80%, even more preferably at least 90% of the nucleic acid molecules that comprise the microarray contain one protein or fragment thereof.

[0197] In a preferred embodiment, the microarray of the present invention comprises at least 10 nucleic acid molecules that specifically hybridize under stringent conditions to at least 10 nucleic acid molecules selected from the group consisting of SEQ ID NO: 1 through SEQ ID NO: 4384 or fragment thereof or complement of either. In a more preferred embodiment, the microarray of the present invention comprises at least 100 nucleic acid molecules that specifically hybridize under stringent conditions to at least 100 nucleic acid molecules that encode a Xenorhabdus protein or polypeptide or fragment thereof set forth in Table 1. In an even more preferred embodiment, the microarray of the present invention comprises at least 1,000 nucleic acid molecules that specifically hybridize under stringent conditions to at least 1,000 nucleic acid molecules that encode a Xenorhabdus protein or polypeptide or fragment thereof set forth in Table 1. In a further even more preferred embodiment, the microarray of the present invention comprises at least 2,500 nucleic acid molecules that specifically hybridize under stringent conditions to at least 2,500 nucleic acid molecules that encode a Xenorhabdus protein or fragment thereof set forth in Table 1. While it is understood that a single nucleic acid molecule may encode more than one protein homologue or fragment thereof, in a preferred embodiment, at least 50%, preferably at least 70%, more preferably at least 80%, even more preferably at least 90% of the nucleic acid molecules that comprise the microarray contain one protein homologue or fragment thereof.

[0198] Nucleic acid molecules of the present invention may be used in site directed mutagenesis. Site-directed mutagenesis may be utilized to modify nucleic acid sequences, particularly as it is a technique that allows one or more of the amino acids encoded by a nucleic acid molecule to be altered (e.g. a threonine to be replaced by a methionine). Three basic methods for site-directed mutagenesis are often employed. These are cassette mutagenesis (Wells et al., Gene 34:315-23 (1985)); primer extension (Gilliam et al., Gene 12:129-137 (1980)); Zoller and Smith, Methods Enzymol. 100:468-500 (1983); and Dalbadie-McFarland et al., Proc. Natl. Acad. Sci. (U.S.A.) 79:6409-6413 (1982)) and methods based upon PCR (Scharf et al., Science 233:1076-1078 (1986); Higuchi et al., Nucleic Acids Res. 16:7351-7367 (1988)). Site-directed mutagenesis approaches are also described in European Patent 0 385 962, European Patent 0 359 472, and PCT Patent Application WO 93/07278.

[0199] Site-directed mutagenesis strategies have been applied to plants for both in vitro as well as in vivo site-directed mutagenesis (Lanz et al., J. Biol. Chem. 266:9971-9976 (1991); Kovgan and Zhdanov, Biotekhnologiya 5: 148-154, No. 207160n, Chemical Abstracts 110: 225 (1989); Ge et al., Proc. Natl. Acad. Sci. (U.S.A.) 86:4037-4041 (1989), Zhu et al., J. Biol. Chem. 271:18494-18498 (1996), Chu et al., Biochemistry 33:6150-6157 (1994), Small et al., EMBO J. 11:1291-1296 (1992), Cho et al., Mol. Biotechnol. 8:13-16 (1997), Kita et al., J. Biol. Chem. 271:26529-26535 (1996), Jin et al., Mol. Microbiol. 7:555-562 (1993), Hatfield and Vierstra, J. Biol. Chem. 267:14799-14803 (1992), Zhao et al., Biochemistry 31:5093-5099 (1992)).

[0200] Any of the nucleic acid molecules of the present invention may either be modified by site-directed mutagenesis or used as, for example, nucleic acid molecules that are used to target other nucleic acid molecules for modification. It is understood that mutants with more than one altered nucleotide can be constructed using techniques that practitioners skilled in the art are familiar with such as isolating restriction fragments and ligating such fragments into an expression vector (see, for example, Sambrook et al., Molecular Cloning: A Laboratory Manual, Cold Spring Harbor Press (1989)). In a preferred embodiment of the present invention, one or more of the nucleic acid molecules or fragments thereof of the present invention may be modified by site-directed mutagenesis.

[0201] In addition to the above discussed procedures, practitioners are familiar with the standard resource materials which describe specific conditions and procedures for the construction, manipulation and isolation of macromolecules (e.g., DNA molecules, plasmids, etc.), generation of recombinant organisms and the screening and isolating of clones, (see for example, Sambrook et al., Molecular Cloning: A Laboratory Manual, Cold Spring Harbor Press (1989); Mailga et al., Methods in Plant Molecular Biology, Cold Spring Harbor Press (1995); Birren et al., Genome Analysis: Analyzing DNA, 1, Cold Spring Harbor, N.Y.).

[0202] Insect inhibitory protein-encoding nucleic acids of the present invention will find particular uses in the plant protection against insects. For instance, insect-resistant transgenic plants can be generated by introducing the exogenous nucleic acids encoding an insect inhibitory polypeptide or protein or insect inhibitory fragment thereof, the amino acid sequence of which is substantially identical to a sequence set forth in SEQ ID NO; 4385 to SEQ ID NO: 8409. Another example is to engineer transgenic microorganism (bacteria or fungi) to express insect inhibitory polypeptides or proteins of the present invention and then to apply them to the insect food source or allow them to reside in soil surrounding plant roots or on the surface of plant leaves.

[0203] The transgenic microorganisms of the present invention may be used to produce Xenorhabdus or Photorhabdus polypeptides or proteins of interest, particularly insect inhibitory polypeptides or proteins. Insect inhibitory polypeptides or proteins or insect inhibitory fragments thereof may be secreted, for example as in bacterial systems, meaning targeted to either the periplasm as for gram negative bacteria or localized to the extracellular space for gram negative or any other type of bacterium, or localized to the intracellular spaces within the cytoplasm. Such compositions may be administered to insects according to methods well known in the art. For example, insect inhibitory polypeptides or proteins of the present invention may be formulated as sprayable compositions or as a bait matrix.

[0204] The principle object of the present invention is to provide a method for identification of any gene or any protein encoded by any structural gene contained within a Xenorhabdus or Photorhabdus species, particularly those species which are shown to exhibit the production of an insect inhibitory protein or molecule or other similarly active composition, either alone or in combination with proteins or molecules or other similarly active compositions which may be derived from the bacterium in its role as natural symbiont within an insect pathogenic nematode host.

[0205] The present invention provides first for the isolation and identification of one or more nematodes which have the capacity for invading an insect larvae or adult, typically an insect of any order including but not limited to Coleopteran, Dipteran, Hemipteran, Lepidopteran, Homopteran, Hymenopteran, or Lygus, white fly, or any sucking or piercing insect species. The isolation and identification of a single insect pathogenic nematode species then enables the skilled artisan to isolate at least one species of Xenorhabdus or Photorhabdus endosymbiotic bacteria from the haemolymphe of an insect larvae or adult which has been invaded by the isolated and identified host nematode.

[0206] Nematodes can be isolated using methods particularly taught herein and in view of the prior art. Typically, one or more larvae of the genus and species Galleria melonella is/are placed into a soil sample under proper humidity and temperature conditions for a period of time to allow the larvae to be invaded and colonized by a nematode species. It is generally believed from observations of nematode invasions that once a single nematode species invades a single larvae or adult insect and successfully releases bacterial symbionts of either Xenorhabdus or Photorhabdus bacteria (which is further dependent upon the species of host nematode successfully invading the insect body), then an effective colonization of the insect haemolymphe by the bacterium so released results in colonization of that particular insect host body to that genus and species of nematode and bacterium. This may be analogous to bacteriophage restriction inhibition, a phenomenon well known in the bacterial art, and may be a means for ensuring that the bacterium and nematode host-symbiont relationship is maintained.

[0207] The symbiont bacterium released into the haemolymphe then produces fungicides, acaricides, and antibacterial compounds which assist in this restriction of growth to the category and class or genus and species of nematode and bacterium affiliated with the host-symbiont relationship. It may be that the nematode plays some functional role in this relationship, providing one or more specific factors, compositions, or accessory proteins, small molecules or compositions which enable the released symbiont bacterium to sense the genus and species of the host insect body, possibly in association with factors, proteins, or accessory compositions or receptors present within the haemolymphe of the pathogenized insect which enable the bacterium to switch on or express proteins which are effective in limiting the insect hosts' defenses, if any, which would otherwise lead to an ineffective invasion and infection by the nematode and bacterium. Particularly relevant to this possibility is the presence as disclosed herein of several insect inhibitory proteins identified by their predicted structure, size and relationship to previously identified Photorhabdus insect inhibitory proteins from protein families such as Tcc, Tca, Tcb and Tcd (Ensign et al., WO 97/17432; and Ensign et al., WO98/08932) encoded by an equal number of similar but substantially different genes. Interestingly, the invasion of different insect genus/species hosts by a single insect pathogenic nematode which releases a single Xenorhabdus bacterium species into the haemolymphe enables the skilled artisan to isolate the bacterium from each of the individual insect host bodies. Presumably, one skilled in classical microbiological methodologies would expect that the same bacterium now isolated and purified from each of the different cadavers onto selective media, followed by the growth and analysis of each isolate in an identical broth medium for identical periods of time and under identical conditions, would otherwise result in a similar protein profile when analyzing the spent medium from such an experiment. However, the inventors herein have identified the surprising result that the protein profile of each isolate isolated and purified from different cadaver species produce drastically different extracellular protein profiles when examined by 2D gel analysis. This result suggests the possibility that the host insect, or the nematode, or the combination of the two, or alternatively merely the bacterium functions to sense its environment and switches some genes on and others off to express proteins and compositions which function in some particular yet unidentified manner specific for its host environment. The difference in protein profiles of bacterium isolated from different cadaver species, yet presumably released as a single species from a single nematode host may be the result of at least a rearrangement the genome of the bacterium either by transposition or inversion or a combination of the two means to produce an otherwise isogenic line of bacterium capable of expressing an insect host selective combination of proteins which enable the nematode-bacterium host-symbiont relationship to maximize its chances for survival. This result may also suggest that the nematode, although playing host to a bacterium which is capable of expressing a variety of proteins which individually are capable of inhibiting or killing specific insect host species, may preferably invade a selective genus or species of insect for which it is more aptly suited in its particular host-symbiont relationship.

[0208] Nevertheless, the isolation and purification of an insect pathogenic nematode Xenorhabdus or Photorhabdus symbiont bacterium from an insect cadaver provides the basis for obtaining an amount of genomic DNA from which a genomic library can be constructed to represent the entire genome of the bacterial strain. The library can then be manipulated as described herein to produce linear nucleotide sequences, which can then be compared to each other to identify regions of identity with which an overlapping sequence can be generated to produce islands of linear sequence known as contigs because of the contiguous linear sequence assembled from smaller bits of sequence data. The contigs can be assembled into a genomic map from which genes can be identified, and wherein translation of structural genes lead to further identification of proteins having predicted structure and function based on homologies of such predicted protein sequences as translated from open reading frames contained within the genome map, to proteins of known sequence, and perhaps also of known structure and function identified previously from other bacterial, viral, fungal, or other eukaryotic sources.

[0209] Syringomycins are bioactive lipodepsipeptides originally isolated from the phytopathogenic bacterium Pseudomonas syringae pv. syringae These compounds are potent fungicides which inhibit the growth of Saccharomyces cerevisiae and Aspergillus niger by forming pores in the plasma membrane. In addition, polypeptides generated from these proteins have also been shown to have fungicidal activity. The Xenorhabdus genomic DNA sequences disclosed herein contains at least 11 open reading frames encoding predicted proteins displaying homology to syringomycin. These open reading frames range in size from 4000-11, 500 base pairs and are exemplified by sequences shown in Table 1 and Table 3. Any of these predicted proteins or polypeptides derived from these proteins have potential antimicrobial activity with commercial applications.

### Insecticidal Compositions

[0210] The inventors contemplate that the Xenorhabdus strain and isolatable protein compositions exhibiting insecticidal activity as disclosed herein will find particular utility as insecticides for topical and/or systemic application to field crops, grasses, fruits and vegetables, and ornamental plants. In a preferred embodiment, the bioinsecticide composition comprises an oil flowable suspension of bacterial cells which expresses a novel crystal protein disclosed herein. Preferably the cells are Xenorhabdus Xs85816 cells, however, any such bacterial host cell expressing the novel nucleic acid segments disclosed herein and producing an insecticidal protein is contemplated to be useful, such as B. thuringiensis, B. megaterium, B. subtilis, E. coli, Salmonella typhimurium, other Xenorhabdus or Photorhabdus species, or Pseudomonas spp.

[0211] In another important embodiment, the bioinsecticide composition comprises a water dispersible granule. This granule comprises bacterial cells which expresses a novel insecticidal protein disclosed herein. Preferred bacterial cells are Xenorhabdus Xs85816 cells, however, bacteria such as B. thuringiensis, B. megaterium, B. subtilis, E. coli, Salmonella typhimurium, other Xenorhabdus or Photorhabdus species, or Pseudomonas spp. cells transformed with a DNA segment disclosed herein and expressing the insecticidal protein are also contemplated to be useful.

[0212] In a third important embodiment, the bioinsecticide composition comprises a wettable powder, dust, pellet, or collodial concentrate. This powder comprises bacterial cells which expresses a novel insecticidal protein disclosed herein. Preferred bacterial cells are Xenorhabdus Xs85816 cells, however, bacteria such as B. thuringiensis, B. megaterium, B. subtilis, E. coli, Salmonella typhimurium, other Xenorhabdus or Photorhabdus species, or Pseudomonas spp. cells transformed with a DNA segment disclosed herein and expressing the insecticidal protein are also contemplated to be useful. Such dry forms of the insecticidal compositions may be formulated to dissolve immediately upon wetting, or alternatively, dissolve in a controlled-release, sustained-release, or other time-dependent manner.

[0213] In a fourth important embodiment, the bioinsecticide composition comprises an aqueous suspension of bacterial cells such as those described above which express the insecticidal protein. Such aqueous suspensions may be provided as a concentrated stock solution which is diluted prior to application, or alternatively, as a diluted solution ready-to-apply.

[0214] For these methods involving application of bacterial cells, the cellular host containing the insecticidal protein gene(s) may be grown in any convenient nutrient medium, where the DNA construct provides a selective advantage, providing for a selective medium so that substantially all or all of the cells retain the Xenorhabdus gene. These cells may then be harvested in accordance with conventional ways. Alternatively, the cells can be treated prior to harvesting.

[0215] When the insecticidal compositions comprise intact Xenorhabdus cells expressing the protein of interest, such bacteria may be formulated in a variety of ways. They may be employed as wettable powders, granules or dusts, by mixing with various inert materials, such as inorganic minerals (phyllosilicates, carbonates, sulfates, phosphates, and the like) or botanical materials (powdered corncobs, rice hulls, walnut shells, and the like). The formulations may include spreader-sticker adjuvants, stabilizing agents, other pesticidal additives, or surfactants. Liquid formulations may be aqueous-based or non-aqueous and employed as foams, suspensions, emulsifiable concentrates, or the like. The ingredients may include rheological agents, surfactants, emulsifiers, dispersants, or polymers.

[0216] Alternatively, the novel Xip insecticidal proteins may be prepared by native or recombinant bacterial expression systems in vitro and isolated for subsequent field application. Such protein may be either in crude cell lysates, suspensions, colloids, etc., or alternatively may be purified, refined, buffered, and/or further processed, before formulating in an active biocidal formulation. Likewise, under certain circumstances, it may be desirable to isolate insecticidal proteins or whole cells from bacterial cultures expressing the insecticidal Xip protein(s) and apply solutions, suspensions, or collodial preparations of such insecticidal proteins or whole cells as the active bioinsecticidal composition.

[0217] Regardless of the method of application, the amount of the active component(s) is applied at an insecticidally-effective amount, which will vary depending on such factors as, for example, the specific coleopteran insects to be controlled, or the specific piercing and sucking insect to be controlled, the specific plant or crop to be treated, the environmental conditions, and the method, rate, and quantity of application of the insecticidally-active composition.

[0218] The insecticide compositions described may be made by formulating either the bacterial cell, insecticidal protein suspension, or isolated protein component with the desired agriculturally-acceptable carrier. The compositions may be formulated prior to administration in an appropriate means such as lyophilized, freeze-dried, desiccated, or in an aqueous carrier, medium or suitable diluent, such as saline or other buffer. The formulated compositions may be in the form of a dust or granular material, or a suspension in oil (vegetable or mineral), or water or oil/water emulsions, or as a wettable powder, or in combination with any other carrier material suitable for agricultural application. Suitable agricultural carriers can be solid or liquid and are well known in the art. The term “agriculturally-acceptable carrier” covers all adjuvants, e.g., inert components, dispersants, surfactants, tackifiers, binders, etc. that are ordinarily used in insecticide formulation technology; these are well known to those skilled in insecticide formulation. The formulations may be mixed with one or more solid or liquid adjuvants and prepared by various means, e.g., by homogeneously mixing, blending and/or grinding the insecticidal composition with suitable adjuvants using conventional formulation techniques.

[0219] The insecticidal compositions of this invention are applied to the environment of the target coleopteran or piercing and sucking insect, typically onto the foliage of the plant or crop to be protected, by conventional methods, preferably by spraying. The strength and duration of insecticidal application will be set with regard to conditions specific to the particular pest(s), crop(s) to be treated and particular environmental conditions. The proportional ratio of active ingredient to carrier will naturally depend on the chemical nature, solubility, and stability of the insecticidal composition, as well as the particular formulation contemplated.

[0220] Other application techniques, e.g., dusting, sprinkling, soaking, soil injection, seed coating, seedling coating, spraying, aerating, misting, atomizing, and the like, are also feasible and may be required under certain circumstances such as e.g., insects that cause root or stalk infestation, or for application to delicate vegetation or ornamental plants. These application procedures are also well-known to those of skill in the art.

[0221] The insecticidal composition of the invention may be employed in the method of the invention singly or in combination with other compounds, including and not limited to other pesticides. The method of the invention may also be used in conjunction with other treatments such as surfactants, detergents, polymers or time-release formulations. The insecticidal compositions of the present invention may be formulated for either systemic or topical use.

[0222] The concentration of insecticidal composition which is used for environmental, systemic, or foliar application will vary widely depending upon the nature of the particular formulation, means of application, environmental conditions, and degree of biocidal activity. Typically, the bioinsecticidal composition will be present in the applied formulation at a concentration of at least about 1% by weight and may be up to and including about 99% by weight. Dry formulations of the compositions may be from about 1% to about 99% or more by weight of the composition, while liquid formulations may generally comprise from about 1% to about 99% or more of the active ingredient by weight. Formulations which comprise intact bacterial cells will generally contain from about 10⁴ to about 10⁷ cells/mg.

[0223] The insecticidal formulation may be administered to a particular plant or target area in one or more applications as needed, with a typical field application rate per hectare ranging on the order of from about 50 g to about 500 g of active ingredient, or of from about 500 g to about 1000 g, or of from about 1000 g to about 5000 g or more of active ingredient.

[0224] Having now generally described the invention, the same will be more readily understood through reference to the following examples which are provided by way of illustration, and are not intended to be limiting of the present invention, unless specified.

### Example 1

### Isolation of Entomopathogenic Nematodes

[0225] Entomopathogenic nematodes were isolated from soil samples obtained from various geographic locations according to the following procedure. Generally the practice in the art is to infest soil samples with larvae of the insect species Galleria mellonella. This example describes an entomopathogenic nematode baiting method not practiced in the art which does not utilize Galleria mellonella, a non-pest and therefore a non-target insect species in baiting nematodes. Instead, this method describes isolation of entomopathogenic nematodes having a greater insect inhibitory diversity by baiting with pest species and therefore target insect larvae. This method selects for nematode and Xenorhabdus and Photorhabdus bacterial strains having a greater diversity in their insect inhibitory properties and a greater diversity and variety of insect inhibitory proteins active against specific target insects.

[0226] Approximately 4 liters of soil sample by volume was placed into a plastic ziplock bag. The soil sample was then infested with a variety of 4^{th} instar target insects, e.g. corn ear worm, tobacco bud worm, black cut worm, beet army worm, boll weevil, corn root worm, as well as the non-target insect larvae Galleria mellonella. The insect larvae infested soil bags were zip sealed and incubated at 25° C. in the dark for about 72 hours. Dead insect larvae were removed from the soil samples and identified as to genus and species, washed in a mild NaOH/NaClO solution (50 ml water, 2 ml 4M NaOH, 1 ml 5% conc. NaClO), rinsed with sterile water and placed into modified nematode traps (White, Science 66:302-303 (1927)). The modified trap consists of the following elements assembled in order from bottom to top: (1) the bottom of a 4 inch diameter petri dish half filled with water, (2) the lid of a 2 inch petri dish floating in the water, (3) a dead insect larvae potentially infested with entomopathogenic nematodes placed onto a layer of Whatman filter paper laying on the bottom of the inside of the smaller petri dish; (4) covered with the lid of the 4 inch diameter petri dish. This modified “White Trap” is incubated at 25° C. in the dark and left undisturbed for 7-14 days. Infective juvenile stages of the nematodes begin to emerge from the insect cadaver after one to two weeks and enter the water surrounding the smaller diameter petri dish, forming a suspension containing the nematodes. The nematode infested suspension is collected, placed into tissue culture flasks and these remain viable for several months when stored at 12-16° C. in the dark.

[0227] As an example of the efficacy of this method, a Steinernema kraussei nematode strain (#68) was previously isolated from a soil sample into which was placed only live Galleria mellonella larvae. A dead G. mellonella larvae was subsequently harvested and the sole nematode species isolated from the larvae was strain #68 (Mracek and Wester, J. Nematol. 25:710-717; 1993). Strain #68 was assayed for its insect inhibitory effects on larvae of the agricultural target insect pests corn earworm, black cutworm and beet armyworm as well as Galleria mellonella. Six 4th instar larvae for each species were placed individually into wells of a 24 well microtiter dish, each well being bottom lined with a disc of Whatman filter paper. Ten microliters of a strain #68 nematode suspension, obtained and maintained as described above, was placed into each well and incubated in the dark at 25° C. for three days. Larvae were then analyzed for survival, morbidity, and mortality. Unexpectedly, G. mellonella was not affected by nematode infestation, however all of the agricultural pest species were infected and killed. The agricultural pest larvae were surface sterilized and their haemolymphe was streaked onto NBTA indicator agar plates. Single Xenorhabdus colonies were isolated and sub-cultured to eliminate the presence of any possible contaminating bacteria and ensure pure Xenorhabdus cultures. The Xenorhabdus bacteria isolated from corn earworm, black cutworm and beet armyworm were then grown for 48 hours in liquid BHI medium. In order to access both extracellular and cell bound components which may be insect inhibitory, the culture was first subjected to a freeze thaw cycle, and then centrifuged and filtered (0.2 μm), and the resulting lysate was separated from insoluble material. The lysate was maintained at −70° C. unless used immediately. A 2D gel analysis of the filtrate was completed to determine the protein profiles of each supernatant in triplicate. Surprisingly, bacterial protein profiles of bacteria harvested from corn earworm larvae were similar to each other, but very different from the protein profiles of bacteria isolated from either black cutworm or beet armyworm insect larvae. This result suggests that a single strain of Xenorhabdus bacteria may be conditioned to express insect genus specific inhibitory proteins.

### Example 2

### Isolation of Symbiotic Bacteria

[0228] Symbiotic bacteria were isolated from entomopathogenic nematodes according to the following procedure. A variety of 4^{th} instar insect larvae (corn ear worm, tobacco bud worm, black cut worm, beet army worm, boll weevil, corn root worm, and also Galleria mellonella) was placed in a 24 well plate containing Whatman filters in each well. Approx. 10 μl of entomopathogenic nematodes suspension was added into each well containing one insect. The 24 well plates were sealed with parafilm and placed at 25° C. in the dark.

[0229] After 48 to 72 hours dead insect larvae were removed from the 24 well plate. The insect larvae were surface sterilized (20 ml water, 3 ml 4M NaOH and 1 ml 5% NaOCl) for 5 minutes and air-dried. The insect larvae were cut open with sterile instruments on the lateral side without injuring the gut and the haemolymphe was streaked on indicator agar (nutrient bromthymol blue agar and nutrient agar). The agar plates were incubated at 30° C. in the dark for 48 hours.

[0230] Characteristic colonies were selected from the indicator plates: phase I Xenorhabdus bacteria are able to take up bromthymol blue dye from the nutrient agar and form blue colonies. Bacterial characterization was performed according to methods known to the one skilled in the art (Farmer (1984), Bergey's Manual of Systematic Bacteriology, Vol. 1: 510-511; Akhurst & Boemare (1988), J. Gen. Microbiol., Vol. 133: 1835-1845; Boemare et al. (1993), Int. J. Syst. Bacteriol., Vol. 44: 249-255).

[0231] Single characteristic phase I colonies were picked up by an inoculation loop and suspended into BHI media (Brain Heart Infusion medium (Difco), 32 g/l, 50 ml in a 250 ml baffled flask). The bacteria were grown at 25° C. at 280 rpm on a rotary shaker in the dark. After 24 hours 15% glycerol was added to the bacterial culture, 1.5 ml aliquots for stock cultures were placed into cryovials and stored at −80° C.

### Example 3

### Genomic Library Construction

[0232] Xenorhabdus strain Xs85816 was isolated and purified according to methods described in examples 1 and 2 herein. Strain Xs85816 was associated with substantial insecticidal activity directed to lygus and boll weevil. Strain Xs85816 was deposited according to the Budapest Treaty on the International Recognition of the Deposit of Microorganisms for the Purpose of Patent Procedures with the Agriculture Research Culture Collection (NRRL) International Depositary Authority at 1815 North University Street, in Peoria, Ill. ZIP 61604 U.S.A. on Jun. 22, 2000 and designated as NRRLB-30306, after having first been shown to exhibit insecticidal activity against piercing and sucking insects, in particular against lygus species, and against boll weevil, and is contemplated as a source for DNA sequences encoding insecticidal proteins, and when formulated into a composition of matter as a spray, powder or emulsion, for the treatment of plants or animals to inhibit insect infestation. Xs85816 bacterial cells were grown in brain heart infusion broth (Difco) for 42 hours at 25° C. to mid-exponential phase (OD650=˜1.0). Cells were poured into 10 1.5 ml-microfuge tubes and spun for 5 minutes at ˜10,000 RPM to pellet. The supernatant was removed and the cells were frozen. The frozen pellets were resuspended into 200 μl of TE (10 mM Tris 1 mM EDTA pH 8.0). Genomic DNA was prepared from the frozen cell pellets using the Promega Genomic Preparation kit following the instructions of the manufacturer. Ten DNA samples were prepared from the cells above, and two of the samples were resuspended into 50 μl of TE. Sample purity was tested and confirmed by digestion using the restriction enzymes EcoRI, HindIII, NotI, and SalI. The resuspended samples were used for the preparation of a genomic library.

[0233] The genomic library of Xenorhabdus strain Xs85816 was prepared according to standard procedures well known to those skilled in the art. Sheared DNA was polished with T4 polymerase and T4 polynucleotide kinase. Fragments 2-3 kb in length were recovered from an agarose gel. BstXl linkers were then attached to the ends of the recovered fragments. BstXI linkers consisted of two oligos capable of hybridizing to each other over a portion of the length of one of the oligos, and providing a 3′ four base overhang consisting of 5′-CACA-3′. Linker-ligated 2-3 kb fragments were gel purified and ligated into the BstXI digested plasmid vector pJCP2 and transformed into E. coli DH10B. BstXI cuts twice within pJCP2, inactivating/removing a neomycin phosphotransferase coding sequence and leaving identical 3′ overhangs consisting of 5′-TGTG-3′. The resulting vector fragment contains an intact beta-lactamase coding sequence enabling selection of transformed cells containing genomic insertions into the exposed BstXI overhangs on media containing ampicillin. Several ampicillin resistant transformants were selected and streaked in duplicate onto media containing either ampicillin or kanamycin to determine the efficiency of the library construction. Greater than 95% of colonies arising from the transformation contained an insert, presumably derived from the genomic sequences. However, the insertion frequency was probably somewhat lower because of the opportunity for the BstXI excised nptII coding sequence to re-insert in an inverted orientation or BstXI adapter itself to be ligated and inserted into plasmid. Approximately 200,000 colony forming units per microliter of ligation mix were obtained. About thirty thousand individual recombinant colonies were selected for DNA sequence analysis of inserted genomic DNA.

### Example 4

### Generation and Assembly of Xenorhabdus sp. Genome Sequence

[0234] This example serves to illustrate the generation of the 1017 contigs and singletons listed in the Sequence Listing. About 58000 genomic nucleotide sequence traces were derived from the double stranded plasmid library as described in Example 3. The two basic methods for the DNA sequencing are the chain termination method of Sanger et al., Proc. Natl. Acad. Sci. (U.S.A.) 74:5463-5467 (1977) and the chemical degradation method of Maxam and Gilbert, Proc. Natl. Acad. Sci. (U.S.A.) 74:560-564 (1977) using automated fluorescence-based sequencing as reported by Craxton, Method, 2:20-26 (1991); Ju et al., Proc. Natl. Acad. Sci. (U.S.A.) 92:4347-4351 (1995); and Tabor and Richardson, Proc. Natl. Acad. Sci. (U.S.A.) 92:6339-6343 (1995) and high speed capillary gel electrophoresis, e.g. as disclosed by Swerdlow and Gesteland, Nucleic Acids Res. 18:1415-1419 (1990); Smith, Nature 349:812-813 (1991); Luckey et al., Methods Enzymol. 218:154-172 (1993); Lu et al., J. Chromatog. A. 680:49′7-501 (1994); Carson et al., Anal. Chem. 65:3219-3226 (1993); Huang et al., Anal. Chem. 64:2149-2154 (1992); Kheterpal et al., Electrophoresis 17:1852-1859 (1996); Quesada and Zhang, Electrophoresis 17:1841-1851 (1996); Baba, Yakugaku Zasshi 117:265-281 (1997). For instance, genomic nucleotide sequence traces are generated using a 377 or 3700 DNA Sequencer (Perkin-Elmer Corp., Applied Biosystems Div., Foster City, Calif.) allowing for rapid electrophoresis and data collection. With these types of automated systems, fluorescent dye-labeled sequence reaction products are detected and chromatograms are subsequently viewed, stored in a computer and analyzed using corresponding apparatus-related software programs. These methods are known to those of skill in the art and have been described and reviewed (Birren et al., Genome Analysis: Analyzing DNA, 1, Cold Spring Harbor, N.Y.

[0235] PHRED (phragment editor), which is developed by Phil Green at the University of Washington, was used to call the bases from the sequence trace files and to assign quality scores to the bases. PHRED uses Fourier methods to examine the four base traces in the region surrounding each point in the data set in order to predict a series of evenly spaced predicted locations. That is, it determines where the peaks would be centered if there were no compressions, dropouts, or other factors shifting the peaks from their “true” locations. Next, PHRED examines each trace to find the centers of the actual, or observed peaks and the areas of these peaks relative to their neighbors. The peaks are detected independently along each of the four traces so many peaks overlap. A dynamic programming algorithm is used to match the observed peaks detected in the second step with the predicted peak locations found in the first step. Default parameters were used in the base calling.

[0236] After the base calling is completed, sequence preprocessing is performed by removing 5′ and 3′ vector and linker sequences, according to standard procedures well known in the art.

[0237] The preprocessed sequences were then assembled into contigs, or groups of overlapping sequences. Contigs are assembled using PHRAP (phragment assembly program) developed by Phil Green at the University of Washington (http://www.mbt.washington.edu) using default assembly parameters. This program takes a file of shotgun sequences and compiles consensus contig sequences. Alignments are influenced by quality scores, based on Green's algorithm. Singletons are the remaining sequences without sufficient overlaps with others after the assembly. The contigs and singletons files and their corresponding quality files were united to create “islands”.

[0238] A total of 1017 contigs and singletons were obtained. Contig sequences are recognized as those sequences whose designations begin with XEN10C. Singleton sequences are recognized as those having designations which begin with gC-xewcLIB371. All contig and singleton sequences were run through the annotation and gene selection processes as described in Example 5.

### Example 5

### Identification of Xenorhabdus sp. Genes

[0239] This example illustrates the identification of genes within the 1017 contig and singleton sequences assembled as described in Example 4. The genes and partial genes embedded in such contigs and singletons were identified through a series of informatic analyses. Homology-based searches (i.e., BLASTX) were used to detect conserved sequences during comparisons of DNA sequences or hypothetically translated protein sequences to public and/or proprietary DNA and protein databases. Existence of an Xenorhabdus sp. gene was inferred if significant sequence similarity extended over the majority of the target gene. Novel genes, i.e., with no known homologs, were predicted with the program GeneMark, which calculates the probability of a gene based on the presence of a gene-like ‘grammar’ in the DNA sequence (i.e., start and stop signals, and a significant open reading frame) and statistical analyses of protein-coding potential through biases in putative codon usage. The results of the homology and predictive methods were then merged into a single set of predicted coding regions, and their most probable translation.

[0240] The homology-based method used to define the Xenorhabdus sp. gene set was BLASTX. For a description of BLASTX see Coulson, Trends in Biotechnology 12:76-80 (1994) and Birren et al., Genome Analysis, 1:543-559 (1997). BLASTX takes a nucleotide sequence, translates it in three forward reading frames and three reverse complement reading frames, and then compares the six translations against a protein sequence database (e.g. the non-redundant protein (i.e., nr-aa) database maintained by the National Center for Biotechnology Information as part of GenBank and available at the web site: http://www.ncbi.nlm.nih.gov). BLASTX is run with the Xenorhabdus sp. contigs and singletons as queries against the GenBank non-redundant protein data library identified as “nr-aa”. To identify genes solely by BLASTX, the maximum BLASTX E value is set at 1E-08.

[0241] The ab initio method used to define the Xenorhabdus sp. gene set was GeneMark. (see http://genemark.biology.gatech.edu/GeneMark for details). GeneMark uses inhomogeneous Markov chain models derived from comparisons of known coding and non-coding sequences to predict the presence of protein-coding regions.

[0242] In Table 1, protein encoding regions in the Xenorhabdus nucleic acid molecules of the present invention are identified and results of the BLAST and GeneMark analyses provided. Where the predicted protein has a match to a homolog in the non-redundant protein database, the confidence in accuracy of the gene prediction is proportional to the Bit score. “Bits” refers to information content, and the score in the “Bits” column indicates the amount of information in the hit. A higher bit score indicates a better match. Low complexity matches (which can generate high BLAST scores if they match over long stretches with other low quality data) are inherently low information content, and hence do not generate high “bit scores”. Where the protein has been predicted by GeneMark, the confidence in accuracy of the gene prediction is proportional to the GeneMark probability score. The higher the probability score, the more likely the DNA sequence is transcribed into mRNA and translated into protein. Many, but not all, proteins are predicted by both BLASTX and by GeneMark. In these instances, both Bit scores and GeneMark probabilities are provided.

Lengthy table referenced here
US20110166335A1-20110707-T00001
Please refer to the end of the specification for access instructions.

[0243] The translation for each predicted protein into strings of amino acids is provided. These predicted translations are the most probable, given the initiation and termination codons, and the biases in codon usage seen in publicly available Xenorhabdus genes.

[0244] Coding sequences identified in Table 1 encode many useful Xenorhabdus polypeptides or proteins, including but not limited to insect inhibitory polypeptides or proteins, polypeptides or proteins capable of conferring antibiotic resistance, cytotoxin proteins which may be used as microbial inhibitory proteins including bactericidal, bacteriostatic, fungicidal, and fungistatic polypeptides or proteins, polyketide synthases, polypeptides or proteins capable of conferring resistance to heavy metals or other toxic compositions, transposons and mobile genetic elements and their corresponding transposases, excisases, integrases, and invertases, phage and phage particle proteins, transcription regulatory proteins, translation regulatory proteins, and other useful proteins homologous to proteins derived from Xenorhabdus, Photorhabdus, Serratia, Yersinia, Salmonella, E. coli, and Erwinia sp.

[0245] The following tables, Table 2 through Table 6, are offered by way of illustration and not by way of limitation. It is to be understood that the present invention is not limited to the particular proteins or polypeptides or particular coding nucleotide sequences listed in Table 2 through 6.

TABLE 2
Xenorhabdus Insect Inhibitory Proteins (XIPs) from Strain Xs85816

| | Size | | | | | Top* | % amino |
|---|---|---|---|---|---|---|---|
| | (amino | SEQ | | Contig | Polypeptide | BLAST | acid |
| XIP | acids) | ID NO | Contig ID | Position | SEQ. ID No | hit | identity |
| XIP-1 | 975 | 430 | XEN10C530 | 1-2928 | 4689 | TccB | 43 |
| XIP-2 | 1527 | 429 | XEN10C501 | 4897-9480 | 4688 | TccB | 36 |
| XIP-3 | 1486 | 431 | XEN10C530 | 3006-7454 | 4690 | TcaC | 58 |
| XIP-4 | 1485 | 436 | XEN10C642 | 26555-31012 | 4695 | TcaC | 53 |
| XIP-5 | 986 | 432 | XEN10C530 | 7521-10481 | 4691 | TccC | 64 |
| XIP-6 | 1016 | 437 | XEN10C642 | 31069-34116 | 4696 | TccC | 51 |
| XIP-7 | 1599 | 428 | XEN10C501 | 2-4801 | 4687 | TccA | 30 |
| XIP-8 | 2384 | 433 | XEN10C628 | 3006-10160 | 4692 | TccB | 37 |
| XIP-9 | 2347 | 3733 | XEN10C642 | 18925-25968 | 7992 | TcdA | 45 |
| XIP-10 | 2523 | 438 | XEN10C642 | 3630-11138 | 4697 | TcdA | 51 |

Top BLAST hit determined as described by Altschul, S. F., T. L. Madden, A. A. Schaffer, J. Zhang, Z. Zhang, W. Miller, and D. J. Lipman. 1997. Nucleic Acids Res. 25: 3389-3402.
Percent (%) amino acid identity calculated using the algorithm described by Smith-Waterman.
*proteins indicated were best hits, and all were identified from public databases and represent Photorhabdus species hits

TABLE 3
Antibiotic Resistance Proteins from Strain Xs85816

| PolyPepetide | | Position: | | |
|---|---|---|---|---|
| SEQ ID No. | Contig ID | Start-Stop | Description of the best match for the encoded protein | % ident¹ |
| 4564 | XEN10C101 | 172-837 | (AF047828) syringomycin synthetase [Pseudomonas syringae pv. syringae] | 28 |
| 4565 | XEN10C133 | 0-815 | (AF047828) syringomycin synthetase [Pseudomonas syringae pv. syringae] | 53 |
| 4566 | XEN10C2 | 36-713 | (AF047828) syringomycin synthetase [Pseudomonas syringae pv. syringae] | 50 |
| 4567 | XEN10C209 | 1-519 | Streptomycin 3″-Adenylyltransferase (AAD(9)) [Staphylococcus aureus] | 45 |
| 4568 | XEN10C211 | 50-655 | (L37441) thymidine:thymidylate kinase:zeocin resistance fusion protein [Cloning vector | 69 |
| | | | pZEO-SG3] | |
| 4569 | XEN10C224 | 2-2086 | (AF047828) syringomycin synthetase [Pseudomonas syringae pv. syringae] | 52 |
| 4570 | XEN10C236 | 2080-2229 | Chloramphenicol Acetyltransferase II (CAT-II) [Escherichia coli] | 69 |
| 4571 | XEN10C269 | 2-2713 | (AF047828) syringomycin synthetase [Pseudomonas syringae pv. syringae] | 51 |
| 4572 | XEN10C271 | 1313-1642 | (AF055922) tylosin resistance protein [Streptomyces fradiae] | 43 |
| 4573 | XEN10C275 | 0-1706 | (AF047828) syringomycin synthetase [Pseudomonas syringae pv. syringae] | 49 |
| 4574 | XEN10C292 | 1350-2477 | (D90809) Bicyclomycin resistance protein (Sulfonamide resistance protein). [Escherichia coli] | 49 |
| 4575 | XEN10C303 | 1976-2329 | ARSENICAL RESISTANCE OPERON REPRESSOR [Escherichia coli] | 60 |
| 4576 | XEN10C356 | 2-4009 | (AF047828) syringomycin synthetase [Pseudomonas syringae pv. syringae] | 47 |
| 4577 | XEN10C368 | 4288-5331 | MULTIDRUG RESISTANCE PROTEIN A [Escherichia coli] | 62 |
| 4578 | XEN10C380 | 0-1520 | MULTIDRUG RESISTANCE PROTEIN B [Escherichia coli] | 69 |
| 4579 | XEN10C383 | 250-4962 | (X98690) Pristinamycin I synthase 3 and 4 [Streptomyces pristinaespiralis] | 35 |
| 4580 | XEN10C390 | 1403-2539 | (AJ235272) BICYCLOMYCIN RESISTANCE PROTEIN (bcr1) [Rickettsia prowazekii] | 28 |
| 4581 | XEN10C404 | 4194-4739 | (U09991) chloramphenicol resistance protein [Streptomyces venezuelae] | 30 |
| 4582 | XEN10C406 | 990-5183 | (AF047828) syringomycin synthetase [Pseudomonas syringae pv. syringae] | 46 |
| 4583 | XEN10C420 | 3964-5148 | (AJ248286) MULTIDRUG RESISTANCE PROTEIN (MULTIDRUG-EF FLUX | 23 |
| | | | TRANSPORTER) [Pyrococcus abyssi] | |
| 4584 | XEN10C437 | 4924-6348 | (U24657) saframycin Mx1 synthetase A [Myxococcus xanthus] | 34 |
| 4585 | XEN10C438 | 3-7853 | (AF047828) syringomycin synthetase [Pseudomonas syringae pv. syringae] | 48 |
| 4586 | XEN10C442 | 289-7707 | (AF047828) syringomycin synthetase [Pseudomonas syringae pv. syringae] | 44 |
| 4587 | XEN10C494 | 9068-10198 | (AE000308) bicyclomycin resistance protein; transmembrane protein [Escherichia coli] | 54 |
| 4588 | XEN10C522 | 1818-9263 | (AF047828) syringomycin synthetase [Pseudomonas syringae pv. syringae] | 47 |
| 4589 | XEN10C541 | 5467-5895 | (L37442) thymidylate:zeocin resistance protein:NDP kinase fusion protein [Cloning vector | 80 |
| | | | pZEO-SG4] | |
| 4590 | XEN10C552 | 916-3615 | (Y11547) Virginiamycin S synthetase [Streptomyces virginiae] | 31 |
| 4591 | XEN10C557 | 10655-15826 | (AF047828) syringomycin synthetase [Pseudomonas syringae pv. syringae] | 44 |
| 4592 | XEN10C560 | 4913-14935 | (AF047828) syringomycin synthetase [Pseudomonas syringae pv. syringae] | 43 |
| 4593 | XEN10C561 | 8781-9134 | (D90802) Putative ethidium bromide resistance protein (E1 protein). [Escherichia coli] | 69 |
| 4594 | XEN10C561 | 9139-9468 | (D90802) Putative ethidium bromide resistance protein (E1 protein). [Escherichia coli] | 69 |
| 4595 | XEN10C578 | 13385-14890 | (AF047828) syringomycin synthetase [Pseudomonas syringae pv. syringae] | 36 |
| 4596 | XEN10C581 | 72-3662 | (AF047828) syringomycin synthetase [Pseudomonas syringae pv. syringae] | 50 |
| 4597 | XEN10C589 | 5331-6146 | Aminoglycoside 3′-phosphotransferase (Kanamycin kinase, Type I) (Neomycine-kanamycin | 100 |
| | | | phosphotransferase, Type I) (APH(3′)1) [Synechocystis promoter probe vector pILA] | |
| 4598 | XEN10C594 | 9447-12644 | (U24657) saframycin Mxl synthetase A [Myxococcus xanthus] | 39 |
| 4599 | XEN10C596 | 7261-18768 | (AF047828) syringomycin synthetase [Pseudomonas syringae pv. syringae] | 48 |
| 4600 | XEN10C604 | 19629-26336 | (AF047828) syringomycin synthetase [Pseudomonas syringae pv. syringae] | 47 |
| 4601 | XEN10C608 | 2-5599 | (AF047828) syringomycin synthetase [Pseudomonas syringae pv. syringae] | 48 |
| 4602 | XEN10C614 | 687-1877 | FOSMIDOMYCIN RESISTANCE PROTEIN [Escherichia coli] | 61 |
| 4603 | XEN10C621 | 12281-13480 | (AF034958) chloramphenicol resistance determinant [Enterobacter aerogenes] | 59 |
| 4604 | XEN10C638 | 7528-8712 | MULTIDRUG RESISTANCE PROTEIN D [Escherichia coli] | 55 |
| 4605 | XEN10C91 | 2-463 | Chloramphenicol acetyltransferase III [Enterobacteriaceae] | 61 |

¹“% Ident” refers to the percentage of amino acid sequence identity between the identified Xenorhabdus protein and the best match in the public database.

TABLE 4
Cytotoxin Proteins from Strain Xs85816

| PolyPepetide | | Position: | | |
|---|---|---|---|---|
| SEQ ID No. | Contig/Singleton ID | Start-Stop | Description of the best match for the encoded protein | % Ident¹ |
| 4606 | XEN10C369 | 5125-5583 | CYTOLYSIN-ACTIVATING LYSINE-ACYLTRANSFERASE RTXC | 68 |
| | | | [Vibrio cholerae] | |
| 4607 | XEN10C369 | 3989-5230 | (AF119150) RtxD protein [Vibrio cholerae] | 64 |
| 4608 | XEN10C369 | 5613-6050 | (AF119150) RtxA protein [Vibrio cholerae] | 57 |
| 4609 | XEN10C372 | 1-4821 | (AF119150) RtxA protein [Vibrio cholerae] | 59 |
| 4610 | XEN10C515 | 4710-10940 | (AF119150) RtxA protein [Vibrio cholerae] | 57 |
| 4611 | XEN10C600 | 2-12301 | (AF119150) RtxA protein [Vibrio cholerae] | 62 |
| 4612 | XEN10C601 | 3-6467 | (AF119150) RtxA protein [Vibrio cholerae] | 63 |
| 4613 | gC-xewcLIB3716P214h05b1 | 338-652 | (AF119150) RtxA protein [Vibrio cholerae] | 33 |
| 4685 | XEN10C252 | 3-809 | (D45904) lambda toxin [Clostridium perfringens] | 43 |
| 4686 | XEN10C395 | 0-1433 | LEUKOTOXIN SECRETION ATP-BINDING PROTEIN | 50 |
| | | | [Actinobacillus actinomycetemcomitans] | |
| 4693 | XEN10C636 | 12460-19449 | cytotoxin L-Clostridium sordellii [Clostridium sordellii] | 24 |

¹“% Ident” refers to the percentage of amino acid sequence identity between the identified Xenorhabdus protein and the best match in the public database.

TABLE 5
Polyketide Synthase homologs from Strain Xs85816

| PolyPepetide | | Position: | | |
|---|---|---|---|---|
| SEQ ID No. | Contig/Singleton ID | Start-Stop | Description of the best match for the encoded protein | % Ident¹ |
| 4385 | XEN10C22 | 2-688 | polyketide synthase pksE - Mycobacterium leprae [Mycobacterium leprae] | 38 |
| 4386 | XEN10C337 | 1500-3416 | (Z99113) polyketide synthase of type I [Bacillus subtilis] | 39 |
| 4387 | XEN10C375 | 1647-2510 | HYPOTHETICAL 31.2 KD PROTEIN IN PPSA-AROH INTERGENIC | 71 |
| | | | REGION [Escherichia coli] | |
| 4388 | XEN10C409 | 4187-7063 | PHENOLPTHIOCEROL SYNTHESIS POLYKETIDE SYNTHASE | 41 |
| | | | PPSA [Mycobacterium tuberculosis] | |
| 4389 | XEN10C437 | 2762-3361 | (U04436) putative polyketide synthase [Anabaena sp.] | 36 |
| 4390 | XEN10C521 | 11172-9160 | (AF210843) polyketide synthase [Sorangium cellulosum] | 31 |
| 4391 | XEN10C575 | 11083-14322 | PUTATIVE POLYKETIDE SYNTHASE PKSK (PKS) [Bacillus subtilis] | 31 |
| 4392 | XEN10C624 | 2523-3392 | (Z99112) pksE [Bacillus subtilis] | 41 |
| 4393 | XEN10C624 | 3569-12673 | PUTATIVE POLYKETIDE SYNTHASE PKSL (PKS) [Bacillus subtilis] | 37 |
| 4394 | XEN10C624 | 15506-24427 | (Z99113) polyketide synthase [Bacillus subtilis] | 27 |
| 4395 | XEN10C97 | 2-895 | PHENOLPTHIOCEROL SYNTHESIS POLYKETIDE SYNTHASE | 30 |
| | | | PPSA [Mycobacterium tuberculosis] | |

¹“% Ident” refers to the percentage of amino acid sequence identity between the identified Xenorhabdus protein and the best match in the public database.

TABLE 6
Protein homologs from Strain Xs85816 Capable of Conferring Resistance to Heavy Metals or Other Toxic Compositions

| PolyPepetide | | Position: | | |
|---|---|---|---|---|
| SEQ ID No. | Contig/Singleton ID | Start-Stop | Description of the best match for the encoded protein | % Ident¹ |
| 4396 | XEN10C145 | 0-998 | (D90917) acriflavine resistance protein [Synechocystis sp.] | 34 |
| 4397 | XEN10C252 | 1019-2065 | EXTRACELLULAR METALLOPROTEASE PRECURSOR [Erwinia carotovora] | 47 |
| 4398 | XEN10C614 | 21341-24490 | ACRIFLAVIN RESISTANCE PROTEIN B [Escherichia coli] | 74 |
| 4399 | XEN10C614 | 20126-21325 | ACRIFLAVIN RESISTANCE PROTEIN A PRECURSOR [Escherichia coli] | 65 |
| 4400 | XEN10C641 | 40415-41002 | TELLURIUM RESISTANCE PROTEIN TERZ [Plasmid R478] | 71 |
| 4401 | XEN10C641 | 42682-43752 | TELLURIUM RESISTANCE PROTEIN TERC [Escherichia coli] | 77 |
| 4402 | XEN10C641 | 43779-44357 | TELLURIUM RESISTANCE PROTEIN TERD [Plasmid R478] | 82 |

¹“% Ident” refers to the percentage of amino acid sequence identity between the identified Xenorhabdus protein and the best match in the public database.

### Example 6

[0246] Functional utility of insect inhibitory proteins produced by Xenorhabdus (or Photorhabdus) was tested using the following or a similar procedure. 50 ml BHI medium in a 250 ml baffled flask was inoculated with 1.5 ml bacterial stock culture and grown at 25° C. and 280 rpm on a rotary shaker in the dark. After 48 hours the culture was frozen at −80° C. for at least 24 hours. The culture broth was then thawed, centrifuged at 2600×g for 30 minutes at 4° C. and decanted from the cell and debris pellet. The broth was then sterile-filtered (0.2 μm) and dialyzed. The culture supernatant was used without an additional concentration step for bioassays to evaluate insect inhibitory, fungicidal and bactericidal properties. Larvae were obtained using insect eggs obtained from commercial sources, hatched and reared using conventional insectary methods.

[0247] Insect inhibitory activity was observed against western corn rootworm (WCR) and cotton boll weevil which are members of the insect order Coleoptera. The WCR is a member of the family Chrysomelidae. Other members of the Chrysomelid family include the Colorado potato beetle, the flea and leaf beetles. The cotton boll weevil is a member of the family Curculionidae which includes stored grains pests such as the rice and maize weevils and billbugs. Other Coleoptera include wireworms, seed-feeding bruchids, and grubs.

[0248] Insect inhibitory activity against western corn rootworm larvae was tested as follows. Xenorhabdus culture supernatant, control medium (BHI) or Tris buffer, pH 7.0, was applied to the surface (about 0.38 cm²) of a modified artificial diet (Bioserv™; diet product F9757) in 20 μl aliquots. The plates were allowed to air-dry in a drying chamber (16-20° C.; 40-50% RH) and the wells were infested with single non-diapausing neonate western corn rootworm (Coleoptera: Diabrotica virgifera virgifera LeConte) hatched from surface disinfested eggs (Pleau, M., 1999. Master of Science Thesis, Nutritional physiology of Diabrotica virgifera. Saint Louis University). Plates were sealed, placed in a humidified growth chamber and maintained at 27° C. for the appropriate period (5-7 days). Mortality and stunting (0-3) scores were then assessed and statistically analyzed (SAS institute, 1989-1997. User's manual for JMP version 3.2). Generally, 24 insects per treatment were used in all studies. Control mortality was generally less than 10%.

[0249] Insect inhibitory activity against the cotton boll weevil (Coleoptera: Anthomonas grandis) was tested as follows. Xenorhabdus supernatant, control medium (BHI) or tris, pH 7.0, were applied in 20 μl aliquots to the surface of 200 ul of artificial diet (Bioserv™ Co., Frenchtown, N.J.; diet product F9247) and allowed to air-dry. Boll weevil eggs were then placed into the wells, the wells sealed and the plates held at 27° C., 60% relative humidity (RH) for 6 days. An activity score, based on confounding of frass production, growth and mortality was then assessed and analyzed statistically (SAS institute, 1989-1997. User's manual for JMP version 3.2). Control mortality ranged between 0-25%.

[0250] The bacterial culture supernatant was also active against Lepidopteran larvae, such as the cotton bollworm, corn earworm, beet armyworm, and black cutworm, which are members of the Noctuidae family. Other Noctuids include the armyworms of the genus Spodoptera, and the loopers such as the cabbage looper. Activity was also observed against the European corn borer, a member of the Pyralidae family. Other Pyralids include the southwestern corn borer, the rice yellow stem borer, the pink stem borer, leaf rollers, and the Asiatic striped stem borer. Other typical members of the order Lepidoptera are the codling moth, clothes moth, Indian meal moth, cabbage worm, bagworm, Eastern tent caterpillar, sod webworm, and tobacco and tomato hornworms.

[0251] Insect inhibitory activity against Lepidopteran larvae was tested as follows. Xenorhabdus culture supernatant, control medium (BHI) and Iris buffer, pH 7.0, were applied directly to the surface (about 0.38 cm²) of standard artificial Lepidopteran diet (Southland Products Incorporated, Lake Village AR; diet product Lepidopteran multi-species diet) in 20 μl aliquots. The diet plates were allowed to air-dry in a drying chamber (16-20° C.; 40-50% RH). The test wells were then infested with insect eggs, suspended in agar, of tobacco bud worm (Heliothis virescens), corn ear worm (Helicoverpa zea) or black cut worm (Agrotis ipsylon). In the case of European corn borer (Lepidoptera: Ostrinia nubilalis), neonates were hand infested into the wells at one neonate per well. Following infestation, diet plates were sealed, placed in a humidity controlled growth chamber and maintained in the dark at 27° C. for the appropriate period of time. Mortality and stunting measurements were scored at day 5 and statistically analyzed (SAS institute, 1989-1997. User's manual for JMP version 3.2). Generally 24 insects per treatment were used in all studies. Control mortality generally ranged from 0-12.5%.

[0252] Insect inhibitory activity was also demonstrated against Lygus bug, a member of the order Hemiptera. Other members of the order include the stink bugs, seed bugs, chinch bugs, and stainers.

[0253] Insect inhibitory activity against Lygus bug (Hemiptera: Lygus hesperus), was tested as follows. Feeding domes were made using a dome-making machine manufactured by Analytical Research Systems, Gainesville Fla. Briefly, the system uses a vacuum to form domes from Parafilm™ sheeting using an aluminum block template shaped in the form of a 96-well microtiter-plate. To each such formed dome was added 40 ul of a 1:10 (v/v) dilution of test solution in diet. The dome-molded Parafilm™ is then heat sealed with a sheet of Mylar. The resulting Parafilm dome sheet (96-wells) is placed onto a 96-well flat-bottomed microtiter plate containing one Lygus nymph each. The assay is typically scored after 4 days for mortality and stunting (0-3).

[0254] Insect inhibition results from all tests is shown in Table 7.

TABLE 7
Bioactivity of Strain Xs85816

| BCW | WTB | BWV | CEW | TBW | WCR | Rs | Fg | Sc | Ml | Bc | Sa |
|---|---|---|---|---|---|---|---|---|---|---|---|
| − | +++ | ++ | − | − | − | + | − | ++ | + | + | +++ |

Legend: BCW = Black Cut Worm; WTB = Western Tarnished Plant Bug; BWV = Boll Weevil; CEW = Corn Ear Worm; TBW = Tobacco Bud Worm; WCR = Western Corn Root Worm; Rs = Rhizoctonia solani; Fg = Fusarium graminearum; Sc = Saccharomyces cerevisiae; Ml = Micrococcus luteus; Bc = Bacillus cereus; Sa = Staphylococcus aureus.
− = no activity; + = low activity; ++ = medium activity; +++ = strong activity

### Example 7

[0255] This example illustrates the alignment of insect inhibitory amino acid sequences identified from publicly available databases to sequences encoded by genomic sequences disclosed herein. Also, thermal amplification primers are described based on conserved regions identified in the alignments which can be used to isolate DNA sequences encoding insect inhibitory proteins from both Xenorhabdus and Photorhabdus species. Surprisingly, primers designed to isolate insect inhibitory proteins based on regions of substantial homology between proteins from diverse species fail to produce amplification products from strains which are believed to be phylogenetically more closely related and which have been shown to produce insect inhibitory proteins active against the same target pest insect species. In this example, Xenorhabdus and Photorhabdus strains other than strain Xs85816 and W14 were selected for thermal amplification and southern blot analysis based on their having demonstrated activity against southern corn rootworm.

[0256] Translation of Xenorhabdus genomic data indicated several sequences encoding proteins which exhibited homologies to previously identified Photorhabdus insect inhibitory polypeptides available in public databases such as GenBank (see, for example Table 2). Thermal amplification primers were designed to amplify DNA sequences from within insect inhibitory coding sequences. Based on Xenorhabdus sequences which were aligned with Photorhabdus sequences, the top BLAST hits were used along with regions of greatest amino acid sequence conservation for primer design. Xenorhabdus polypeptide XIP8 most closely aligned with polypeptide TccB from Photorhabdus strain W14. Based on this alignment, regions of greatest amino acid sequence homology were used to design a XIP-8 primer set consisting of the primers 5′-GAGATCGATCCGGATACAG-3′ and 5′-AATATTCAAACGGCGCTC-3′. As indicated in Table 8, this primer set amplified DNA xip8 sequences from Xenorhabdus strain Xs85816 but not from other Xenorhabdus strains or from at least one other Photorhabdus strain. Interestingly, a primer set designed from regions of identity between XIP9 and XIP10 protein coding sequences comprising the primers 5′-CCGGAACCKCARTTRGGYRAAGG-3′ and 5′-GCCTGAGTYTGTGCYTGCTG-3′ was able to amplify xip9 and xip10 coding sequences from Xenorhabdus strain Xs85816 as well as sequences from several other Xenorhabdus strains. However, the XIP9/10 primer set failed to amplify sequences from every Xenorhabdus or Photorhabdus strain analyzed, even though degeneracies (R=A+G, Y=C+T, W=A+T) were engineered into the primer set to compensate for possible wobble. A further primer set similar in nature to the set designed for XIP9 and XIP10 was also designed from DNA sequences encoding regions of amino acid sequence identity between XIP1 and XIP2 consisting of the sequences 5′-CGTGATGCGGAAAACTGGTATCA-3′ and 5′-TGRCTRACRCGWGGATTRGAAAG-3′. Primer set XIP1/2 failed to amplify any sequences from Xenorhabdus or Photorhabdus strains other than Xenorhabdus strain Xs85816.

[0257] The product derived from thermal amplification of Xs85816 genomic DNA using the primers designed to amplify XIP8 coding sequences was labeled and used to probe total genomic DNA from Xs85816 as well as other Xenorhabdus and Photorhabdus strains. A thermal amplification product derived from Xenorhabdus strain Xs85816 ompR, a highly conserved gene at the DNA sequence level among gram negative Enterobacteriaceae, was used as a control. The ompR sequence was able to hybridize to sequences in all strains analyzed, however, the xip8 sequence failed to hybridize to any sequences in the strains tested other than Xs85816. In addition, ompR thermal amplification primers based on the ompR gene in Xs85816 also amplified a sequence of equivalent size from each strain tested. These results, taken together, suggest a large diversity in the proteins exhibiting insect inhibitory activity from both Xenorhabdus and Photorhabdus species.

TABLE 8
Characterization of Xenorhabdus and Photorhabdus Strains

| | | | XIP-8 | XIP-9/10 | XIP-1/2 | OmpR | |
|---|---|---|---|---|---|---|---|
| Bacterial | Symbiotic | WCR | PCR | PCR | PCR | PCR | Southern |
| Strain | nematode | Activity | product | product | product | product | (XIP-8) |
| 85816 | Steinernema sp | no | yes | yes | yes | yes | yes |
| 85825 | S. intermedium¹ | yes | no | yes | no | yes | no |
| 85826 | S. intermedium¹ | yes | no | yes | no | yes | no |
| 85828 | S. carpocapsae² | yes | no | yes | no | yes | no |
| 85830 | S. kraussei³ | yes | no | no | no | yes | no |
| 85831 | Steinernema sp | yes | no | no | no | yes | no |
| 85832⁴ | Heterorhabditis sp | yes | no | no | no | yes | no |

¹denotes a nematode species substantially like Steinernema intermedium
²denotes a nematode species substantially like Steinernema carpocapsae
³denotes a nematode species substantially like Steinernema kraussei
⁴85832 denotes a Photorhabdus strain isolated from a Heterorhabditis nematode species.

LENGTHY TABLES
The patent application contains a lengthy table section. A copy of the table is available in electronic form from the USPTO web site (http://seqdata.uspto.gov/?pageRequest=docDetail&DocID=US20110166335A1). An electronic copy of the table will also be available from the USPTO upon request and payment of the fee set forth in 37 CFR 1.19(b)(3).

The application's sequence listing, which the Patent Office published only in electronic form, follows.

SEQUENCE LISTING (8415 sequences)

SEQ ID NO: 1 - DNA, 568 bp, Xenorhabdus sp.
ctctaaagtgcaccaccattctgaaaagcccgttttcaggatactcaaataatgttgctgtcagataaaaagattggctggctaatttagccagctcaacccaactttgcaagaaaaatatgcgattaattagccttggcgctgtttatgcttaggctctgcactgcaaatcacacgaacgataccgttacgtttaacgattttgcagttacgacataatttcttgacggaagcacgaactttcatttttactctccgtaacttctcaagcaaaccgattagcggttatatcctttcaggtttgccttcttcaatgcagactcatactgactcgacatcatcagagtttgcacttgagccataaagtccatgatgacgacgactacaatcagtagggaagtaccaccaaaatagaatggaactttcattgcatcacgcatgaactccgggattaagcagataaaggtaatatataacgcaccaactaaggttagacgagtcattactttatcgatgtacttagccgtttgctctcccggacgaattcctggtacaaatgcaccggact

SEQ ID NO: 2 - DNA, 327 bp, Xenorhabdus sp.
taatgtaaaagtgctggaacgcattcatcctgattaggatgtttatggttttcacccctacaatatcggtcgtctgtgccagcgtgctccaagattacgcccttgtacgccacgaggtatcgtgactctccttgagcgctgtaatatcaatacttatggattaaatgcggttattattggggcctccaatattgtcggccgtccgatgagtcttgagctactgttagctggatgtactacaacagtcactcatcgctttactacggatctacgccagcatgtagaacaggctgatttattgatcgtcgcggtcggtaaaccaaactt

SEQ ID NO: 3 - DNA, 951 bp, Xenorhabdus sp.
ttggtcatgggtgtaatacaaaaattgtaattttcactttcacaaacaataattcagtcgctaaagtgttcgcagctttctgctactttccggctatttgtggggtgatccgcggggaattaatgggagcattcacggagctacctgtgctgattattattcaaaccctgcaatgtgggactttcactgtttgccattaagcggctatgcgttttatcggtgccagaaaagaaaatgaagttattcgcctacagtcagtctactctgcgttagcaatgggtggcggtatcgctgttatgagtgcagtaggtggtttcctgtatgaacatatgggaggcggaatctactgggtaatggcgctggtcgcattaccggcgattttcttacggcctaaagctgaaggtcaaattcattcggtgtgaaattaaattataaataagaaacaataaattaataagaactcagtaaaaagggcacctatcgttttggtgccctgtaaataacattgctcagttaaattaacgtttcagtgcttcagttaattcttcacgcatttcagacagcatatctttaacaatacgtgggctgcctgcaacgatattaccggaactgatgtagttgtgaccaccaacaaagtcagtcacgatacagccggattcacgtaccagcagttcaccacccatgaaatcccatggtttcaggccgatttcgaaataaccatcaacacggccggctgcaacataagccatatccagcgccgcagagccggtgcgacgaaaatctgcacaacgttcaaataatttacccagtacgttcatgtaagggatagcgtgttgtttagctttgaatgggaaaccggtagcaatgatagtgccatccagatcacgggcattagcaccacgcaagcgataaccattcagctgtgcaccctgaccacgagtagcagtgaac

SEQ ID NO: 4 - DNA, 1018 bp, Xenorhabdus sp.
taattttagtgaaaattttaccgcgttttgcatcctgcgccgctttacggtgcttcgtattggcccacttactatgacctgccatgaaaatatctccgataaaacgtctgtgcctttcatcattcagtttacctgttttatctacggtaaactgaaatctgtcaggtttagcagactaaataacaaactcttcaattgcctgctgattgctccatgacttagtcaggctggccgctttttccactgccagccattgataagccagatgctctgtcaacaggatctcgcactccccgggcaacggcaacaaaaaccagtgttctttgttccgtgttaccccgggagcatatcgataacgtaaatgtgagaagatctcataatagaggctgcgctgacaatctatcagttcaagattggcactgacaatatcaatcccgatctcttcctgtacttcacgcaacgctgcttcatacggcttttcgttctcttcgaggctccccgtaacggattgccagaaatcaggatcgtcccgccgttgtaacatcagcacccttttgctgtcggcagcataaataacaaccagtacagattcagggcgcttgtaatccattattcgctctcttttttagtaaccgaaatagctaactcttccagtgctgccgaacttgcgtaacccggtgcttcagtcatcagacatgctgctgcagttgttttcgggaatgcaatcacatcacggatattatcagtatccgtcagcaacataacgaggcgatccagaccaaaagccagccctgcatgaggaggcgtgccatatttcagggcattcagaaggaaaccgaatttttcctgttgttcttcttcggtgatacccagaatacggaataccgcctgctgcatttcattacgatggatacgtactgaacccccacccacttcgtagccattgatcaccatatcatatgcattcgcaatagcagattcagggttactttccagctctttggcagaacatatcgca

SEQ ID NO: 5 - DNA, 893 bp, Xenorhabdus sp.
taagggccctacagttccaaagcagacttgacaaacgagaacattgtgtttcaaattcgggaacacactctgcgtcgtgtacctttcatgctaatctgtggtgataaagaggtcgcgtcacgataagtttccgttcgtacccgccgcggtaaggatttaggtaccttatatttcaccgatttctcacataacactctgtcagaaatactcacccgcaatcttcgacagttgtaggaattgggccttattggcggattaataattcaacccgctctcccaaatcgccttaatgaacagattcgcacctctgaagctggtttaactgggttagatggcgagcagattgcttttgtcgatctgtgaggagctcttgttaaagctgacggagctggggttggttgggtggaaatcaacccaaatgccgaaccgcccgttcgttgtatcatggattacggcttgttcctcttttagaagagttggtcagttatgggactgagcatgaaccttatgggctttcatgtctgggaatttaaatttctttctggtacagatgaatgcgactatcaggtcaaactactcaacctgattcgttttctggaagatggctattaagccaaaatcaccctgcgtttccgtggacgtgaaatggcgcatcaacatattgtcatcgaaatgcttaaccgcattcgtgaagatttgagtgaactggcagtggtcgaatccttcccatcgaagatcgaaggccgtcagatgatcatggtgctcgctcctaagaagaaatagtcaggcatacaagtagcaggctccaaccagtttggaaggggtctgttcgccttactagttcgttgtaattaacaatgcgaagtggatattaaaatgccaaatattaaaac

SEQ ID NO: 6 - DNA, 744 bp, Xenorhabdus sp.
ataggggttgaaggataggcgggagcgggctcttttccgtgaactgattaaagttaatggcgtcgggccaaaactggcactggcgatcctttctggtatgtctgctcagcaatttgttactgctattgagcaggaggctatttcttctctggttaagttaccgggagttggtaaaaaaacagcggaaagattagtcgtagaaatgaaagatcgttttaaagggcttaatggcgatctgttcaatcaaaatagcgatattaatttgccagcagcaacacaaccggctaattccgatgctgatattgaagcagaagctgcggcagctctggtttcactgggatataaaccacaggaagcaagccggatggtcagcaaagtggctaaaccgggcgcagattgtgaaatccttatccgagaagcgcttcgtgcggctctgtaatgtcaggagttaagtgatgattgaagctgatcgtctggtttcagcagaaattctgcaagatgatgaggcggttgatcgcgctatcaggccaaaattcttatctgaatatgttggtcagcctcatgtctgtgagcaaatggagatttttattcaggctgcacggcagaagggggatgcgttagatcacctgctgatttttggccctccaggattgggtaaaactacgctggcgaatatcgttgccaacgaaatgggtgtgaatctgcgtacaacttcaggaccagtattggaaaaagcaggtgatc

SEQ ID NO: 7 - DNA, 894 bp, Xenorhabdus sp.
agaaactatggttgttacatttagaggattagatggccaaagaagacaatattgaaatgcaaggtactgtgttagacacactgccaaacaccatgtttcgtgtcgaattagagaacggacacgtcgttactgctcacatttcaggcaaaatgcgtaaaaactatatccgcatcctgactggagacaaggttacagttgaactaactccatatgacctgagcaaaggccgtatcatcttccgtagccgctgattccgataccttcttacacaccacaggttatgtattttcaacattcgcctgtggtgttgctcttaacttagttgctagttttgcatataccgtactgattatagtacggcatcttctgattttttcttgtttgatttttgtacgcttttgaaatcgtatttcagtgcacttttatctttatcaagactaattctgactgaacctccatgtactaaagagccaaacaacaactcgttagctaatggctttttcaggctatcctgaatcacacgggccatcggacgggcacccatcgctttatcataccctttatcacataaccactgacgggcatccgtgctgatttccagagacacacctttttcatccagttgaacctgcaattcaacaatgaatttatcaaccacttgttgaataacttccgcagaaagtgagtcaaaccagataatactatcaagacgattgcgaaattcgggggtaaaggttcgtttgatctcagccattccatcaatgctattatcctgttccgtgaacccaatggatttacgctgtatttcacgtacgcccgcattggttgtcatcaccagaataacattacggaaatctgccttccggccattgttatcagtcaacgttccgttat

SEQ ID NO: 8 - DNA, 1311 bp, Xenorhabdus sp.
tcagtaacgtagtatgatcgataaccaccagcgcagctccgttgagcagcggtgcccatacctcaaaagtactggcatcgaaagccggattagcggcaaaagcaatgcgatcatcagatttaatatcagcataaccattattaataaccagccggacaacagcccggtgtggcacaatgacgcctttcggtagccccgtcgaaccagaggtatacatgatatacgctggcccggtactggtaaccgataaatcaggattgcgatattcttcttttccaataggtttgttgcgagggtaagactgagtcggggaacaactaattcagccggggtcgccatctgcatatcagtcagcagtaatttggcggaacaatcatttatcagccagtttttccgttcatccggcacattcggatcaataggaacataaacggcaccggatttcagaatagctaactgagctaccaccaattcaattgagcgctccaacagaatcgctacatgatcacccggacaaataccctgttcaatcagttgagtcgctaacctgttagcctgagcattcacctacacataattcagtatttgattgccggcaattaatgctatggcagttggcgttctctcagcctgatgttcaaataactgatgaatacatagatggtcaggatacggagtttccgtggagttgcagatttccggcaacagagaatattcagtctcatataacccattaaactttcctgtgaatatgtcatcactcattttttctgacgacatatccactaccccagcttcaagaatattattcttgctggtaatactgtctttcatttttttactacctcaacgaatctattgaatatttgaaaactgttatatctgctgtttttaaattgcttatttacgtcaggtaactatcacaattgttttattttattttttgagagaataaaaacgggaacgccgagtatcgaaagatactcaggaaacattttctctcaggtattagtttttccatttcggttaataatctgccaaccaaaaatcaggcagaagtcatccccgtcacaacggaataaacagttcacttaataaattgggagaagttatttcattttttccctgttcttagataaacgtctttgatctactgcaatttttattaatagacgcttaattccacaactaaataaaaatggatggattgaatatattgacaggaaccttcgacaagtcattactgtatttttcacacttataattaatatcaaaaataaattatttcacttgaaatcatatagttaaaaa

SEQ ID NO: 9 - DNA, 949 bp, Xenorhabdus sp.
agatgttatagggcagaatcttacagctatccggacacaggcaaatattttctaacgtgtgggttcaccgccagtggttattaattgtgccaaagctatcgaaacattatccctggatgtttatgatactaccaaaatgttattgagcagattacggcctaaagtactcgacgattttggccttaaggaagctattgagcagttattgcgggatatggaatttgaagctcacggcatatcagtagaaattaattgggagatcgattccgatgctgttattgaacagttaagtgacgcaacgaaagctacattataccgtctttgtcaggaagcattaaataacgcattaaagtattctcaggctgattgtattaaagtgcattgttctattaaggaaatggtccgtttattgatcaaagacaatggtattggctgtaaagctgaagatcatatgaagggatttggcttacggggtatgcgtgagcgtgtacaggccctcggcggtattttttcaattcatagtgagaaacagcaaaatgaatctacacgttctggtacggatttatcgatcattttgcctaaactttaagaaatgttcatgacagttttttctcagcctaaactaattaatcaaaatcatctgactacggtagaaattagggagcaatatcgttactggcgtctgcatataatgttgagcttatatgtgggctatgggctattttatttcacccgtaaaaattttaattatgcaatgccagaattgatcagtgatctgggccttgataaagctgaaattgggttgattggtacgttattttatattacttatggctgttcaaaatttatttccggtattctctctgatcgctctaatccacgttatttcatgggtattgggcttattgctaccggtataattaatgtttttttcggtctgtccagttct

SEQ ID NO: 10 - DNA, 1388 bp, Xenorhabdus sp.
gtgccctaaagtgggttagttggcggaccaataccacaaattataccgacaggttccccgataatgatcgttccaaaagtatcatgctcagataaaattccacaggttcttatgcatctctataggcggctataaatgtatctcagaacctaagtggttcttaattactttatcttctacaacccccattcccgattcagagacagctaatttccgcagcgggatacgggcatcaaaccgcagcaaaagcaggagcacgaaatatttggacaacctgtgcctgtgaaaagctggcgaattctcgttgagcttttttcacacgagcaactaattcgttcagttcagcaacctgagtgacagccataaaaattactcctaataaaagttaaattttttcagggaattggctgtttaattattgtacttaaagtcatgtcgtgaaattcgtcatgacatacttgcataaatactgccaattaccttaaaaaactttattaattcatattgttaaaaatggtttatgtattttttctgagaatggcttttgaacacagcttatcatcggagggtttttgaatagtgatttagatcatgaaaacagcaagctgataccattcagctaatagttttttgataatggttatcaaaaaactattaggggaatattttaaatatttatttaacttttacgaaattatttgttaagtaaattttggtaatatattttatgataaaataagtgaaaaataattaacagacatccaataaagagtatggttagttaataaaattttttctattcttcactaaaaatccttctattatttatttaactgatggttttttggttgagtaatactgttttggacacatacatttcataacataaccgtctattactggatgttgttgcaatattttgtgatgaagacggtcttttaatctgtgatgattgcattttgttaaaataatgtttattttctttttttgttgggaccttagtgtgatctgattaataaaattaaatgagaaaaattatttttatcaaagtgttattgattttcctgtttgcatcttatatctaagaacaaacaattactttaatgatttaataaacatattataaaaaatagtgtaacaaattaggtgtgggttaaatattaaacacataagttatatttatttaataaaatgggttttcgggattgttagattaaaaaacgattaatttgctgtttatcatctggtgagttttttgagaaattttccatctattttgagtcagttgattttctttttttcgtttgtttatttgttttccatatcacaaaggtttggcgttttatgtttcccacttttgtttttttttgtaattaattctttttttt

SEQ ID NO: 11 - DNA, 977 bp, Xenorhabdus sp.
tattcaggatatcgtgtaacgcagcaccactggctgaagtaatcacaccaagtcgttttgcaggagagggaagtggttttttataaatctgctcaaataatccttcagcggtgagtttttgttttaaaacctcaaattgttgttgcagcaacccatcaccggcaggctggatactttccacaatcaactgataatcaccccgtggttcatacagagtgatctgtgcttttactaacacctgctgaccgttttgtggccggaatgttgcccgcaaattgtaactacgaaacattgcagcccgtatttgtgcccgctcatctttcagcgtgaaataccaatggccggacgaaggctgggaaaagttagaaatttcagcactgagccaaattttacccatttccagttctaatagctgacgaaccgtctgatttagacgactaacagaaaaaattccagtgttggttggcagtgacatgtgagctagatcaaattttaaaacaaggacttaattgactgataataactgctagctaccactaatcaagaaattttttcagaaaatgctggaggcaaccgattacggcctgtataatgccgcggctatattttatcccttattgacgccccatagcttggtgagatattgctcatgttacgaattaaaaaagaagcattaacttttgacgacgttttgttggttcctgcccattctacagttctgcctaacacggcagatttgtccacacaattaacatctactattcgcctgaacgtgcctatgctctcagcagcaatggataccgtgacagaatcttctctggctatcgcgctggcacaggaagggggaattgggtttattcacaaaaacatgcctattgaacgtcacgctgaataagtcaaccgcgtgaaaaaacatgaaagtggtgttgtcaccgatgctgttactgccacgccacaaacaacactgcgtgaagtta

SEQ ID NO: 12 - DNA, 1256 bp, Xenorhabdus sp.
gcgcatttgctcaagctgatcaagaaaatctgttaaatcaaaaccatcacctttttttattttttgatgccagtttttccgcctgactccgatcaactttgctttcgatctcttcaattaaggagagcatatcgcccatccttaaaatccgcgatgcaatgcggtcaggatggaaaggttccagggcatctgtcttttcgccaacaccaaggaatttaattggcttacccgtgatatgccggatagaaagtgctgcaccgccacgagcatcaccatcgactttagtcagtacaacccctgtcagtggtaacgcttcattaaatgctttggccgtgtttgcagcatcctgccccgtcattgcatcgacaacgaacagagtttcaataggtttgattgccgcatgaacgtctttaatttcatccatcatggcttcatcgacatgcagacgccctgctgtatcgaccaaaagcacatcatagaatttcagtttggcatgctgggtggctttattaacaatatcaaccggtttttcttgtgggtctgacggaaaaaaatcaattccaacggtttctgataacgtttcaagctgtttgatcgctgccgggcgatatacgtcagcagaaacaaccagtacttttttcttacttttttctttcagcagtttacccagttttgcaacgctggttgtcttaccggcaccctgcaaacccgccatcagaatgatggccgggggctgaacagcaagattcaattcgctgttcacctctcccatcgcctttaccagttcattttgaacaattttgacgaattcctgcccgggggttagacttttgttaacttcatgtcctaccgcgctttctttgactcttgaaatgaaatcacgcactacaggtaatgcaacatccgcttcaagtaaagccatgcgaacttcgcgcagcgtatctttaatattgtcttcagtcagccgtccacgaccgctgatattgcgcaatgtgcgcgatagtctgtcagttaaattatcaaacattgtctcagctcagatatctacaagtgggtctacctgtaaggcaaatttagtgaattataacacgatgattatgtaatctctgcaaagagattcccaagtatgattaacaacggttggaggctatcctcgcccccggtatacttaaattttaagttaactctaataatattgcgaaaacgaaaaactttatgccagtattttcaatcattgcctcacttgcttatcttta

SEQ ID NO: 13 - DNA, 1081 bp, Xenorhabdus sp.
gaaaatatggtgttgagttgcagattggtggttcgaatcagtggggcaacattacgtcaggtattgatttgactcgccgtttacatcagaaacaggtatttggtctgacagtacctttgattactaaatccgatggtactaaatttggtaaaacagaaggtggagcagtctggctggatccgaagaaaaccagtccatacaaattttatcagttctggattaacacagctgatgcagatgtgtaccgcttcctgaaattcttcactttcatggacattgaagaaattaattcgttggaagaagaagataaaaacagtggtaaagctccacgtgcgcagtatgttctggcagaagaagtcactaaactggttcatggagaagcgggtttaacggcggcgaagcgtatcacagagagtctgttctccggagcagtcgctgatttaaccgaagatgactttgcgcagttggcacaggatggtatgccagcgattgagcttgagaatggtgctgatttacagcaggcactgatcactgctgagtttgtaccttcccgtgggcaggctcgtaccatgattagttctaatgctgtttctgtcaatggtgaaaaacagtctgaagcgatgtatgtatttgcagatgaagatcgtttgttcgggcgttatactttattacgtcgtggtaaaaaacattattgcctaattgattggaaataattcataaaagtatgactaagggcaacataattgttgcccttaaagtatctgactgttttataacttatttacggttcttaaaataacaaatcaggcctaatcatgaaaaacattctttcaattcagtctcatgttgtttttggccatgcaggaaatagcgcatctgtttttccgatgtgtcgtatgggcgtgaacgtatggccattaaatacagtccaattttctaatcatactcaatatccacaatggcgtggttgtgtgatgccaccagaacatctggctgaaattgtgcagggaattggttaaattgataaattggcacccagtgatactgaaaaaagcccccatattggttataatgagcaggg

SEQ ID NO: 14 - DNA, 935 bp, Xenorhabdus sp.
agtaaaggggcaggcgggaagcggcctcgttgcaaaccattacgggagagttgatccggtggaatattcgatgtcgccactaacgcaattacgcgcctaaatagcgcttacaagactgagccccggatcatggcatccgtgatatcagaaacaaagaattcatcaaagcacagaatatcagtctgcgccttgaaaccatcagccacaatctccagaggattttcatgcccctgcaaatcagagaattctatgtgtacccgcaaaatataaccggggaaatgcaggcgtagcttcctttcagtcggtaaactctggaaaaacatatccataagccatgttttccctcgccctacaccaccccacatatacagtccctgcacgggacgaatattatcctttaatgaacgccctaatagtttattccacaaactttttaatccgcctgagccatctgaatgcgccgcatttttggctaagttctgtacaagctcatggtaaatcatatccagacgggcgacagtattacgctgcacttcatcaggttgatactgcccttcagacagtgcggtctggtaaagagacgtaggtgtaatcggtgacattaatatagtaatccttaaaaatttttatccccaccatatatacttaatagatttcaattgagtatatacattgggtctaactcacagcctatcatgacaaatttgtataaaattaacacctcgggtgatatataaattaattaaataataatcaatattccactctgactgaattagcggttatagtggtagctatgatgttaagaaaggagttgccatgacttgggaatacgcactgataggattaattgttggttttatcatcggagcattggctgtccgctttggcagccgaaaactgcgccagcaaaatgcggctcaggctgagctggc

SEQ ID NO: 15 - DNA, 1205 bp, Xenorhabdus sp.
gtgctctaaagtccccattatggattttctcaataacagagtgttttcatgctatttcagagttaatttacgttattttttgttcaaaaatagtacaaaaattgccgaaatggagtggattctatactaacatttcatcttccccactaatccttaccggaattttaaccaacatcgtttaaacaattagttaaccaataaatcaatgtttatatattttcctatttcatggcgttctacttccagcccgctcatatgggggatcacaccaagtaagtgaaccggcatcattctcttcaatgttgccagatattcagcctgacgcctgccgggtggctcaatttcattcgcaacccagcctgctaatttcagcccggaatcctgaatcgcttttgctgttaacgctgcatggttaatacagcctaatttcacacctactgttaatattacgggcagcttttcctgaatcacccaatcagcaaaagtgttattctcagatagcggtgtataccagcctccggctccctcaatgagtacccagtttgcttttgctgataattcgctcagaccttgtgacatcacagaaaactcaataggctgattgagttcagcactgacaatgtgaggagatgtaggttcaataaacgctaaccggttaacctcctgataggtaagaggtactgagctgttatgcaataacgccagagcatccccgttacgaataccttcagaagtgagttcacagcctgatgcaaccggtttataacccgcagtctgataacctttttcattagccgcctgtaataaagcacaactgacaaccgttttacccacttctgtatcagttccggtaagaaagtatttacttgtcacaataaataactccaaaaacaatttgatagcttaatgggtaatccccattatttttgggataagcttctgagagcgcattcatacgttttcttgtcatgagcccttgctgacgcccatgatgaaagggaggggctccaattccttttatagaatataataaaggcagcgcttgtggataacgctactcatattgttggggcctgacctgactccggtacggttgacatgcatttgcaatactctgtaaaggcaaagactggacaatgtgacgggaatcatcaaaatgatatcatgctgttctcatctcacatagtgaaccgagcgctgaggtg

SEQ ID NO: 16 - DNA, 1664 bp, Xenorhabdus sp.
gactggggagtccggtcgcaagattaaaactcaaaggaattgacgggggcccgttttgcggtggagcatgtggttaaattcgaagcaacgcgcagaaccttaccagctcttgacattcggggtatgggcattggagacgatgtccttcagttaggctggccccagaacaggtgctgcatggctgtcgtcagctcgtgtcgtgagatgttgggttaagtcccgcaacgagcgcaacccttatcctttgttgccagcacgtaatggtgggaactcaagggagactgccggtgataaaccggaggaaggtggggatgacgtcaagtcatcatggcccttacgagtagggctacacacgtgctacaatggcagatacaaagagaagcgacctcgcgagagcaagcggaactcataaagtctgtcgtagtccggattggagtctgcaactcgactccatgaagtcggaatcgctagtaatcgtagatcagaatgctacggtgaatacgttcccgggccttgtacacaccgcccgtcacaccatgggagtgggttgcaaaagaagtaggtagcttaaccttcgggagggcgcttaccactttgtgattcatgactggggtgaagtcgtaacaaggtaaccgtaggggaacctgcggttggatcacctccttaacctatgatggtgaaatgtgagtgttcacacagattgtctgatgaaagatacaagagacggtatcggcataggcttgtagctcaggtggttagagcgcacccctgataagggtgaggtcggtggttcaagtccactcaggcctaccaaatctttcttatgcggcgttatcaacagactcgcttatttcaataagctgcgcccgttgatgtctggcctaagcaagattgctgtgtaacgatacatcgatggggctatagctcagctgggagagcgcctgccttgcacgcaggaggtcagcggttcgatcccgcttagctccaccattctacgcctcttgaatacaacatttcagaatgtattgggtcagcccagtatattatgaaatctttgctctttaacaatctggaacaagctgaaaatttgaaacactcagtagtgtgtcacaggacaactattgaggagtctctcaataccccaatccgaagacaccttcgggttgtgaggttaagcgactaagcgtacacggtggatgcctaggcagtcagaggcgatgaagggcgtgctaatctgcgataagcgccgggaaggggatatgacccgcgagacccggcgatacccgaatggggaaacccagtgcaatccgttgcactatcctgacctgaattcatagggtcaggaggcgaaccgggggaactgaaacatctcagtaccccgaggaaaagaaatcaaccgagattcccccagtagcggcgagcgaacggggaggagcccagaaccaacatcagtgtcagcgtcaggagaacggtctggaaaggccggcagtaaagggtgatagccccgtatctgaagacgctggcagtgggagttcgacgagtagggcgggacacgtggtatcctgtctgaatatggggggaccatcctccaaggctaaatactcctgactgaccgatagtgaaccagtaccgtgagggaaaagcgaaaagaacccccgcgaggg

SEQ ID NO: 17 - DNA, 1061 bp, Xenorhabdus sp.
gtgctctaaagatatttatagaaaagatgaagaccctcaaacatataatgagaatataggcccttgggatagattttatcaatatcagatcccgttttttattgatgaacgccagtatatattgagacaggatcagagtgaaaattattggcgtattacagaaattaatgttcccgagcttatgataggagaagatacagataccagtgataatcactgaattttgttaatgtggatatataaatgatttatttttcaaacgattttcacgtttgctacatatagtctagccgcatagtaatctatgtggctttgcgaattaatactagatcggttattacagagtgaattgctagtatctttaatctgaaacgccttcaaatttctacactattctaccgatattatccgtagtgtgtccgaaagcttttgactattacagtgcaaaggacaatatccgcaaggaccagagtgtttccttttatatcaattgacggcataaaaaatcacattctctcgctagcgcactgttaatgtgacagaacccagaaatctgctctttatgagtcactctgttttctgttgcatgagtttattaaatttttcgtgcagtgattgaggggacatcggtaacgaactgtgccatctgcgctagggcgtttttctatactatagtaagccactattcatattcttttatcttgatccccatatcaatttgaagtgctgataattcaaaaatagcctaacacgtccttaaatgcactaaaatatacagatgcaaaaatgaattaattcaatgtaataccaaaggatatgggaaagcccaagctttcccgtttagcggctgttccgatgagtgaataaaatctgctcagtaaaaatcaagtgatatcctgtctccaggcttcggtagacagaggctcaccaaaatggctggatatcagtttgcgggtgatatcgtgtaacggagaaaccagcacttcaacagtattaccgcgttatacgacttccccctgatgcatcaccaacacctgatcacatgatgtgtttcaccatac

SEQ ID NO: 18 - DNA, 1333 bp, Xenorhabdus sp.
gtgtcctctaagtggttgatgtctttcgtaatgcaacagctgcttatggtattgcggaagaagcgattgccattagagcaaaagtgctttggctgcaaaaaggggtaattaatgatgaggcgaaattactggcagaaaataaggggttagatgtgattatggatcgttgcccgaaaattgagatcccacgtttaggactagaaaagtaaagaaggcgatgggttatttttatttcatcgcctttccttatcagtatcgtttaactttttaaaggaatgtgtttaatttcgtaaccttggagccagcaattgactgcggatagattcagctaactcatccagagaaggatgttccggatgatcatctgatatctcgtaagtcaattgagcctcggctaaataggtgtggacaggttgcccatcatcaccttccatcacaacgtgataccacggagctgaacgtaaagtagcattagatgcgatatcattttcctgtggttgttctaaagaatattcggcatcaatatctacaacaacacccagatagcccaacaggctatgtctcacttgttggccgataccgaatttgctggcgatcatcatagtcacctccagagaaaccttgcaatcactcttatataagggccgtaaggtaaatttcaagcgcacacccggtaaccggaatcttgcatttgagatggtatgtgatcaccatctcatatttcaggttagctgttgtgtatataaaatacaatactaaaagtggtcttagcatgccaaagttattatacctgatagttttcagtctattgcataacagaaaataaatacttttccatcaggatactgaagagccgcttttcgattttgtttgagggagaaaaagaaatgacagttcaaagcatcactatttatgtttatggccgagtatagggagttggttttcgttatcagacatactactgggcaaagaaaaataagttattggggtatgttcggaatatgaatgatggtagtgtcaaaatcgttgcctgtggtaatgaagaacaaatagcagcgctaatacattggctggagaagggaggacctccgggcgcgaaaattgaacattttcagcctcagttttgtgagatagaggaaatggctgatttcagcatccgccattgaaggcggatgacagactcagatacatttcactggttttggtaaccctgcaattttggttgcttgctttgccggccctttaggaaacaagcgataaagatagcggctattacctttttcttcgccatgcttttgtgatatcgccttgctctaaagctttagaggacact

SEQ ID NO: 19 - DNA, 1261 bp, Xenorhabdus sp.
ctaagctacttaacctaaacattgtgccattctcatcagcaacagaaagtgaatgtttcacttcatcagaatttaactccgggattgttaagattaacaccctgaaaccttgttcattgtaataatcaaccttctccatgatattgttgtgattttcttcagtgaaagaagtaatttgttcctttagcggcacattacagcaaactaatgactgctcccctactacacttttgcaaattaattgatgatcttaccgaagatcctgaacaaaaattgataattttcgaagagtgtaatgacaaggtaactcatcaatttttctgtagctgtgtagaagactatacttcatagttttttggattgcataacaatggcagcagagcaacagattcatcggaaaagaatttgttcagtcaaaggctgttttccggtgagggatttcaatctctcattaattctggggagtataaataatggtatgtttataaacagtagaagaagtgagcgttgccaataaggaaatacctaaaaagacaacggaataaaagattttagtgttacctgaatagaatacagtccactattattaataaataatagtgataatcaatattatttacatttttatttattaataacttgtattgtttaacaggtaacactctatttatggtctcaaattaatctaagcaggtaattcagaggcaattttccagctaacggaactgacacttttctctaaactcacccaacaaacaatcgattcgatctctttttgcttatccggagttgccagtatttctgcacacacttcaagccgattaggctgaattgcatcagcactacttagtgactgtagccggacatttaatccattaattgcctgtaggatcaaagtactgatcaggatttcatcgccaatatcacaaataatgtgaatttgataactctgatctaaatctaaggtctgctattgtggctgagcattgactctctgaataaaacatttcagataaaattatttttacagaagtagtcgcataaaagtattgttacaatccacacgaaacgccaatacccaccgaacaccataatgttgccgcagtatttaatccgcggatgttcattccctctttcataatcacaccagcaccagttgcgactaatgcattggttcttaaccccgccatatactgacgtcactgacgttccgccccaatcagagcaccgaaacacattgccgaaagtatttagagggcac

SEQ ID NO: 20 - DNA, 1667 bp, Xenorhabdus sp.
aaagaactcaatataaaaacaaaataacgttaacattggagatataatgctgcctgaaagccctatttattcacgtaaagaaaatatttctgttttctctatgctgaaatatatgttggaaataacgcttattttatttttcactattagaaggagcttgattttgccagttactaatcgacgcaagtttattaaaatctgtgcgcaaaccgcaggaggcgtctttgcaatggcggcgctgcccggcagtattcgttttgcaatagccgcagacaacggggttgtcaccagcgatgaatttctatggctggaggatctacagggtgagaccgcgcaacggtgggtaaagcaggaaaaccagcgcaccatcgcgcgttatactcaggggggaggctttcgtaagttagagcagcaggtactgaatatccttaataaagacactcggatcccgtgggtcaataagcatggcgattactactataacttctggcaggatcaggctaaccctcgcggcctgctccggcgcaccacgctacaagagtaccgtaaggccaaaccagcatgggaaacagtgctggatattgacgcactgggtaaggcagaaggtaaggattggctctaccacggtttacagcctctggcaccagaatatcgctactgcctgatgaagctgtcaccggacggaggagacgctgtcgaaatccgtgaatttgatctggagactaagcggttcgttgagggtggattcaatgtccccgtcgccaaaagcagagtgtcatggattgataaagacaccgtgtttatcgctactgattttggccccggttcaatgactcagtccggctatgcgcgaatcgctaaacgctggcagcgtggtacaccattgagtgcagccgaaacactgtatgaagccaagccggaagatatggcggtattcgcttatcgtgagcgcactcccggctttgagcgtgattatgtaggccgtagtctggatttttatcgtcgtgaatatttcttactgacaaaacagaatcagaaagtcaggattgatatccctgaagacgcagagattaatagccaccgtgaatggcttttgataagaccgagtaaagactgggatgtgggagggaaacgctatccgtccggtgctttgctggcagcgaacttcgacgattatttggcaggtaagcgtgagttacaggtgcttttcacgcccaatgagcagacagcgctgagtggctacagcagtacgcgtgatcaccttatcctcagcattatggataatgtcgtaaaccggcttgaagtattaacgccgcagggtaatagctggcaacggcaacctctgggcaatccgggtagtatgagcaatatttccgccaccggtattgatgaggaaaccaatgattacttcctgaccatcaataatttcctgcatccggcttcgctgtatattggcaaccttgacagcagtgaaacggagctattgaaacaggggccgaaggattttgatgctggtaactatcaggtcagccaacattttgcccgctccaaagacggaacccgtgtgccatatttccagatctcagccaaaggcctttaactgaacggcagcaatccgacgttgctgaacggttacggtggctttgaaatatcgctactgccaaact

SEQ ID NO: 21 - DNA, 1580 bp, Xenorhabdus sp.
gtgctctaaagctttagagaaaataatttagataaagttaaggaattctttaaagtcaatatgatatattcggcagactcattgctacattataatgctcagatagccagctttctagggatcattgataaccatctactcattaaagtagtaactttagcgagtaactatagatcaccaaagagaaaatctgaaagatgatgagtatatatccaataaaaaagtggtagaatagcgctactgcttttattattttggatttataactaatgaagtatctacaacaatctgaaactaaaacgtattcaggcataaaactgtttaccgaccttgtcggaaaacgtattacaccagggctacactggcattcctcgagcaatcgggcgaaatttgctttacgcagtttttttacacctgtttctacatttaaactattggacagaattgccagcacacctatttatcaggatattttaaaaaagcaaccgagtttgccctgcaaaccacatcgtccatatttgagtattaatttcaaacgaaaccagattgttcatgcaattagtgagcattataaaattttatttcaacagcttgctccgaatgttattgacaagatatttaatactgatgcttatttactggcaactattcaggggaaaaacgagtcgtttaatatatatatagactctttggataatctgaataaagaaggtgaactatctttatatatgactacagaagagaatgtcattctggcaaaatgtgcattcactttattaaaaattaatggcaagcaaacattatttatcggtgtattacaaggccctgctaaaggggataattctctggatattatccgtaatgcaacaaaagagtgtcatggtttattccctaaacgtttactgatcgaatctatttgccgttttgctgaacataccaactgtgagcagatcttagccgtcagcaacgaaactcatatctatcgcagtatccgttattggcataagaaaaaacacctgatggtggctgactataatgcgttctgggaatctctgagtggttccagaaaagataataatgactttcatctgccatcaatcattgaaagaaaaccactggatgagatccccagcaaaaaacgctcagaatatcgtcgccgttatcagttactggatgatttggagagccatattaaaagcgctctcatccattaataatcatcataaaaagcgagttttctgatacaacattcagcgaggctttgccattaaccatgtaagatgagtttttatggcaggccattcgctgagtattatactgtatatgcaagtatccctaattgagccattttttgcccgtaagtgattgcgcagtatgccatccagctttgcccccaagcgttcaattgctctgcgactctgctgattcagaaaatgagtgcgtatctccaccgcaacacaaccgagtttttcaaacgcgtactccattaacaggtattttgtttctgtattaataggcgtgcgttgcgctgatttagcataccaggtcgaaccaatttccaacctgggaagcgtgtcttt

SEQ ID NO: 22 - DNA, 1344 bp, Xenorhabdus sp.
aaaggctaattattttctgcatcccaaaaggaatcgttttatttacagcaatagaatatttgtaataacaattagttatctaatttcttaatatataaattcttaagatcaacataatcgagaggatcctttcctgtcataccaccgacagtcggacgaatcaggcgtgtggaaacccggtaatacacaggaatagttcctgaatcagcatcaagctgagcttccgccttttgataaaattctttacgtgttttctcatctttggctgtcagagcctgattgaggtagttatcaaaggcttcactgttatagaacgacgtattattactgctatctgataagtaataatttaggaaggatgaaggttcattataatcgccgcaccatgtggctcttactacgtcataatttccctgatgacgattttgcaatgaagttttccattcctgattttgtaacgtgacttttgctccaatatttttctgccacatggatgcagctgcaatagcctgctgtttgttttgttctgaagtgttatagagcaggctgaatttgagtgggttactggcatcaaaacccgcttcttttaataattctcttgcccgttgattacgttgttcctgtgtccagcttgcccactctggattaacagtaaggccaccaccaatataagtaggagtaaagccgtatgccggaatttgcccctgccccataatcttttcagtaacaatatctctgtcaaggctcagcttaatggcttcacgcactcgtttatctttaaataacggatttttgtgattaatttcgtaataaaatgtacataaaaaaggtactgttcggagttgatcgggaatatcttgtttcattttctgatagagttctggcgggatagcatcgttagtaatatccacttccccactgcgataacggttcacatcactgacacccgaaacaataggcagtaaaatgcctttttctataatggattctttattattccagtaatgcgggttgcgtgttaaaaccattcgctcattaataacccactcttttaatatataagatccgttgccaataaaattttctggcgaagtccacttaatgccaaatttttttacaacatcctgccgcacaggtttcagtggagcatggcttaacatgttaataagataaggaacagggcgacttagtgttacctgaaaacgctgctcatccagagcctttacgcccagctgttcaggcgatttcgttccttgtaaaatattatctgcatacaatatataggtatattgcaaatagctggccccactctgagctattttgcccccaaaaaaacggcgtcag

SEQ ID NO: 23 - DNA, 1804 bp, Xenorhabdus sp.
ttaatataatacgactgtaaatccgcaaaattaaatagcctggtttgaaagattcatggggtaatgcagggcaggttggtctggatattcaacttgataaaaactggatgttaaatacttcgctctggtggattaatatcgaaaccgatgtgaaatttaaagtaggtgatgaagaacacaaatataaaactcgtcttgatccctgggtatttatgtttggtattggttataaattttgattatttgatacagttaacctgtgtgtttgatatgagaaccagtggggcattatttgccccctttttttacaatgtactttctacatttttacaatatatctgcttgatcagcgcagttttatcgaattaataacagttttaacccccggaatacttcttgcaatctgaatggcttgcctgacttcttcaggtgaacgtgcaaagccactcaattgaacacgtcctttatatgtttctacattaatatcattggatttaaggttcttttcttcaaacagagctgtttttattttcgtgctgattaccgtgtcatcaatatagtttccggtgctttcggtcgttgcagttggagcacatgctgacagcatggcggtgataaccgctgcgataaggagtgtggaaatggactgtaattttttcataatggttctccgttgatgtcaggaataattttgcgaaatatgtttcctgttttctggcgttgatttttaacacattaatgtgacaaggactttttaccagggaataatgtaatagcagtgattaaacagtattgttgaatataagggaacttacaaataagctggatttatgttttgagtcatttcccccacgaattggcttatgggggaaaacggtattatcgcagggtagctgatttcattgaatgaacaaatgctctgaggttttctaacataacctgaggttggtgtaaattattctcaatgatattaaccacagcagatcccgaaatagctcctgccgctccactgttaatgacagatgtgacctgagctggctcggaaatgccaaacccctgtatggccggtgcagcacggtattctttgagcttgttgaccagatccgtcagtgggtttttcattctattctgtactccagttgttcctgctctggataacagataagtgtaaccgcgcccaaatgaagcaatctcacgcaataaattatcatctgcattgggtgggcagataaaaataggggcaacatcatgttttatggctgcggagtaaaaaggacgtgattcagatactggcacatctgcaattaacacggaatcaaccccggcatgtttacagcgagcataaaattcatcgattccactgtgaaataccagatttgcatacattaataatccgatggggatatctggatactttgcccggatctgtgccagtaattcaaaacagcgtgttggcgtaacatgagcagacagagcacgcaggttagcattctggatcgtcgggccgtctgccacagggtcggaaaatggaataccaatctccagtgcgtcagcgccgccagaaataagagcatcaatgatatctaaggataattcaggattagggtcaccgagagtaacaaaaggaacaaaagcaccctgattttggttctctaatttcttgaaaagcaattcataacgctccatcagatttcccccctggatttcaaaatatcgtgaacagtaaaaatatctttgtcgccgcgaccggataaattgacgatgagtaattgttctttatccggctcctgctggatcattttca

SEQ ID NO: 24 - DNA, 2067 bp, Xenorhabdus sp.
ctaaagttcatatgtgggtgagtattccaccaaagctaatcgttccaagctgtatgggatatttgaagggtaaaagttcgttgatgatctttgatcgacacgccacttgagaatataaatttggcacctgaacgccttgggcgggcgggttctatgtcagtacggtggggctaaatgaagcgacacttcaaaaatatatcacagagcaagaaaagtcggatttaatctcggataaattgagtagtaaagagcatgtagaccccttcaaggggtaggccaaagcagcaaagacacttagcttgaacgaagagaaagcagcgtcatttaggcgcagtcggtaacaagcccttatagggcaagagcaaaccacccgttatacgggtggttatgatttttgtattctatacgtgtatttaaaatacatatcaattctattgaccagtatcaatccttttaaatttaatttatcctaatctttagattaatcgagattaaatgtattattttttatcttgaaaataatgttgaatttaatgaaatttcttttcgataaaaaataaacgaatggaaatataaaaaataatttttttatttttaaatatacttattgcaaattccattgcaatgcacgatactgccaaagaatgctttattctaaatcttattggattttttactcggcttatggcatttgtcagcaatgtcattgttactgtgattatgaataatttactataaatatctttccgaaaggtaatatctattttgtaacgttaccaagtaaataataaagtttaagttgctatttttatatctaatgtaaaaatgtaattttagccattgtgatatattgttagagtgagaaatatctgtatattcatttttaattacaaataatcattgtttttattcaattaattgaatgtgatgttgtgagtttgtttatttttccatatgacaggttaaaaccaccgtctttagacggtgactttgactttaatgttttgacctacgcgcgtttacgaggtgcgtggttcgacgactttcagtcgtcagcaccgaagtgcgctaacccacctacttcagtaggtggtagttaagttaaaattgtaatttatatagccatgacgtgatttttcttgaaattatttctttatgacatttgtgttttgtatttttaaatttaatttataaggaaaaatccatgaatataattaagcggtttttaacgcctttcttgtttttattgatgatggtatcattttgttatgcttctgctgacattaataaactatcgtcacaagaacacgataatgtaaaaaaatttttgaaagagactcatgaaaatagtaaaggagaactccatgttattgatcttacagttcctgaaaatgaaaaagcttatctttctattttgaagttgaatggaattacaaaagaaagtcatcctgagttttttagcgatattgaagctataaaagcaaggcaaaaaagtgcctatatgagtgggagaggtatacagcttgcagaacgtgatggtaaaccttcacattatttaggtaagcctgtagttaagtatgcaaagcccgatcgcacgtatgttactggtgaggtttctcattcaattcactatccagatgacagtgttcctgtattttttcaagatatgctgatggtttatactgtggcagaggatggctctactaatgaactgatcgcttcaggctccaatcgccttgagaataaaggagtgagatttaatacaacggaagcccaaagtcacactccagaacaaccaaataacgtggatcagtctcctatacacgctaattcgatactccagtttaatttaaatggaatcccgtatggaccttttcatacatcaagcaaaagtgcagatattccaatgaaaatggagaatattgctcctgaacctaaggatccaactttaagacaagatcataaatcaacgattattatctgcttaaataaggccgatcctgaaccaaagcaggtttttcctgaagaatgtgattatggtccaatgactccaggactacctaactc

SEQ ID NO: 25 - DNA, 1400 bp, Xenorhabdus sp.
ggaaacttgtttacccgctaatctaagattttttttaggcgcgagtaatttgagaattctttcacacagaacacaagtaccaacatagcaaagataagattttttgttacaagattcattaaaatctgtgatgaagattggtgtttaaccctctaaggggttaagcattaatctactacaagtggagataaatatgaaatctgttgcagtgatattaagtggatgtggggtctatgacgggagtgaaatccatgaatcagtcctaactatgctctctttgagccgtttaggcgctgaagtgtcttttttttctccagatgagtcacaacatcatgtaattaatcatcttaatggaggggagaaacaagaaatacgtcacataatggaagaatcatcccgcataacaagaggtaatattcagccattatctgaaattaatgccgatacattggatgcacttatcgttcccggaggttttggcgcagctaaaaatttaagtaatttcgcatttaaaggatttgagtgtgaaataaataaagaattttttagtattgttcaggatatgcacaaaaaaggcaagccgatggggtttatgtgtattgctcctgtgatggtgcctaaaatattaggcgaaccgataaaagtcactataggtaatgatcctgaaacggtatcacagatagagaaaatgggcggggttcatgttgaatgcccggttgacgacattgttattgattttgaaaacaaaattgtaacaaccccagcatatatgctggctcaatccttgtctgaggctgaaatagggatcgataaattagtcagaaaaatattggaaatgattgagtaataggatgagaaatcctttttcaatattatggcgctggttgaagaaaattgtgattactatcactcttttatggtttgttacagtaatcacattttcatttctgccagtgccgttttctatggtgatgctggaaagacaggtagatgcgttaatctcaattaatttatcttatgtttctcgctctagttgggtggaccaagatcaaatctcaccttatatagcattagccgtgattgctgccgaggatcaacggtttccggaacactggggatttgatttttctgcgataaaaatggcggtggaacataataaaaaagatcagaaacggatacgtggtgcttccaccattactcagcaaaccgccaagaatttattcctgtgggaagggcgcacttgggtaaggaaaggtctggaggcgggaatggcaatggcttttgaactggtgtggtcaaagaaacgttttctcactgtctatctgaatatttggtgaatctggcaggggaatttttggtgtggaaagccacttcccgggccttttttcagtaaaccagcc

SEQ ID NO: 26 - DNA, 1472 bp, Xenorhabdus sp.
agctctatttggttatatatttataaccaaatagacatataagacatgatgtattaaaaataaaggggaatgcactatttgtacattcccctctaaaactgaccaaattgttcagccaaacagacgctatgttttcgccgaattaatcaatgcccgttctgttgccagctcagatattgttcgtatttacgcagcgcgatattgtaattactgaaagcagattcggacagcttctcactcaatttttcctgaattttttctggtgtaaactcttcttcaggataattgtctgaggtcagtaactcatccaatctgcgcagacgaaccacgtattcacgcactgtgctgtggctcatctcggtttgttcaaacagatactgtttaaatgacataatgtcgaaataatcagtctggctattgcaataaatttcactacagaagcggcacagcgctacaaatttaccctgtaactcattccatgttttgtcatcaaccaattcggtcatctcggaaattgcttctttattgataacctgaccgttaaaaacaagggaaatacggtcaagagtcttatgacaatgcaaacaatgagtctgactatgtttatagtccttaatataacggctaagaggccgtttcttttgtgttgtaacagacataagagataaagccctgtgtgtagtcttaacaaaaaacaaataagcaaaaagttacttctctggattcaaacgcgcccgcagcctttttattgcctggctgtggagctgactcacgcgagattcccccacattaagcaccgcgccaatctctttaagattcagttcttcctgatagtacagcgtcagaaccattttttccctttcaggtaacgactcaataacatcgataacccgctgacggagatcaccttccaataactgttggagaggatttgtctcatgctcttcctcaattactggctcacagctttcgccgtaaatttcgtgccattcgtcataagaaaatagctgactgttattggtttctaacagtatttgccgatattctatcagattaatctttaattctttagcaacttcctgctcactggctggacggcctaactcttgctcaagtttacggatggtttgcgtgacttcccgtgcattgcgtcgcacactgcgtggcgcccaatcacggctcctcaactcatccaacattgcacctctgatgcgctgcactgcataagtggtaaacgccgttccctgtagggaatcgtaacgctccactgcattcagcaaccctatgccaccggcctgaagcaggtcatcaagctcgacactggcaggcaacctcacctgtagcctcagtgcttcatggcgaaccagtggtacatagcgcttccagaggctatttttgtccatcacgccttcggcggtatacaaatcgctcacaacaacagacacctttggataagagactggataccatta

SEQ ID NO: 27 - DNA, 2552 bp, Xenorhabdus sp.
gtgctctaaagtgtgacagctaaaatgcgattgcagattaaagattatcgctaccatgcagggcgtatcttctaacagtctaattcccagtcactatcttctctggggactgtacctacactgggagtaggtcctaatatttattggctggaaaacaatagtaaaaatatcgatgcgattatttttggtagttacaatgattcaagtgttcaactggctcagaaattatcccattatcttgaaattctctggggttcgcgcaacgaatatgaatctatgtattacctcaatggtaaggataacaatttactactggtgacaacgcatcctattttaaaaccggaaatcagatttaaggaaagttatctgaccctgacctctgattttaagcgttctgaaatgctggctcagtcaatagcgctggatgaaagagaaagcatctcatctattaattcattgcgcggagagaatatttatttttatacctataaagccgcattcaactcaccggggcaattaaccaccgttattgccttcgatctaccaattaataacctcttaccggttgatatgtcagcggcaaattttcggctgaactcaaacaatgaatatgatcttgacaagacaagtaaagttgatgtttctttaaacggtttttggctggaattttctcagccactgaatattgtgccgtataaattgatatatcagattccactgaaagcacttgttgtagatttattactcagaaatatttggctgttactttcgatattgcttttcttattgctctcattcagtggtttattttatatccgtcggcgatatatcacgcctaatgcatcaatggatcaggaactgaaaatcaaaaattctttggaaaatgatattgtttccaatatacccattgggctgctgatttatgatttttcatcgaaccaactgattagcagtaataaaattgccgaaaaactgttgccttatcttgatttggataaggttaagataatggcagaacagcatcatggtgttattcagacttcgattgaggatgcggtttatgaagtcaaaatgtatagcagtaatctattgcctgaaacataccttttcttatttcagggtcgtgatcaggaggtaatgatcaataaacggttacaacttgctcaacgagaatatgagaaaagtgtgtacgccagacgttcaatgttgctaaatattaataatgaattaaaagagcctattcaggagctgaacgatcttgttattcaattgaaagagaagtcacaggatgaagacatccaatattcactggataggttgctgttaaaatcggaatatattaccgattgggttgaaaatatttcattactcaatgggttagagtcagatgactggaagcctactaatgagatattctctttatcctcgcaactggaaaatatattaaaaatatttcttccaacgctaaatgctaagaatctgaaggcttattatcattttaacattcctcatgagtccatattcaatggtgatgggcaagcaataagtaaaatagtttcattattattaaattatgctattacaacaaccagttatgggaaaatatcacttaatgtcagtacttccggtaaatataacagccagatacagattgaattaattgatagtggttcaggtcttagcgagaaagatctgaatagtttaaattatcctttcttacataagttagcagaagataaatattatacaaattctgggttagccttttatttgtgcaatcagttatgtaaaaagatgggaggaaatcttcaaattaacagtaaactggggctgggaacgcattatgttgttagtttaccgttgtctcaacaagatgaagatatagagataccgcaactgttggaaggggttatcgtcctagtagatatcagtaatcctgaaattaaaaaaataatccataatcatcttgataattatggagcaacatattttgaaaaaaacacagaaagtattacggaagaatacgatattattcttactgataaacagaacaaaacaaaaaagccaactatattattagtaggtaatttagtagggtttaagcaaatccaagctggtttggttcagtgtaattacaattttgttggtgatgttatcaatgcgatatcgctgctgattgaagaagatttcagcttaattgagtctgacgagagcgcctttgatctgaaatcagaatcagattttgttcaaaatgtagatagtaatatttgtaatacccttaaaagttatcatacgcagttggtaggcagtaattataagaaattatttatagagacggtaccgatggatgttactaagctgtatactgatatgggacgctatgacttaatatcactttcgcaaacggcacaccgccttaaaggtgcgtttgccatgttgcgactttaaagtgccaaaaacattatgtcaggcgttgggacgacacaaagccgccaataatgaaatagaaatcaaaaggagcatcagccgaattgatccctttgacaccttta

SEQ ID NO: 28 - DNA, 2021 bp, Xenorhabdus sp.
caagaaagaaaattgctgctggcgttgcagtagcattgggcatgatgatcggagcacaggcatttgcggcaaaggttcctgcgggtgtacagctggcagaaaaacaaacgctggtgcgcaataatggttctgaaccacaatcactggatccccataaaatagaaggcgtgccggaatcaaatattgcccgtgatttgtttgaaacactggtgattaatgatcctgatggcaacattattcccggtgttgcggaaagctgggaacacagcccggattttaaaacttggacattccatttccgtaaagatgcaaaatggtcaaatggtgatcctgtcactgcacaggattttgtttatagttggcagcgggcagtcgatccaaacacggcatccccttatgcaagttatatgcagtatgcccacattctgaatgttgatgaaattatccgtagtaagaaaaaaccggaaacccttggtgtgaaagcgttagatgactatacattccaattaaccctcagtgagcctgtgccttatttagttcgattaatggttcacacatcaacatcgcctgtccatcgtgcaaccgttgaaaaatatggagagagatggacacaaccacagaattttgttggtaacggtgcgtataaagtgaaaagctgggtgattaatgagcgccttgttttcgaacgtaacccgatgtattgggataataaaaataccgttattgatcaaaccattgttttacctatctcctctgaagtgactgatgtcaatcgttatcgcgctggcgaaatcgagatgacttataccaatttacctgtcgaattatttcaaaaattaaaaaaagagatccctgaacaattgcgttttagcccgaaattatgcacttactactatgaaataaataacgaaagaccaccatttaatgatgttcgggtacgtactgctctaaaattgggtatggatagtgagctgatgactcataaggtgaaaaatcagggagatgtaacagcttatggttatactccaccttatattgctgattttaatgatgagaaaccagattggtatactaaattaactcagcaacaacgtaatgaagaagcaaaaaaacttctggcagaagccgggtttaccaaagataatccgttaaaagttaagctactttataatacttccgatctgcataaaaaattagcgattgctgccgcctccatctggaagaagaatatcggggttgaagtttctctcgaaaatcaggaatggaaaaccttcctggactcccgtcatcaggccaattacgacgtcgctcgagctggctggtgtgccgattataacgaagcctctaccttcctgaatccgatgttatctgatagcagcaacaataccgctcattataagagcaaagagtttgatgctttaatgacgcagtcactgcaagctaagacagatgaagagcgcgccgaaatttataccaaggcgaatgcacaactggataaagattccgcggttgtacctctcttttactatacaaactcttttttattgaaaccttacgtaggtggttacaccggtaaagatccgctggataatttccataccaaaaatctttatattatcaaacattaggaatcagcaggtggtttattacttaaaccacctgtgtatcagataattaatgaccacggtttggtcagacaataggaacgggcaatgctgaaatttattttacgccgttgtttagaggcgatcccgacacttttcattcttattaccatttcgtttttcatgatgcgtcttgcgccgggcagcccatttaccggagaaagaaaactcccgcctgaagttatggcgaatatcgaagcgaaatatcacctggatggtcctatccaataaccatatttccattacctaggtccacctttggaaaggggttttggcccctccatccaaatatagggactccagtgtaaatgatttggtggccgaggcgttggccgttttctgatactttagggcaca

SEQ ID NO: 29 - DNA, 2045 bp, Xenorhabdus sp.
gtaaaatagctaaaaaagaaattgaattaaaagcattttcattaaccagagcatggtttgataataatataggacggctattaaaaatttcttctgatgaggctgcaaatgaatttggtaagcatacagttatctttatcagtactactataaactccgatcctacaggtttatattgttttaatatgttataccctggagtaattggcacccctgatatatctagatttaatagggattttaaagattttccatttaaaagaaattatttaaatagtattgctgattcaattgaaaagaacattgaaattgataggttgcctgtggaacaagtcttagaggcaatatcaaaaatcaatgataaattagtcgaaaaatatggtgaaaattactatgttgaagatccgagggagtcagctaaaaaacctagtttagagtgtaatacccgactggatacgtataaatatatattggaattagagccgcatctttcagcagaagtcattcgttatattaatgcacctgaataactctgtttttataaatgtaccatacaatggcgaggaatttattgtcagtcttaaaccaccccctaaggaggtggtgatctttccttgagtttttatataaaatagtgaggatataagaatgaaaaatatttttatccggttttatatcatctattttaataaatacgatcttcttttatgctataacctgatgttccagctgaatggtgtctgcatgtaatatcattatagtttacagatacgtattcctctggttgagcacctgcatggttaatattatgagggtatctggtagagtaatcaacaatagaagctccttgaattaggatgctataatatttttcttgcgccccattttgagctgttctgaaaaattcaaattataatgttaatttttcattatttgaaattgctatcaatatgagtggagatgatttatcaataggttttataaagtcgatagggtggtgtgttacgttttgctctcgggtaattgaactattaaattcaataacaaaaattttatcttcattacctatctggtatttgtttcctattgaatctaaggatgaacatcctgctgaaatcaatccttgcttatcacctttgagtgttaaataaattaaattagccatttaatttttccttagtatattacgatagatttatttttatcagaaatgatattttttgtctattgtttatataataatgtttacaactttaggtgttaatcacataatcatgattatcagttaatgttttatatggaatattttcgtttgttattatatatattccgaaattaaacttattaagtaccttaccatttggtgattttaatctctcagggtttaattccccgtcgcttgcgacgaataaataagaattgaacgatgcaaagcgggtgatttcatatctaaataccccgctgcttgcggcggggatgtttatttatttgttgaaagttcaatcaataacaaactatactatgaatcgtggttcttagtattgtcctgttattttttcgtagtagggttttatcaaactattcttggattcagagtctggtataaaaatactaataggggaaattatggaaagttgctcaggaaatgatgaaggatggatgtattgtcggaataataagcctataagcgttgaggaggcactggaaactaaaattttagtaataaaaaggatcacaagggcacttaaaaaacaggcggatctcaggaaagcatgtggcggtaaacaatatacgggattagatcaatctatctattatgatagatgtgggaaccttatgcctgcggatgaggtttttgaaaaaaacgtttgggttaaaggtactgaggatttatttgttaatacttatcatggcattaatagaacaagtgatacaatttctgaatataacccaagtaatatagtggttcgttctcttatggagaaaaggatttcagttaatccactaatattgaaagaaaatgccgaagcaatttatttattaac

SEQ ID NO: 30 - DNA, 1604 bp, Xenorhabdus sp.
taaagggcgatatgtcagtggtgtgggtgcttgggtgatgtttttttcagtgtgcgtcaacagtgttggtgcgctgaccgcctacatgagcggcagtggcaaactgttacagtcgctgctgggtatctcaccgacattaggtagtctgctattcttcgtaccggcagcgggagtattgtacctcggactgaaagcaattggccgcggtgaaaagtttatcagtattggcatgctggtcatgctattaacgttagtagtggcaacgttgctgaaagacactactcagatgcgctacctgctggatggtgactggctttttatggtgccgttattcaatgttgtggtgtttagtttttcggcacagtacatcgtgccggaaatggcacgtggctttgccgataagccagaacaactaccgaaggcgattattattggcatggcagtgatctttgtcctgctggcgatggtgccaatgtctgtgatcgcgcttaatggtctagacaatatctctgaggtagtgacgatatcctggggacaagcgttgggagagtgggcgttcttctctactaacctgtttgcattgtgtgcaatcttaacctcttactgggggctgggcggcagtttcctgactaatatcttcgataaattccggctgggtaatgacgaacaaccattgcgtcgtttcggcgtgctgttgttggtggctgtgccgccgttcgtactagcttacagcggactcgtatcatttgttaatgctctgtatttcgctggtgtattcagtggtgtgattctatcaatcatgccgatactgattttacgtggtgcacggaaatacggcgatcatactccatgctggcaatgcagctggattacgcatccgttgctgcaaataagcattgtgctgctgtatttggccagcgcagtgtatgccatcgcttcattgttcggttatctgccagcagggtggtaatttctcttttctcttctttatcctactaaaatacctcacaaaaaagagttagctaccagtagctaactccctatctcaaaaatatattggcaaaattattaactcagaattgtttaccttacgtttatgccatcggtgtcttgttatttagatgagaccacataaattcactgaacattgtattctggaatgccgtctgttttttatcggccgcagcgctgtgtcctcccacggtattttcataaaaatagacttgctggtaacccatcttctgcatacgggctgccattttacgtgcatgcgacggatggacccggtcatcactggttgcggtgtagaacaatacgggcgggtaggccacgtgttccttgatattgtgatacggcgaaaaggttttgatatatgcccactgatccggctggctcggatcgccgtattcagcaatccatgaggcaccagcggaaagctggctataacgctgcatgtccaacagaggaacaccacagactatgcaaccgaacagttgcggatacagcgtcagcatattgccgaccagcaaaccaccgttgctgcggccacgagctccaagatgttttgatgaggttacttttcgtgcaatcagatcttgccttta

SEQ ID NO: 31 - DNA, 1702 bp, Xenorhabdus sp.
acttgtcgcgactttatcgacttccagtgcaggacgatgatcatgaatgaacgatttaaataagttatgtgtttcattcaattcttcccggaatttctgccgtccctgttcggtattttctcccaacatggtcagagtacgtttatattcgcctgctgtatgcaattcgatatcaacatcatttttcttcagtaaccgatggatgtttggtaattgcgcgaccacaccaattgagccaatgatggcaaaaggcgcagcaataatacgatcagccacacatgccatcatataaccaccacttgctgccactttatctaccgcgattgtcagtctgatacctttgtttttaagacgagccagctgagatgcagcaagcccgtaaccatgcaccacaccacctgggctttccagacgtaccagaacttcatcatttttatcagcgacagccagaaccgcgctgatctcttcacgcagagaatcgacttcatgggcatccatactgcccttgaagtcaagcacataaaggctgcttttcggttcgctcttcaggccgctttttgcctcagcctttttctgcttggcctcacttttttgctgttttttctgctccttctgccagattttcagctctgcctcactcattcgagcctgctgcatctgacgttgtttttccttataagtttcaccaagattggtcaggcgcaattcgcctttgtgcattgtcttacgcacaccaactccaatacaaaatactaccagaacgacgactgccaggacgatagtcactacttttgccaagaacagtccgtatagagaaacatactccacagatccacctttcttcattaatgatgaacaatatatatttcattttaaccaaaaacctgaaacagtgctctaacagtttatcttgcttctgttccgtcaaatctacttcagaaaaaataattaatgtaatttatctattttcacaaaaaagaaaacagataaacttttgtcaatttgacgaaaacacgaagttttgttctgataagacgtgatgtgctacacctatctacccgccagatttaaaaactgtttatagaagagaatcagatgttagattaccaaccaaagaatgacctgctgcaacaaaaaatcattttagtcactggtgccggtgatggtattggccgtgaagctgcactaacttatgcccggcatggtgcacaagttattttgcttggacgcacaacggcaaaactggaagtggttaaacagcaaatcgaaaatgaaggcggcttacctgcggctatttatacgatggatcttttaactgtcacggagcactgaatgaccgactcatccagattagctggcacggcattacccccttttgtatggcgtttacataacgcaggtttattggtggttgtcgcgcccatcacagaacagcccgtccaactttggcatgatgtgatgcaggtgaatgtcaatgccacatttatgctgactcaggtactgatcccactactattgaaatccccccggggttctttagtatttaccagatccagtgtagggcgtgaaggcagaagtggctggggagtttactctgtttccaaattcgccgcagaaggtctgatgcaggttttagcgcaggaatatcaggaaacgtccctgcgggctaattgcattaatgcgggagcgttctttagagcac

SEQ ID NO: 32 - DNA, 3287 bp, Xenorhabdus sp.
ccatatctggtcattttcctgtagttatgtgcgtgttttcattgttcgctcagttatctacgattggggaaacctttatctgacagaatatcatcattatgatttagtgtgcgccaactttgtcgtatcactttttgaagtcggaggtctggtgggatctttggttgccggctggggttctgataagttatttggcggcaatcgaggccctatcaatttaatattttcaattggtatttttttgtcagtagctgctttatggttgatgcctgtaacagatttagtttttcaatcgttgggatttttctctatcggtttcttcgtttttggcccacagttattgattggtatggcagcagcggagtgttcacataaagattcagctggagcagcaacgggatttgtgggtctctttgcctatactggtgcggcacttggtggttatccttttgcgattattttggagaattatcactggactgggttatttattactatatctgtgtgcgctgtcatgattggcttattattgctgccttttttacaggctcaattccctcagcaaagagagcagggttaactgctcttagtttaacgctgtgatatttgccggttaagccactcttctctggtcagttcccatatttcattatcatattcccctgacacatattcttttttatcagttctgatcaccttcataccttcagataatgaaatatttcttgatttatcattgactttagctttggctactctgagtactgtccggtctaattctgtaaaccaataactcgtaaccttttcacaggcttcgcgcataaacccatgcccttgatattcgagagagagccagaaaccgcgattattatcttgtgtgttatataacccaatgacaccaatgaactcattaggcttagcttttattctgagtgaccagatataagctttttgttcttggattgcaggtatggcgacgttattgacaaaaatgtcgccaccattatcgggatatggccaggggactgctttcttatctaagtattttacaatatcccagtgaggaaacttttgttgtatgtgaatcgcatcggtatgagccaatttctttaataaaaggcgcttagtttccaaatcttcaaatggcatttttttgattaccaaccaatgttaatttattgtgaaatccataatgaattttagtcgtaaaatagtcaatatgattttatctccactatataaagcggttttataagaacataccaaaccgaaacatggtatagtgaatgcctgatttattctttactcctatcggaatgttatgtcttatcaatgtcctttatgtcattcaccattactgttttcccatcaccaatggcgttgtgaaaacaatcatcagtttgattgtgcaaaagaaggttatgtgaatttgttaccggttcagcataagcgttcaaaagagccgggtgatagtgctgagatgatgcaggcgagaagggcatttttacaggcaggttactatcaggtattacagcaaaaagttattgagctatttgattgctttttacctgaacaggctggagtgttgttggatattggctgggagaagggtattacactgctgcggtacaacaggctttgaatctgaaacgacccatcacagttcatggtttggatgtggcgaaaattgctgtccgctatggtgccaaacgttatccggatgttgatttttgtgtggcatccagtcatcggctaccgtttgcagatggttcccttgatggtattttgcggatttatgctccctgcaaagctgctgagttatttcgggtggtaaaatcaggggggattgtcctcactgtaacgcccggcccacgtcacttgtatcagctgaaagagttgatttatcaggatgtccatttacatcctgaaaataccgagcaactggaagggtacgaattagtggctgaggaaactctggcttatgaaatgcagcttgatggtgaacaggcttataatttattacagatgactccttttgcctggagagcgtctgaggatgttaaaaaccatttagtggctaagaaattgtttcattgtgaagctgatttcacgttaaaagtttaccagcatatttaatttctttagatgagttccccgcaataagagcagggaattcatttatgaataaatatcaggcatacataaataatttaagatgttcgaataatatattgaagccaatagcaatcaatacgaatccaccaataagctctgcccgtttgcctaataatggcccaatatagcgcccaattaacattcccaaagtcgccatgatcatcgtcatgattcctatagtcattgctgtgggtaatatatcaacttgtaaaaaagcaaggccaataccaattgccatcgcatccagactggttgcaatagcggtaaatattaatgttactgagctatgacggcgtggtgctgttggcttggtgacaacgtcagggtcatgtctgaaactttctctaatcatccggcagccaaggacaaataatagtgtgaatgccacccaatggtcccactccataatgtactgactggcataaattcccagagaccaaccgattaaaggcgtacaggcttcaataaggccaaagataagccctgttcgaattgcttcacgtaaatgaggacgatgaagggttgctcctttacttacggcagcagcaaaagcatccatagagagggctagtgcaagaatgagtgttgcatagaaattcattaaaacagcctcggttgggtagttccatatacatatgggaacctctaaaaactctcaatacaaaaaataagatcaattttgaactcaccaataactgaccttattgtgtatgactttttcttgcttgttcaggggaaaaaaacaaacgcatcactttttcatcacatctcgaaattaaaaagcatgaatacccgattttccgaaataaaccaaacgttgcaaatcatagcaggttgccttcatcgtcatcgcaaaattggctcgcagctggcctatcgtccgaataattttttcacccatctgagagagtgagccaaagatatgttctacgcgtgcccgagttttcgctattttcttatttcggcctttttggcagtgtgataagggcttattacgtgccgcttttctctgaatatgcacacgatagccctgctccttcagcacacgttcacgcttctggctggcataccctttatccgcataaatgtcccgacgggtatttgacccttaa

SEQ ID NO: 33 - DNA, 3021 bp, Xenorhabdus sp.
agttacggcctgccgttcttttgattatccgaggacaaactacgacatggtgcatgcggaagtttggtggcgcaatcaccgcccgcggattttgtcgttgctgacaagggatacgatagtcaggcattgagaacttatattgaagaacaaggtgcaacagcggttattccctaccgaaaaaatagccgaaattcggataaaaagtgggataaggatttatatcgttatcgtcatttagtcgaaaatgcatttgccagaatcaaacattttcgtgcaatcgccacaagatacgataaattagcgagaaattacgccagcacattagcactggcatttatcattatctggttacccatgtgggtcgagtaagtgatgaaaacaaaacgtcaacacgccttagtttctcccgctttttccaccaaattatcaaactctttatttgaataaaatgaagtgttattactttggttagtactgaatatatttaaaaaggatacaggattattataatccccaatccatcctcccctgacaacatcaaacttaccctgatgttcattatcaagcatgactttccattcttcggcttgtaatttagcaataacaccaagattctttttccacatagaagcagcagcaattgcaatttttttatgttgctctgaggtattataaaccaggttaaatttaagtgggttgttcttattaaaacctgcttcagctaataattcccgtgcttttttatttcgttgttcctgtgtccacgcagcatattcaggtaatttaaatttaaacccaccaatccccggtggcagtatggtataagcaggtaactggccctgagcaacaaccctattagcaataatatcccgatccaaagataaatttaaagcctgtctgattctggcatcattgaacggatattttttattattaaaatcataataatatgtactcagaagcggtgtaatatgaatctgccttcctattgttcgttttaatgaagcaaaatcttctaacgggatcgtagatgttatatcaagccctccggctaaataacgatttaactctgatttatttgacgttataggtagatacgtgactttattaattactgtatttttatcatcccaataatagtgatttctgactccaacaaccttttcattaacatgccactcagatagcttaaatggcccactagagacaaaatattcaggttttacccatttatcaccatattttgtcactactttttcactaatcgggtacagaatcggaaaggctaacatttgcaaaaaataaccaaccggtttctccaatttaacctcaaccgtcgcatcgtccagcgctttaacacccaattcttccgctttcttctggcctttaagaatagcttgcgcattgacaacaaaagcatcaacaagatagctaccataaggagaaactgtagctggctcaatcaatctccgccagctgaaaacaacatcatgggcagtgataggtgtgccatcagaccacataataccttttcttaaatgaaacacccacgttttgttatcttgtgtttcccagctttcagccaatttgggtttgattttattgtttttattcgtcccgactaatcattcaaaaaaatcattgataatattcagtgaaacattatcttcagctttatcaacatcaagtgatgcaggttttgctccattattacgaataacctcctgcttttcattcagttgtataccgggtggaataacggcggcataggatgaaataatactggaaaatattatagtcatagaataaattaatatttccattcttctattaataattttatttaacatgtcattttcctctattgctgcaatgtaatttttatttttccatatgacaggttaaaaccaccgtctttagacggtgactttgactttaatgttttgacctacgcgcgtttacgaggtgcgtggttcgacgactttcagtcgtcagcaccgaagtgcgctaacccacctacttcagtaggtggtagttaagtattaattagaaatattgacgtattttttaaataaggcgtacacatctattatttaataatagcatttgaaaaaaataacattttaaaaaaagccaattaatgatttccatgatgaatagcacagtaaaaaaagctgcaactgagccagatgcagcttgaattctgataagaataaccttcttattctttaatgctctataatataaagatctttagtggatacatatcccattggggtaacataaaatcccccaacgtaaggcttaaccatttttgaattgacataataatagataggaatgacaggtgaatctttagttataatatccagccctttctgctgatataatacatcattagtctcactcgcttttttaatggctgtatcataatcactattctcatataaagcagtatttttaacctgccctgacataaacatatttagaaaactcattgggctattataatcagcaatccatgcccttctaatcacctcaaatttaccctgatgcatattatccagcatcactttccattcctgattctgtaaagtaacctctacacccagattctttttccacattgaactagggcgtgttgacgttttgttttcatcacttactcgacccacatgggtaaccagataatgataaatgccagtgctaatgtgctggcgtaatttctcgctaatttatcgtatcttgtggcgattgcacgaaaatgtttgattctggcaaatgcattttcgactaaatgacgataacgatataaatccttatcccactttttatccgaatttcggctattttttcggtagggaataaccgctgttgcaccttgttcttcaatataaggtctcaatgcctgactatcgtatcccttgtcagcaacgacaaaatccgcgggcggtgattgcgccaccaaactttccgcatgcaccatgtcgtgagtttgtcccttcgataaattcaaatgaa

SEQ ID NO: 34 - DNA, 2971 bp, Xenorhabdus sp.
gacgttatgaagcaggttaaataattaaatggtttcaattcgattggctgatcttgctcagcagttgaatgcgcaattacatggtgatggcgatatcgtcatcactggtattgctcctatgtattcagcaaacagcgaacaaattacatttttatcagatagccgttataccgagaaacttgcagagtgccaggctgcggcaattgtgttgagcgaagccgatcttcctcattgtaaagttgctgccctggtggttgataacccttatctggcttatgcgcgtatggcgcaaattatggatataacgccacagccagcgcaggatatccactcgtcagcagtgatttcaccagaagcgacattgggaagaaatgttgcaatcggagcaaatactgtcatcgaatctggtgttgtacttggtgataatgtcatcattggtgctggctgttttgttggtaaaaatacccgcattggtacaggaagccgtctttgggccaatgtttcggtctaccataacgtcgaaatgggtgaacaatgtctcattcagtcaggtgctgtgataggctctgatggttttggctatgcaaatgatcgcggtaactggattaaaatcccgcagttaggcacggtcattattggtgatcgcgttgaaataggcgcctgtacgactatcgatcgtggtgctctggataacactattatcggtaatggtgttatcattgataaccagtgccagattgctcacaacgttatcattggtgataacacggcaatagcgggtggcgttattatggcaggcagcctgaaagtcggccgttattgtatgattggtggggccagtgttatcaacggacatatggaaatctgtgataaagtaactgtgactggcatgagcatggtaatgcgcccaatcaccgaacctggtgtatactcatcgggtatcccgctacaacagaacaaagtctggcgtaagacggctgctttggtaatgaatatcaacgaaatgaataagcggttgaaatctgttgaacgcaagcttgaaggtgacaacaagtaatcatacaaacattttgttggttaagtttttatttttacggcctgtcagataactccaccggggttaacgcaggccgtgtcattagtgctttttttatactgcattagttttagtgcatattttttaatactacgattggatatagacaggaagagtatttagatgagtgataatcatactctgcaaattgaagaaattttgaaattactgccacatcgctacccatttttactggtagaccgagttctggatttcgaaaaaggcaaatttctgcgagcagttaaaaatgtaacggttaatgaaccattttttcaggggcatttcccgggtaaacctattttccccggcgttctgatccttgaagcaatggctcaggcgacaggcattctggcattcaaaactgttggtacgctggagccaggagaattgtattactttgcagctattgatggcgcacgttttaagcgtccggttctgccaggtgatcaaatgattatggaagtagagtttattaaagaacgccgtggtgttgcgcgtttcagaggtgtagcgaaagtcgatggagaagtggcttgcgaagctgaaatgatgtgtgcccgccgccgtgaggcttaatgcatgattgatcagaccgctgttattcatccttcttcaattattgaagaaggagctgttattggtgccaatgttcgtattggcccattttgttatattggttcgcaagtagaaattggtgaagggactgaattgaaatcccacgttgtgatcaacgggataactaaaattggtcgagacaaccaaatttatcaatttgcctcaattggtgaggtcaatcaggatctcaaatatcagggtgaaccgactcgtgttgagattggggatcgtaaccgcattcgcgaaagtgtatctattcaccgtggtactgttcagggtggtggattaactaaagtcggcagtgataacttgctgatgattaatgctcacattgcccatgactgtattgtgggtgatcgctgcatcattgccaataatggtactttgggcgggcatgtcattttaggtgattacgtgatcatcggtggtatgacggctgttcatcagttctgccagattggctcgcatgttatggtcggcggttgttccggtgttgctcaggatatacctccctatgttattgcgcaggggaatcatgccacacctttcggtttgaatattgtaggcctgaaacgtcgtgggtttgataaagagtcgctgcacgctattcgtaatgcttataaagcactttatcgcagtggagaaacgttggaagaagccagaagcgagatcgaaactcaggccgaaaacaatccacacgtgaaattattcagtgattttctggcgaattcagcaaaatccagtcgcggcattattcgctaagtataccctatggatttcgagttgcattgaggcggcaagggagttcatccccaggagcatagataaccgtatgtttataaaaacggtgactggggtgagcgagtgcagccaacaaagaggcaatttgaaagacgacgggtatagataaaggatgttcctttgactaccatttcttctgttaaccatcagcgcccactgacaattggcttagtcgccggagaaacttccggtgatatcctgggggcggggctgatccgtgcattgaaagctaaaattcctgacgcccgctttgtgggtgtcgcaggtcctcttatgcaggccgaaggttgagaagcctggtatgagatggaagaactggcggtcatggggatcgttgaagttctggggcgtttgccgcgtttactgaaaatccgcaaagaattaacaacttgctttacagaattgaaaccggatgtttttgttggcatttgattgcaccagatttcaacatcactttat

SEQ ID NO: 35 - DNA, 3164 bp, Xenorhabdus sp.
agacatatcgcatggggaagtaaatggatggtgcattgcagccagaccaccttatccatcgccttcaaacattgggaaatcaacaacccaaagcggtttccagctggtcaggtcagtcaggttcaggtcacgacccactttcagacgcagtgcgcccatggcatcggtaacgatatttttctggtcagccccgaagaacagaatatcaccgtcttgtgcattagtacgggacaacaagccctcaaccacttctgcgggcaggaacttagcaatcgggctttgaacaccttccagaccagcggcacggttattaaccttcatccatgccaatcctttcgcgccatagatcccgacaaacttgccgtattcatctatctgtttgcggctcaactcaacgccacccggtacacgaatggttgctacacgccctttagggctatttgccggttcagcgaaaacagcaaattcaacgtgtttaaccaaatcagcaacatcaactaattacagcgggttacgcaaatccggtttgtccgaaccaaagcggcgcatagcttcaacgaatgtcatgatagggaaagtccccaaatcgacaccacgaatttccagccacagttcacggatcattttttccatgatttcgcgaacctgctcagcggtcataaatgaagtttcaacatcaatctgagtgaattctggctgacgatcagcacgcaggtcttcatcacggaaacatttgacgatttgataataacggtcaaaaccggacatcatcagcaattgcttgaacagctgtggagactgaggcagtgcataaaacttgcctttatgtacacggcttggtaccagataatcccgcgcaccttctggtgttgctttagtcagcatcggagtttccacatccagaaaaccggcatcatccataaagcgacggacaaaactagtaatttttgcccgggttttgaaacgctgagacatttccgtgcgacgcagatcaagatagcgatatttcaggcgctgttcttcactgttgttttggttgctatccagcggtaatggctctgaacggttgaagatttcaagactttcagcaaaaacttcaatttcccctgtcgccatatctgtattaatctggctgtcaggacgggcgcgcacaatcccggtaatttgaatacaaaactcattacgcagttcagaagcctgagcaaatgcgtcttttctatccggatcaaaaaatacctgaacgataccttcacgatctcgcatatcaataaaaataagaccacccaaatcacgacggcggtttacccaacctgataaagtcactttttggccttcatgggcccggctcaactgcccacaataattagtacgcatacaatatccttttactcagctcgttatgcattctgctgcggaaattttggcattgttcttttaggaagaattgtcaaaaaaggaagccattatactggaaattctatccggagataaggctataacacgcttcatgacaagacaattttcacgatcagataaaccaaatccaatttatcattaaatatgatgatttatagcgacagttttacttttgaggtttatcatcagtaagccgtttttgggttaggcaatggagttagaaatggttagctcactttatattgtattgggcgcactattgttaattaaactgtctcttgatgtgattaaattaagaacacagtatcaggttgcatatggtgatggcggtttttacgaattacaaacagcgattcgcgttcatggtaatgctgttgaatatattcctatttccttacttttgttactggtcatggagatgaatggagcaacagtctggatgctgcatatttgcggaatattgctacttgctggcaggttattgcatttctatggcctaaagcagcgtgaactccgatggcggcgaatgggtatgggggcgacctttatgtcaatgatcataatggttgttgccaacatatattatttgccctgggagccaatattttctccttattcgtaacctgcccccggattgactgattattaaagaggccaattattcatttcaattggcatctttactgcctgatcttactgctcaaaacagttctgttagattagcgcttcctgccttttcctgcattctgctagaatagccaattcttaattgtttccaaaatcaatgttgttatgtcaaatcaagatccgcacaaccaacgggacagtctgttttctgctccaatcgctaacttaggtgactggagttttgatgaacgtgttgccgaagtctttccagatatggtgaaacgttccattcctggttactcaaatatcatctccatgataggcatgctggcaagccgctttgtcacgccggacagccagatttatgatcttggttgctccctcggagcagccactttatctattcgccgcaatattaatgttgacggctgctgtattattgctgttgataactcaccggctatggtcgagcgctgccgccgtcatattgatgctttcaaggcaaaaactcccgttgaaatcatcgaacaggatattcttgataccgacattcaaaatgcttcaatggtggtactgaatttcacattgcagtttcttcagccggatgatcgccagaaaatattaaataaaatttatgccggactaaaacccgggggcgttctggttctgtctgagaagttcaattttgaagatcagaacattggcgagttactgttcagcatgcatcatgacttcaaacgggctaatggttacagtgagctggaaattagtcaaaagcgcagcatgctggaaaatgtcatgcggacagattctgttgagactcataaatcacgcctaaaacaagccggttttcagcatagcgaagtctggttccagtgtttcaatttcggttcgttattagctgttaagggagccgaataatgattgatttcgggaatttttatcaattaattgccaaaaaccacctgaatcattggttggaatgcttaccggcacaattaaaccattggcagaaagcctcattacacggccaattcagctcatggttaaagaatctggataatttgcttgaaattcaaccttctcaccttgatctgaagaatggtgttatcgcctttagg

SEQ ID NO: 36 - DNA, 3739 bp, Xenorhabdus sp.
tgtgctctaaagataatatcgttatgtgtaaatcgggttcgggcgctccatgccgacgcagtcgcggggctgaacccgattcaacataacggcgtatcaatttcaggagctgaatttgtagtgcaaaattggctcatttgcctgttaaaactgccaaaagtaaacagtgatgcattttttatagtctaaaacagggcaatacccaatatgctggattttggaataggtcacagtgttatctggttgatttagtgtataaaacagcaccatttaaatctaggcggggtaatggacagtgcatacgatcgaaaaaacgatccatttggcagattcatttgtttcttatcgtaaagactttagtgaaaatcaggaaaattcccagaatccagtaatgcttctgcatggtacaaatagcgatggaaatagtagttttggaaagataaaaactccatttaatcgtgaccgggcagttattatccctgactatgcgggctgtggtaattccagtttgccatccggtgagctgacgattgaacaccttgcagagcaagtagtcgcagttatcgatgatagtagcgatgagcctgtggatttagtggggttttctttgggtgccgttgttgctgcggttgttgccgcgactcatccacaattagtaaatcgacgggtattgactgctccgtgggcaaccaatgacgatccctattttaggttgatgttcacaacctggttaaaactggaaaacagtgatcaggctttagcaactgcctttggcttatcccatgttcttagcccggaatttatttcatcactggggcaggatactctcaatcaaatctgtgccagaccctcagaaaaagagacggataaacgcatagctctggggttatcagtaaatatcgaagattatctgacccggataaataaagatactttaattatcggattaagtcacgatacgcttatcccgccttatctggtgcgagaagttcatcggtatgtgaaaaacagccagtacagggaagtgaagagtggtcatgctgtaccgctggaaaacccaacagaatgggtgaccgttatcaacgattttttacagtatcgctagccagagccgtagtttttactctgaaagggttgacgtagaggctaaattcactggtaaatatttataaatggttgacagtgatacatcataaataatggatagttgctttcgggtatggcctttatgcagtaatctggcggcctgttgtcgatcttcttcggtgaatctgacaggtcgtccgccgatcctgccttgttcccgggccgcagccaggcctgcatttgttctttcgacgatcaactcacgttccatttctgccagtgcactcattacatggaagaaaaaacgccccatagcggtactggtatcaatactatccgtcagactttggaaatgaattccctgttcattcagttctgaaattaatgtcaccagattttttacactgcgccccagacgatccagcttccagacaaccagtgtatcgccagatttcagatgcttcaatgcacgttttaatcccggacgattggcggttcttccactgattttatcttcaaaaatcatttcacagtggatattggctaatgcatttctttgtaaatcactattctggtcacttgttgataccctgatataaccaatttttgccacggataacccttaattatgtaatgaactattcataaggaaataataccgacttttccattataaaaacctaaaatttaccaaattacgtgataaaaattcacaaaatagtgctttgtccttgattttgttatggcgaaggacagtattaaataaaatcattaacatgccgcctgactcggtgatcatactcacagtattaagttttattaacaagagttagcaattagttctcgattattttctcaaaatgctctttatttagttgaaacaattttgttgctaacttgttatttataattccgagggttgtatatggagctgatcacacaatggttaggtgcaataaacggggttgtatggggagtaccaatgttgattggtcttctgggcattggtattttcatgcaaatccgcctgtctttcctgcctatccgtaaattaggaacaggttttaaattacttttccaaaaaaacaaacaacgtggcgaagggcagatttcaccttttaatgcattaatgaccgcatttatccgcaacaatagggtacaggaaacattgcccggggtagcgaccgctattgtcatgggtgggccaaggagcactgttctggatgtggatgacggcattggtaggaatggcgactaaatattctgaagccgtgctggcagtacgttaccgtgaaacagacaaaaacggtaactatgtgggcggccccatgtactacatcaaaaatggattaggaaaaaaatgggtctggctgggaacgttatttgccttatttggcagcatggccggttttggtattggtaatacagtacaggccaactcggttgctgaagtactacacagcagctttggtattgataaagccattactgccgttgcactggttcttctggttggtgcggtactgattggtggcattaagcgtatctctgatgttgcaggtaagctggtgcctgtgatgaccgtcggttacttggcgatcggaattatcgttctggggcttaacgtgaccgctattccggaagcaatcgctttgatcattaagtctgcgtttactcctgttgcggctcagggtgggtttgccggtgcagcagtctgggctgcaatccgctttggtattgcccgtggtgtgttctctaacgaagccggtatgggaagtgcgcctatcgctcacgcagcagcaaaaactcaaaaccctatccggcagggcttaatcgccatgttgggcacttttatcgataccattatagtttgctccattaccgggctgacaattgttattaccggtggctggctgacaggagaaaccggcgcaacactaacagcaagttctttctcgtcagtgatcccgggagggcactaccttgttgcgattgctctggctatctttgctttcacaaccattttgggctggagtttctacggtgaaaaatgtatccagtacttatttggaacgaaagccattacaccttttcgtattgtctggatcattgccctgccaattggcgcgactcagtcactaagcttagtttggctattagcagacacacttaatgcgatgatggctatccctaacttaattgcgattgctctgttaagcccggtggtataccgcctgaccaaagatcatatccatgatgtgaatgcggacagcattgagattaaggcaagcagtattgaaattaaaacggcagtgaaaacagattaataattattaaataaatctataaattgaaatggctcctatgtctccatctgagtgttatcaggcctaacgcacagattgagatatgggagcatgttatttatgagaggtacacaattaatataataatgaaaattacaggaatgagatgaacgctccccactcattaaatctggagcacaatgatgaatgaagggaaagtacataaaggtgtggagcctcgcagatttccggcatcatagtgcccaatacgggatgcataaagctccctcaaactggagactccccaacatgaaatgtacaccggttggcgttgatattgcaaaaca

SEQ ID NO: 37 - DNA, 3517 bp, Xenorhabdus sp.
tttaaagactcacctcgaactatccctataatgcgactccatcacgacggggcgattagctcagttggtagagcatctcccttacaaggagggggtcatcagttcgaatctggtatcgcccaccactctcagtgataaactgaaagcggtaaggccgtagtgataaaaaatgattttatgattgggcgattagctcagttggtagagcacctcccttacaaggagggggtcatcagttcgaatctggtatcgcccaccaatcataaatcagtgatatatcgatgtcgttacagataattattcggtaatagtcatcatgcagtaatagtcagcatgaagtgggcgattagctcagttggtagagcatctcccttacaaggagggggtcatcagttcgaatctggtatcgcccaccacttcattagattgttccgcagtatcacactgatattttagatgggtcgttagctcagtcggtagagcagttgacttttaatcaattggtcgcaggttcgaatcctgcacgacccaccatctaaatatccaaatcaaaattatctaattgggtcgttagctcagtcggtagagcagttgacttttaatcaattggtcgcaggttcgaatcctgcacgacccaccatttagatataaaaatcagaattacctaattgggtcgttagctcagtcggtagagcagttgacttttaatcaattggtcgcaggttcgaatcctgcacgacccaccatttaaatcatcaattcagatataccccagatgggtcgttagctcagtcggtagagcagttgacttttaatcaattggtcgcaggttcgaatcctgcacgacccaccatctaaattctcaatccaatattcttcaaataattaataacctcagtcggtagagaagttggcttttaatcaattggtcacaggttcgagccgagcgaagcgagacaacaacgcataagcgttggcccgaagggtgaggccggattattctgtatgctctgccatcatctaaacctatcatctctgatagtactaagcttatattctactggttatatggcaaattactcgagctaaagaagctaagtgtaccagcagtagcctgagtaaattcgaaaatgataatcgtattactgccactgtttaaccacactcctgggcaatatagccgggtctgagggcctgccaacgtccaataacggccgagattgtgtccgttcactaaaacgtagccagtaccccatgaggacatatcaatatacatgtctttaggaatatcaatagtaagaattgctttagcaaaaaatggacgaggacccgtgggcttattgataccaaaaggcagtttcgccagttgtgatgccaatagcggataaagagtcatcttccagtttgtcagcatatcaccattcagaattacgttgctagaaaggccacgtccatccgttctcatttcatcaccaccataatttgctcgtccgaatggcatacagacgatctgtaatatagaatttggcggcacatcatcaattttgaatgaaattacaggagatatttttcccccttttaccgtcgttaatacatcgcttgtaacacgaaccccgttgaggaaggccaatgcaaaatcgggtggccgattgaattccacagagagatcataacctgatttaggtagctctgtttgataaacagcgatgccagccggataaataccagcactggctggttgttggctgttaagagtcaacgcgatctactcaatggtctgtggtatggggtttggaatggtcggaatgacattagatagaaaatcactgaaaacgaattggctgttcgatatcggcgagatttcgccgtcagtaatactggggataggcgtaggaattggattagaaggtactatatatgaagcattttcagcataggcagctttaataacttggaaatttgcattttgccggccattttctgatactggtgcgccatagtcataagaggttatcactggggctgatgaaattaactttccattactgccagccgtaaagccaaagttagtacctccgtgcccaacgtaaatgacaaatgaacaacctgcttttgccagcgttgcgactatatctgcaaaagtatcgatgttaattgtttgtttttcctcggtccaatgacatatccagccgggatagcattctgcaccaaaacttgcgatctgatagtattgtttagcttcattatgatgtgaaacactatctccttcagctgtcagcccgtatgccgtattggccggtagtggaatgttattatttttgaaagcgttcgcccagccttcacaaacacaaaacttctctgtatagcctaaacttacccattgtgatgccagcgcagttgggtgagcgggatcgtccggactccaagaggtatattcattttctagcgctatcagcatgattgggccacctgaggtcagcgtccgtcctttaatgatctgtttataaagagctgtattccattttagtacggctgacatgtaatttgggaaattgccgcgtatttgtaacttatctgaagagtcatggaactggggatcggctaacatacgtggtggtaatccaccaaaatcccattctgcgcaagaatatggtccgggacgtaacaatacccacatattgttagttgcacatagattgatgaagtgtgcgatatttttgtctgacgatgagaaatcaaaagacccatcaggtagctcatgaaaattccacattagatagagtgatatcgtattacaccccagagctttgatcattttgatccggtgatcccaattttgagatggaacccgtcaaggatgaattttccgccgaaaaattggaaggatttaccatttatcatccaattacctgcactatcccaagagagtacatatttattaccgggaataaatgtgggattagtatcgtttgttggattgtgtctgtccattatcctttcctattgatgtgtataaaatataaaaaatggatgtcatagcagcaatctgaaaaatacagagataatatttttatatttataagggaacctctaaaaactctcaatacaaaaaataagatcaattttgaactcaccaataactgaccttattgtgtatgactttttcttgcttgttcaggggaaaaaaacaaacgcatcactttttcatcacatctcgaaattaaaaagcatgaatacccgattttccgaaataaaccaaacgttgcaaatcatagcaggttgccttcatcgtcatcgcaaaattggctcgcagctggcctatcgtccgaataattttttcacccatctgagagagtgagccaaagatatgttctacgcgtgcccgagttttcgctattttcttatttcggcctttttggcagtgtgataagggcttattacgtgccgcttttctctgaatatgcacacgatagccctgttccctcagcacacgtcacgttatggcggtctagagcac

SEQ ID NO: 38 - DNA, 4541 bp, Xenorhabdus sp.
tgtggctctaaagctttagaagataagcatgttcccaaacatcaacagtcagaacaggcttatcttcaccagtcagcggagttgctgcattggaagtattagcgatagccaggctaccatcagttttcttgaccagccatgtccagccggagccgaagtttttcagggctgcatcagtaaattgttgtttaaactcagcaaaagagccgaaagctttgttgattgcttctgccactttgtcggtaggttcaccaccaccgtttggtgacaggctgtgccagtagaaagtgtggttccatacttgcgcagcattattgaagataccgccatcagaatttttgatgatttcttccagtgttttttcggcaaagtctgtacctttaatcaggttattcaggttcacaacataagcattgtgatgtttgccgtaatgatattccagagtttctgctgagatatgaggttctaaggcatctttagcataaggtaatgctggtaattcaaaagacattgcatactccttttaatatcgggtttttggctttataaaccatgattcgtaaagtattaatcatggatagagcaaatttaagcttattatcatgttgctattttagtgattatcttaacaacttttctgctaaataacagggaaaaagatgcgatttaatgatgagctgatgtagaactgttcagttttaatggattaaatatttatagagtatggaaatctcagcgattacaaaatgttgttcatgataaaaatttgtagcagcacgttcgctgtagaaaatcagcatcagaaagtggtattctgaatcaatcttttctgatgctgataaacagcacttgcggtttaaggaagtaaaaatgacgacaattgagaaaatcgaacgccaaattaatgaaaacccgattttgctgtacatgaaaggctcaccgaagctgccaagctgtggtttctctgctcaggctgttcaggctttatctgcttgtggtgaacgttttgcttacgtggatattttgcaaaacccggatatccgtgctgaattacctaagtatgctaactggccgacattccctcagctttgggttgatggtgagttagtctggggatgtgacatcctgatggagatgtatcaacgcggtgaactgcaagcattgattaaagagaccgcggataaataccgtgagcaagaagacagccaataatatttgataatcattattggagctaagagcctaataaaataggctcttagtttatcaggcttcgtcgtccggagtggccagaggccagccacctagtcgcttccagcgattaaccaattcgcagaaaagcagactcgtccgatctgtatcatagagagcactgtgtgcctgattactgtcaaaagggatttctgctgtaatgcaggcttttgccagaatagtctgaccaagcaccaaaccactcagtgcagccgtatcaaacgtggcaaaaggatggaatggattacgttttaaaccagagcgttcagccgctgccataacaaaattgtgatcaaaactggcattatgagcaactataatggcgcgattgcaattactccctttcatacctttacggaccatcttaaaaatggcatgcagcgcagtatattcgctgacggcaccccgtaatggattagtcgggtcaatacctgtaaatgccagcgcggcgggatcaagattggctccttcaaagggctcaatatggaaatgcagcgtatcagccggcgccagccaaccttcttcatccatttttaacgtcgttgcagctatttcaagtaaagcatctgtccgcgcattaaacccggcggtttctacatcaataacaacgggataatagccacgaaagcgcccactgagcatgttttgatcttttatattagacatctgattttattcttaacttcaggatagcggatattatgacaaaatttattaagcattgcagaagtaatatctacctagtggaaacgaagggcatgttaaagatgcccttgtatatggagacttgcatatggaaaatagttaatggcctaatgcactactggcgcttttattttcaataagttcgattttataaccgtcaggatcttcaacaaaagcgataacagttgttccgcctttcacaggcccggcttcacgaatgacatttcccccggcaagtttgatacgctcacacgttgccgcaacatcatcaacacctaaagcaatatggccgaatgctgtacccatttcgtagctttcaacatcccagttgtacgttaattcgatgaccgcactctggctttcatcagagtaacctacaaaggcgagggaatatttatactctggattttcactcgtacgaagtagacgcatgcccattactttagtataaaaatcaatcgagcgttgcatgttgccaacacggatcattgtatgaagtagacgcatgattacctcttatgtttatggttttatatcaaaatattaattttacgaaatagcaaaagatcaaaatttcgtgctctgaccccattgttttttaactatatatggtaaacataaggtaattcaatgcatcctttcacctttgttttactcgctactattttgtaatccattatttgatgtgagctggatctagatagtgttgcaattctctcagagataatcggttaggtaattttgtatacaggaggatgacatggctgagcaactagagttttttgttattcctaatccttgcaaggggatttgtgaatctggtccccgtggtttctgtcgaggttgctatcgtaatcgagaagagcgctttatgtggatgaaattatctgatgggcaaaaaagagaaatattgcggttatgccatgctagatatctgcggacactgaaaaataacgggcatgatgaagttgttccatcaaaacagcttgggttattttaattcacatttttaactgttaatgaaattttcttatatgaataatatttcatattttcattgtggttaagaacttttgccatgataaagtgatattttattcatattacctattttttatttgatataggtcatttaaaaatattacagagattggctaattaaatccttaaggtaaaggtttcttatcaaataattaattattgaacaataattgcgctaattggttatctatttgtttttaatgggttttggtatcttcttaacgctaactgtaagataaaaatgatattaatgtaaaaatatatatattaatatttggatggcgggtattcttatagacctttaaccgagcggtattgtgtctattttttggagtttgtatttgtttcgttgatatttaaaatcttaatagttaagttggaggattattttatacagtttatatcgttggtggattaatgcgcgattttattcggtgcgccgtaaaacttcgctctttagggcgacgaagatgtcaactttaagtaacaagccaacgcgatactaattaagtaattagcgaaatatctgactctactaatgtgagcaagatataggatgcgtatccattattcatatgaataaactgattggataattcattgatgttatatgagtctctaattataaggaggggtaattggaattgacattgggatcagacctggcacgtttagttcgtgtttggcgcgctttaattgatcatcgtttgaagccgttgaaattaactcagacacattgggttactctttacaatattagtttgttaccaccggagcagtcacagatacaacttgcaaaagcaattggtattgaacaaccatccctggtaagaactttagatcaattagaagaaaagaaactcattacaaggcacacatgtgctaatgataggcgcgctaaaagaatcaaattaacagaagagtcagaaaattttatcagagaagtggatagtgttattggttcgacgaggaaagacatcttggagggaattactcatgacgagttaattctacttgcttctgtaataaaaaaaatcgaaaaaaatattagccaattacataaacaggtaatataaaaattaatcgataaaaagaaaatcgcgggccatattttggtgatccgcgatttttttgtttaaatatactttaatcctattagataggggagaccgttgttgaatcgccactatcggcaattttgatacgctgccctttactgaataaaacctgatcctgtttttgcaccacaacaatatttcttccgctgtcagtacggatttccaattcgacaccttttgtctgatcgatagcaccttcaattccttgacctgccattccaccgacaatagccccagcggctgttgcaagcctctgtcctctaccgccgccaaccgaatcacctaacaagccccctaatactgctccgccaatcgctcctagcatgttttggttgccagcctgagagccttttatagtgaccggacggacagataaaatagttcagaaggtgacgttttgaatttgtttggcctgatcaattgaat

SEQ ID NO: 39 - DNA, 4481 bp, Xenorhabdus sp.
agtatacgggccccgtgatgttcagttcaagcttaatgatgatttcagtcagtctttatttatttggtaatagctcattaccgaacggtgttccagctgtaggattcgcttcagggattatgatgctcttcgggtattgcttttatgccaaaaggcatcccaacccacttatcagtcttagttaatttgaaacagggacattctcggttggtatcggcagtaatattgcgacgcgtttaagcacgggatcactttcttttcttattccgctgatgctacaggtaggtttcggttattcagctattattgccggcattatgatggcaccgaatgccattggcgctattctagccaaatcttttgtctctcggatactgtcacgattctgataccgaaataccttactctggatcacaatccttatcggtctcatgattgcccagttttcgctgcagtcaccagacgtgtcactcgtgtattagattatccctatatttatattgcgaatggatatgtctactcaatttacagcgatgaacacaatcactcttggtgacttaaacgataataatgcaagtaccgggaatagcctgctgtctgtagcccaacaattatccattagcttaggggtcacagtcagtgcggcaatcctgcggttttatgacgcggaaaattatggttctactatagataactttcactatacctttattacgataggtatgattacgctaacttctgcctttatctttctgctcttaaagaaagaggatggcatcaacttggttaagaaaaagcgacctaaaaaatgatgttatcaacgctcacgtactgaatttcgttcaataagttctggtgtcaatactaattgttttggcttactatctgggttatccattcggtaaagcagcatatcgatggctaacttacctaattcatcttttggttgatggatggttgttagtggaggtgtcagataggaagctatagaaatatcatcataaccaataacagatatatcttcaggaatagaaatccctgcttgatatagggcctgataaactccaatggccatagcatcattaccaacaaagacggcttcaggaggatcagacaattgtagtaattgcttcattgatgaaaaaccaccagaaaactcaaagttgctgtaaatttcgtaaccatcaagaatttcaatcccagcattttgcattgctttttgatatccagataaacgttgtatagccggtgttttatcctgtggaccagcaatacaagctattttacgaaatcccttattaattagataatttgtcgccagctctcctcctattagtgaattatctttaataacatcactagaggcatcaaaaggagaccagtccattgtaacaataggtacgagtggatatcgcagcaaaaaatccttagatatagattgatgctctgagcacatgatcaataaaccatcaacccgcttttgcaacaatgtttccatatttcgggttaaccgtactgaatcaccttcagtattacataggattaaactatagcctcgctcgtaacaacttctttcaactcctctgacaacctcaaaataaaatgagttatcactggttgtcactagcataccaatagttttggtctgttttattttcaaacttcttgccaatgcagaaggagcgtaatttaattcctcaatagcagcatggactctctttttcacactttcactgacataacgattatcgttaatgacatgagaaactgtcgatgtcgatacgcccgcaatacgggcaacatccttcatggtcgccacggattagccctgttcagccagaaatgcatcaatttcacttcgccatggaattgaaggctgtgcaccgcgacgagtcacggctatcgctgctgctgcatgagcaaaacgaattgcagacaaaatgtctttaccttctaacaaccctgtaaccaaagctccattaaatgtatctcctgcagcaatcgtatcaatagcttttaccggaaacccagaaatcacttttccttgtttaccttgttcgctaagccatactccgcgactacccaacgtgatgataactgtttcaatacctctatcatgcaaaaactgagctgcttttcctgcttcagtattatctgttattgcaattccggtcagatgctctgcttctgtttcattaggagtgataatatccaccaaagaaagtagcttatctgatacttcttgtgctggagcaggattcaggatcactttagttagatgttttttcgccatctccgcagccagtaggacagtattcaacggtatttcaagttgtaacaacagagcatcagcttctttgatcactacttcatgatgatggatacattcaggtgtaagtgatccattcgcacccgcattgatgccaataatattttcgccctgctgattaacaaaaatcagtgcgacaccagttgattcaccttctatcatcctaattgcagaagtattgatattatctttccccaattgttggcagatatttttaccaacatcgtcctgaccaacacaggcaataaatgtaatatcagctccacagcgaccagcagcaaccgcctgatttgctccttttccgccgaatgccacctgatactgttttccctgtacagtttctcctggctgaggaaaaaatttgaggttcaatatatgatcgacattaatactgcccatcactgctagttttgccacactcattacatttattcctgtttcataattcctgttcaatgaaaatgtagataattggaactaatcacctcaccttaataagatctattctttaataaccaattccaattcgaccggaattgtggcatcaactttgttacctttcagtacattatctgcagtctgaataccaataataccgatctgatcagggcgctgtgcaatagtagcatctaatttacctgcctcgactgcttttattccatcgtcagtcccatcaaatccaacaactaagacatcttttttccctgcggtctgtaatgcacgcagtgcacctagtgccatttcatcattttgggcaaagactgcctgtactgaaggtcgcgcagtcaacagattctgcatgacattaagcccttttgtacgatcgaaatcagcaggttggctagccagcatgtcaaattggtgttttttagctgcctgagcaaacccttctccacgctcacgccctgccgaagtaccagaaataccttctagctgaataactttcaccttactacctaatttttcggcaataaaatttcctgccatttggcctcccaagcggttatcagaagcaatatggctgataacatttcctttgttagctatacgatcaagggtaataaccggtatatttgcgttatttgccatcatgactgcattaccaacagcatctgaatctgttggattaatcaacatcaatttagtaccacgaacaattaaatcctgtacattagctagctctttggctggattatcttgtgaatctagaataatcagaatatatcccagtttatctgcttctttctttgcactatctttcatcgtgacaaagaaagggttattcaatgttgaaattaccaatgctatggagtcttttgccaaagcattagcactcatagcaacatacaaggtaaccgcagataaaacagttaccaatttcttcaatttcatgttgtttttcctgtagggtaagattatttactacttttgttatcaactaagaccgccagtaaaataacaactgctttgacgatcatttgatagttagaagaaatatttaataaattcagaccattatttaaaaaacctaaaatcagtgcaccaatcaatgtgcctataatccggcctttacctcccgccaggctggttcctcccagaaccacagcagcaatggcatccagttcataaccacttccagccataggctgagcagaagatagtcgggctacttctataatgctggccaatgctgccaataaaccacataaggaataaacaattatttttattttatcaacgttaatacctgacaaacgtgttgcagattcatttccacctaaagcataaatataacggccaaggcgagtatgatgaaggatgaaccatgcaacgatgaaaaccagcagcataatccaaactggggtcggtattcccaatggacgtccaataccaaaccaacccaataaatctgcattgtcattaaagcctgtattgattgggcttccatcggtatacacacgggttacaccacgcaataacaacatcataaccagagttgcaataaatgcctgaactttacctttcgagatgataaatccggtgcatgcaccaattgtagccccaagagttagagttcccaccacagctaacaatgcattgacatcattaccaatcattgaagcagctacagcgcctgtcagtgcttatagag

SEQ ID NO: 40 - DNA, 2689 bp, Xenorhabdus sp.
tgcatatattgcttatttcataagacaactatcctcttcactagggtatcttatcgtgagtattttttttatacattccacacctggagtcaaatgcgttgtttctagtttaaatttatcaattttgctgctagcagttcctttaaccgcgacagtgtcttatctattatattatcatgctatagaaaaattatttccaattagagccatggctttaaatataacatattctgcctgggctattattttttcccatttcatcataggtgactccgtatctatgagtttattatttatgtgtataggtgttgctatgggctcatttttaacagttgtgaatcccagcaatataaaaattaaggttaaattttaaatgaatgcaataatattggctgccgggttgggatctagattcaaagatctaacaattaataatcataaagctctccttcctataaatggaatacctaatattgaaagaactatacaatatctaaatatgtttggagtatatgaaatacatatagtaactgggcatatgtctcatttattttcttatctaaaagataaatatcaatgtaatttaattcataatttacattataaagattataataatatatattcttttagcctagccgaggagttttttaatgactctatagttgttgacgctgatgttgttttgctccgaaatatttttgtttcactggaaaagagtacttattatgttatcgaaagaccaaagagtcttgataaagaatggattccagtattagatggtcatgggataattgaaagtatgaacgtcagtaatattaatgaaccatctcttctaggtatatcttattgggatggaaaaacctgtgatatcattaaaaaagagcttcctaaatttttagataataatattttagaagacagcagattttactgggataatattcctatttctctatttggtagaataaatgtaggtatacatgtggttgaaaaagcacatgcggcagaaatggatacgattgaaaactataaatatatttgtgataaattactttagataatggtgaatgccaatattttggcgattacatttatatttaataaaacatggctgttataagatttgaattctattcatatagaatagtgaaattttttaggaagcttactaagtttgcatataatggattttcaggatgataattcagtttaaataacatagtaaattatttcaatgtaatgtttataatctttatgagggaaaagtaagtatgttttgtttaggatggaaaaaatgcaattttgagcaatacaaagaagctcattctcttttcggtggttgtgtattaacacatcccaatattgtttcttttttgaatagacatatcttagatagccacttctctttctatattaaagaaaaaaaaaattccattcatggagcctgtttttctgctaataaaacaaaattaatagaaaaaatacacggtgagtacccactatcgatagatgaagttatatttcctatcgaagcagataaaaaattattcttaccgataaaatcaaagaggctttctcctctacataagaataatgcccgtaatgccagctataaagcgccttttagcaagcgtcaaatttgcttgattaaagataatttttcttacaaaacccgccgaaatcgtaaaaatgaaataaatagatttacccgtgcaggtggagagattcgttcttcaaatgaattcagtgcggaaaaattggttgatatttacatcgatttgtatcaaaaacgctggaattatcatcattcgtcagaagaacgtcagcgtttgcttgaaatatatacggaactcagggagcatatttttgggtatgtattattcattaatggaatgccatgtgcgtacgattttgtattacgtgcggatagcccgaaatggatctcctttgatgccattaatggaggatacgatcctgaatatgcacatctcagcgttggtagtattttgatgtgggttaatgtccaggaagcaaaagcactatgtcaggcagcagataaaacgatgcgttactcactgggtaaccctactcttgagtataaaaaccgttggtgtgagacgttcccattaggaaagatccttttttagcacattctgcaagaacagcataatctctgatggtttaatactcttcatcgtattatcttttgacttcagagaatgctgttctttcccatagccgccaatcaaacccgggtctgttggtccgaacagtgtaatattcggacgatcaagtgctgcggtaagatgactcaatccggtatcaacagaaacaacagctgtcgcgccggcaataactcgtgcgacttctgctagtgtcagttttggtaatacttcaacatgggaaaaaccctctgccagccgtaatgctcgctggtgttcatgttctgctccccagggaagtttgattttcataccagtaggctgaatttctgcaataagttgccgccagtgttcttccggccagtgcttctcatcacgagtagtcgcgtgcaggaagatgagatatctattttcactttccgtttgctgatttagaaagtggcgggcaatagcgtaatcgccagcatctatcggtttttgataccccaggctgtctgcaatctattcacgaatgcctttagagc

SEQ ID NO: 41 - DNA, 3821 bp, Xenorhabdus sp.
tgtgctctaaagaccagaatataaaacagggagggttatatgtgataaagtactaaatttttatagtaccttacgagataatacttttgccttactgttaaaagatccaagtaaaattatccctattgatgatatggttcctaagaagcctacatcaagatgggatatatgtgtaacacattatatggacacattacttcaaaaagctggtggattaacaggatttaaacacataaaagctaattatacacatgaacaatatttacatgaattcagctcggaatttgtcaaaatattatttgatacgaatattacaccggaatcaattattaatcctgttgttgaatttttaaagagagttgctagtagtttgcgtgtgttgtggagaaacgatagtcaaaaattcgaattagtaatactttctcagtgtcacgaaagtatagatgtagatggaaaaatagtatattatccaaaagttaaatattatcatgttggagtaacttcagaacaaaatgagtttaaaaccgcatgctctgatacgaaaaaaattaaatttaattttacctataatagcttcacttcgggtcttgatgaatcatcattaaaacaagatagtgaacgcggtaaaaaatttgtcaattaccttaatagagctcaagatattatgtataaacaggctgataacagcctagacgaaataataaatgttaattcaaaaaagttataaagtaaaaaaagagagcataaaaccttgggcacttatgctctctctatatgaacgcatcccgtttgcaagacaaaagtgattgtggcattgaaggtagattgcagctctatgttggggtcaataaatattggacactgttttagccttttcccaccatcgttcatattcaaccggagagagccctccgttataggggtccagtggtcatttctgcaataacacccgctaagcgattttcaccctgacggaaatcacttgttttccgtcagatcctgccgctggagaaaattgaaggcataaacctgttattttttacgtgacaaacactgtcggaatgagacactgtacgacaagctcaattttaaggtttgtcgtacatgttgattggctatatgcgagtatcaagcaatgatgaacgtcagtctgttgctttgcagcgtgacgcattgattgctgccggagttgacccccgtcatttgcatcaggatcatgcatcaggcgcgcgcgatgatcgcccgggacttaaggcctgtcttgctgaggtgcgtgaaggtgacgtgctgatagtctggaagctggatcggcttgggcgctcactctcacatttgatccggattgttgaagacctgaaaattcgcggtgttgcctttcagtcattgactgaagccattgatacaacaacgtcacacggctcgttcctctttaacctttttggcactctcgctgaatatgaaagaacgcttatcacagaacgtgttaatgcaggcctggctgcagctcgtcggcgggggcgaaaaggtggaagaccaccggcgatagatgccgaaaaggttgagcagatcctcacggctctggaagccggtgccagtaaagcgtcagtgtgtcgcacattcagggtgccgcgctcgacactcatcgatacgctgcggcgaatcggctggaccggacctggatcctgcaatttgaaagcagaccagaccgatgtcctttcttgacgctaaatcgcacgataccctttttgcgctgcctgagctttatgaggaagcgctttcccggtttgcactgtcctgcgaggatgttgcattcgccagatcgcatcgtcggtctcataaccgccttggttttgctattcagctcgcacttaatccgcgacctcggtcgtacactgcgtgcaggagaggttcccacggaggcagttattgctgttgttgcggagcaactggatattgacccagcagtttttacgttttacgcccaacgcgaggagacacgtagggagcatgcccgcgaaattatctctgctctgggtcttcgttccgttcgggtcagcgattacagaatgctcattcttgcggccgcacgcgaggcagcaaccaccgaacggggactgccgatcaccagagcggtttctcgataagctaagaggacaaaccagccacttaggagcagtttcgagcactgtattatgatggcgacggtagctcgaccatcaaacggctggttagcctaccatgagcttataacgaatatggagccttgatccatcaccgcacttgagcaactgcttaccgaaagagccggtgaaaggagccttcttggctgggtagctgaagcgccggaaggtgtgaaactcaagaatctcaggggactgattgcccggctggaggtattacgggcagcgggaatctccgatgagcaacgcaagaggatccatgtaaaccgtacggtattattgcccgcgactctcgtgttttacatgcacgtgagatacaacgtctggcgtccgaacgccgccacgccacgctggcagccttcgttatcgaaaagcaggctgcaattaccgatctggctatcgatatgttctgcaaattgattggcaacacgaggcgtaaggcagagataagccagaaggagcgtcgactgaaagccgctgaagtgcttgaagtcgtggctctggatcatataaagctgggtcaggcgcttcttgctgcccgtgacggcaatacagattttgcatcagcgataactgcatcactcggctgggaaggtttgatcgccagtatggcggctgcggcttctgtagcatctccccaacgcaataccgaatttgatgagcttataggacggcacaaatcattacgtaagctggggcggctcattttcggtaccttttctttcagggcgtttcgcccggatgaaccagtgttgctggctgtcggacatctgcgggcgctctattgcggacgaaaattacccaaccgggtcccgctcgattttatgtcccgcaaatggcagcggcgtgtcagcccggtgggaaaaaatacagatcttcaggcgtgggaggtcgccgtattcgttcacctgcgggatcggctgaaaaccggtgacatatgggttgatggcagccgggcctggcgaagttttgaggattatcttctgccgcgccatgttttcgaccagatgcgggcagaatccagactcggacttgccattccggacaattttgcggaatggcgggcagagcgaaccgccacgctcaacgcaaaacttaaagcgctagcaaaagccgccgctaataatgccatacccgatgcagaactttccgacagagggctgtctgtttcaccggttcgcgaggaagacagcgacagaattacgactctcagccgtaagctttacatgctggtccctcgcatcaggatcaccagcctgctggctgaagtgcatggctggaccaattttctcgattgtttcacccactaccgcaccggagaacaggcagaagacgaagcagcgcttatggcagcgatccttgccgatgcgactaatgctggagcagaacgaatggcacagagttcacgtggtgtcaccattcaccagatgatgttaatggtggatcgtcatttacgcgctgaaacctatgcatttgcaacctcggtactggtcgatgcgcagcaggaacatccttttgccactatctggggggatggtcatgtatcatcctcggacgggcagttcttcccagcaggcggacgtggtgaagccagccttgaatacaacgccaaatacggcaagcgaccaggcgcgtcggttt

SEQ ID NO: 42 - DNA, 3493 bp, Xenorhabdus sp.
gctctaaagttatctcttttagatcagtgggatgaagcctatggttgggtataggcgtgattctacttttttcattgtatggttagatagaacttacacgctatacaatcatggataatgccaagccggtctcgtgcggttttttcatgcaggtaacattactcttacttccccaattattctattccccacacaacccccccatcaattcattcagccatccacattcgtttaacccattgatttatctattttctgtcaccatgcaggaattaagcaaaatcaatcacttatctaaataggacaattctccccttttaaccccttgattattccgtggtcctcactttggcttaatccttccgtttcaaacggaggtgtgaattagctatagggaatttttgatattgaggagtcgccgatttttttatgtacaacgctatgtgcgttttatgtttgtacatatttatgtgcattaattggtattttagtggttaattttaatttaatcttttgttttaaatggaaatatttttgttagatatcttttttgtataaagataattatttgaggataggttatctttgtgaaaaaattcgaactttaagagaaatttatttttaattggaaaaagaaaaactgcctcttttaaagacagttttttatttaattaacagatttttattttgaaataggtgatttttttatttagggaatacttgttggaaaaagataaggatatgattcagggtctcattatgaattttttcccggcttctatctccaccatctttacaaataactccgccctttggattatttttttcaataagagcgattgcattgggtttacaattcggcctaaagctaaaatgcattgcatcgtcaataacgatgtattttgatttctcttttggaaggttcttagccagatactcagattccagttcagcaggcatatctcccacatcaacaccagcggctatcacgagtgttggtatatgtaccatgcttaaactttgaggtgaatagcctctggttagtgccagatcaagggaaataatggctttaactctctggtcacccaaatcaccatctaattttgctttggtgatttcatttttacctattcctaattcagatgatatgttgcaagaagcaagaattttattagttttgcagtcagtaactaataaatctgagttgaatctagcgcctgtgagttcaacaacagaccagccacctaatgaatgaccaattgctgctattcgttctttatcaactaactcggcaaaatcagattgctctaggataaagtcaataacacggctgagatccctcggtctttcccataattgtgcagctgatagaggatttctatcttctgttgttgtgcctggatgatttggagcagccacgataaagccctttttggctaattatcctgcaagccaattaagatttcgccaatttcccccatatccgtgcgacagaacgacaagaggatgtttttctatatcaggaatagcattttttattactgaaataccataataagtgggatgttcaccaacaattatagtatgtccaatatcattggaagggtaccacatcacaaaatgtaatggacgttcagtgttcttatctaaaaatatttcccggaaacctatattttctgatgcgctgattttcacagaaaagcatagaaacaggaaaatagtagcaactatacgtttaaacattacatcctcagcagacaataaatttgaactgtcttattttgtaataaagcattactcagtagagcattccttttagtcaattatctgattgctattattttgaattaagtagggcatttaacgaggcatagcttaactttgactgctcactattctgcaacaaaccatcccgtaaaaaatgctccatactcgtcaatgtagatccataggcttgttcggcaaagaatgatccgccagaaacccttcttgctccggcagcaaaaaattcttttacactaggtcctccggcttgagccataatatttaatgggccatttatgcgggagctgatagcacggcatactgatagatcggttaatccggggataaaaataccatcggcaccggcagcaagataagtattagcacgggaaattaaatgctcgggattggtatcttctccacgaatccatgagtctatacgtgcattgataaataaactgtaatgtattttatttgctgcggtacgtacagacgcaatacgttcagcaccatcattgatagaccttgatttgccattgttggaatcttcaatattaatcccaacacatccgacaaaatataaatcttcaacaagatcatccatattttcatcaggcgctaataaaccatcttcaatatccgctgttacaggtatattggtactggaagtaattaaacccagtgccttcattacgatttttcggtcagccagttgattatctggatagcctaagctccaggatattccggcactggttgttgcaatggctttggctcctgattgttctgctaagcgggtactcataacatcccatgaattggctaatatgagttttccttcttcgtgtaattggctaaaaatttgaattttttcatccaggcttattcttgtcatgttggtttctcaatattttcttataaatatattccataattttaaatatcatggatatgcatttttgaaatgttactaaataattacactgtgtatttatatagtcaatgttttgatcgataaaaaacactcaaaattaaagctgtaatatcattattgctgttattattatttcaagtgaaagtatatctatgtgacttagatctgttccggtctgtttatctatgctattggtaatgtttagaatggatataatacctattcgtcatcttttaatttctgaagatggagaaaagccccgttatttgcaacggggaagtttatttatgattgtaaattattaaatgattttaattatcaatgagataaaatatttcatcagtgacttgagctaaagggatattgttaacatttttggaatcatataaggtaatacacatatcttttgatgccagtggggaccaattttcaggttttgtgacaccataaagtgcaacaagttttttctttagtgctgctgctaagtggcaaatgccaccatcaccaacgacgattaaagtcatttcatttaataatgataagaaagaatctaatgaattgcacataacgatttggctatttccatttatacgggaaactagatcttcagctacatttatatcatttgggaaagcagagataataaaatttgcagtagggtgtttttttaaaatttcatctgctattagtgcaatgttttcattattaattaagctgttttttctattattagaaacagaaaataaaaccaatggatttcctgaataaacaggatttgattgattgattattttt

SEQ ID NO: 43 - DNA, 2979 bp, Xenorhabdus sp.
cgcccatgctgccaggttagtcgccaactgtattgtggcgtacaacgccatgatcctaaatcgagtgtataaaaagatggtatttgaaggtgtgccggaagaaatactggaaaaatttgcgagaatatcgccgattgcctggcagcacttgttctttactggtcgttacagtttcaagaaggcgagcaaaacatccattgatgttgctgcactggctgagctgttggaacaacacttaaaacaggcattctggaagtcatgaccgcagaatcgtcacttttgggggttcttcggcggaacccgtgaaggtgggatcggcgtgccacggcgcatcaaagcatgggaaatcgtcaacaaccagacggttgaaaatatgtatctgatcaatacgcccgtttttccggcctcgcctgccgaagttcatgagctggtcattgccgcacggcaagttgaagctgaaacaggtcagccggtgcgcctgattattctggatacgttagcccgctgttttggtggcgcggatgaaaatgattcaaaagatatgggtgcgttcgttcggggctgtgacgaactgaaagccaaaacaggggcaagtattctcgtggttcaccactccggcaaagacgaaagtaaaggcgcgagaggttccagcgccctccgtgccgcgttggatgttgaatacaaaatcaaccgggaagggaaaaaaggcggctcgctggttatcacctgcaccaaaatgaaagatgccgaagagccggacaccaaagcctatgatatgcgtgtggtggaactttttaccgacaaggacggtgaagatattacgtcactggtgctgattgacaggccacgcgatccggttgaagaggaagaaatcagccatgtttccaataaaaccgataaccatacggcactgtggcagtgtatccgctcgcgcacggccctgaaagagccttgcagtattgcccttgtgcgtgatgatttaaaatcgatgggcgtgaatgtgaagaatttcagccgctggttaaccaagttagagcaggacgggatgattacccgtcacgggcaggaactcactattgttaaccagaataatgaagattaaaaagtgagtcagaaagtgaggaatggtgaggaaagggattttactgctcaccgtattcctcacttttctcgcctatatacggaaaaagtgaggagcacaaaaagcattgatctttaaggataaaaaatcaccaattcctcacctgttttcacagtgaggaaaataaaaagtgaggagcaggtgaggaaatatttttctggcaggtattttttcggctctccatgttaccgggttaatgtattagctcggtaacatggagaagacaagcgcagcgcgtcagtatcattctggataggtcaaaatgattgtgcgaataaaatgcttatttgtagtagttcagacttaatctgatgagatgggcgtcccgtatggcgtcaattgtaccaaaatgaagtaaacatattcattttatgggggcgtccatcatgtatcataaaattctcggtattgatctcgctaaatctgtttttcagctttgtttgcttaacgataatcacattgtatttaataaaaaaatgatccgaagtcgattagtggatactgtcagacaaatggaatccgggactttgattgcgatggaggcctgtagtaccgcccactattgggcacgaacgattgaaaatctcggttttaaagtttgccttattcctcctcagcatgtgaaagctttcgttaaaaaccataaaaatgatgctaatgatgcgctggcaatctgtgaaactgcaatcggtcgggtatgcattttgttccggtaaaaaatctgtatcaacaagacctcggtgttctccataatgtccggcagtcattagttcaaaaacgcattgctatctctaatcaaatcagaggactggcagcagaatacggcattatttttccgcaacgctctgcggctcttaggcagtcactgcgaacgaggcacttgaagatgccgataatggattaacgatgattgcacgcagggttctgaaataactctatgaagaatggctgaagctgatccagcagacagaaaaaatagaagaaaccctcaagtcgctatcatcacagacggctcagtggcaacaactccaatctattcccggtattggcccactgattgcctccgcaatggtcgcgtatatcggtgatggaaaacaatttaataacggcaggcaaatggccgcttggttaggacttgtttcccgacagagcagcagtggtgggaaaacacaattaggcaaaatcactaaaaatggtaatcgtcacctacgcgggattttaattcatggtgccagagccgccatacaacgtagggcgttacggcatgatgcactcggtgattggatgcagtctttggttaaccgtcgaggatttaataaggcgtgggtcgcttatgtcaataaatgtgcccggatatgttggtcaattatagttaataaagatgcgttccagatgagcaaagcctttgcttaaataaaccggtttcattttcaatagagttgactacagggaacctctaaaaactctcaatacaaaaaataagatcaattttgaactcaccaataactgaccttattgtgtatgactttttcttgcttgttcaggggaaaaaaacaaacgcatcactttttcatcacatctcgaaattaaaaagcatgaatacccgattttccgaaataaaccaaacgttgcaaatcatagcaggttgccttcatcgtcatcgcaaaattggctcgcagctggcctatcgtccgaataattttttcacccatctgagagagtgagccaaagatatgttctacgcgtgcccgagttttcgctattttcttatttcggcctttttggcagtgtgataagggcttattacgtgccgcttttctctgaatatgcactttaga

SEQ ID NO: 44 - DNA, 4006 bp, Xenorhabdus sp.
gctcgtatccatgtgctctaaagtgcccgtgttgccaatagtccaactacgcggttacaagtgagcttcgcggcaggtttgatagctggaacaacacccacaacaggaaaagaaaaacgctcacgcaaagctggaaggctgacagtactcgcggtgttgcaggcgataacgacaattgctaatggatgccttttctggatttcatcaacaactttgacaacccgctcaataatgacttctgccgttttctcgccataggggaaggcttcattatcgaatgcatatatatagtggagatccggcagcaattgtctaatctcccgatatacagataaaccacccacaccggaatcaaataccagaatggtcgggcgagcggttttctttatatcgaatgtagttaaatcagaagttgtaactgcctgtgatgaagtattctcgtcctggagtgcgatagccatacgctgtctcataatttttatcaaacagattagctattctagcatggattgtcagacggtcagtgactggataagacccattgatatcccatagactgacaccgcctaattttattctcttcgaaggggatgtattaaaatcctgatcaaaacgctgcccaatatattgataagtgattccccaatcgatattgcagatctcccagtctaactgatacttcaactgctgtttcgctctgcgagttaattgctgattattgttatcacgtggatcaacatactgtagtgttaattggtgttggaatatgccggtatccatcattcccgtccactcaacgcctttaatttttacctgtcctacgttcaaatagcggttattggaaaaatcaatcaattgatcaatatcattacgataaatggagaaacgccagctaaggtctccggttaatccttcaattccactttcccattgtttactgttttctggttttaaattcgggttagctccccagccatacaattgcccaagtgttggtgccttaaacgctgttccataggaaataacaaaacggtagccatcaatgaattcccaagccgctcctgtttgccaagtcatgttccagttatattcagaatgacggtctgagcgcaccgctccttcaaaaataaaatcatctactttctgctgacccgttaaatacacgcctgtgttatcaacacttttttgtacaggaatatagttggaaccagcggctacagattctcttttccagtctacccctccactaatcgcaccatggcctatctgccaactgttgccccactgaacattgtattgcttcgagtcacttagcgttgtgtttcccttatagatcttatgcttaaaattgtaatctttaacatggctataactggtaataagctgagatgagtagatatcccgattaaaaagaattcctgtttcgtaactacggctaaataactttcgagtatccgtaaaggatccctcatagattgagcgattatcgtagccatatgtccgggcaaatccgctgagttggtcattaaatttatgatcaatgcccagccatagcattttactcataaatccgtctcgatccggctcgttggtccctctacccgccaccacatcaaatcctttggtataggtatagctcgctgcggcactcagtgcggtatcttcacccaatttctgctgagttgaaccattgtaattctggtatccatgcgaaccgacccctgcattgagtgtcgtcccttgctgctctcgcgttgtgatgatattgagtactcctccaatcgcatctgagccatatacagcagaacgtgtaccgcgaatatattcaattttttgcactaaactaagcgggatctggctaaggtcagaagagcctgtaatgcctgcttgatttaaccgaatgccatcgaccaaaatcaaaacatggcgtgaatctgaaccgcgtataaataaagaagaactctgccctattccaccatattgagaaatatcaactcccggtaaacggcgcagtacatcaaccaagctatttgactgccaactgtctatttcgtcacgggtcactatcgttactggtgccagaacagaagaaacgggctgtttaaagcggttggctgtcaccaccagcgagtcctgattatctgcggcggagaaattgctccagccagaaaacaccaccatgaaagtggcggatataaaagtgtgttttttatttatcatgggagagaatggcgtcttactattaaagagccatgctacgatgaaggctgaatagagtccagaataccttcctatcaaaaaagccgggtaatgaaccagaaaactggacatcctttgtactttccctacaatgccgctcggaaatttttcttaatgtgatcatacgagaaccagataatgcagaatctcttgccaacggaagattatgaaaaccaattgatggagaaagtccatcgtctgaaagaaatgatggtttcctttagtgcgcccgagcctgaagttttccgttcccccgcatctcactacaggatgcgtgcagaattccgtatctggcatgaggaagatgacctctaccacattatgtttgatcaacaaactaagcagcgtatccggattgatcagtttcccgtagcctgccaactcattaatagcatgatgcaggccattattgccggcgtaaaaaataattcagtattgcgccacaaactgtttcaggctgattatctcgccactcgcagcaacaaaatcattgtttccctcctttaccataaaaaactgggggatgaatggcgtgaacaagcaactgcattgcgggctcagctaaaagcggaaggctttgatgttcagcttattggtcgtgcgtcaaaaaccaaaattatgcttgatcatgactatatagatgaagagctacctgttgccggtaagacaatgacttaccggcaggttgaaaacagctttacccagccaaacgccagtatcaatatccatatgctggagtgggcgattaacagcaccaaagacgccaaaggcgacctacttgaactgtattgtggtaatggtaacttttctctggcattggctcagaactttgtgcgtgtgctggcgacagaaattgctaaaccttccgttgctgctgctcagtttaatattgaagccaatcagattgataacgtacagattatccgtatgtccgcagaagaattcactcaggcaatgaatggagagcgggaattcaaccgtcttcagggaattgacctgaagagttatcagtgtgaaaccatttttgtcgatccaccgcgtagtggtttagatgaggaaacggtgaaaatggtacagggatacccacgcattctgtacatttcctgtaacccggaaacgctctgccagaatctggaaacattgtcgcaaacccacaaagtcagcaagctggctctttttgatcagttcccttatacccaccatatggagtgtggggtattactggaaaaaatcgattaactctattgttattactaacccgtttttatcttacaaacgccataactgattattatggcgttttcataacatgtttctcaaacagtcatcagttatgtttttctgacagagttgcctgttgtctgcgcccttttatcttcctgtaaagccagaagactaatgccgttccaaccacaacagacaggaagttagagccaattccggatggttaacccgaataattgcgttataggcaaaaaggcgtaagaagaaacaaccaaatgccagttttggtaatccctcagccataggataatttaaataacgctgatggaaacaatacaaagatagtgcaagtgtgataatcgggaaaattgaaaaaggtaccgccgaattaaaaaatgctgaaaaagtgccgtgagttgccaatccaacgataagagccagcagcattgtgcttttatcctggcgatattgttccatcggtgttgttctaccgttccagtccgtgttcagaggggttttgagg

SEQ ID NO: 45 - DNA, 3659 bp, Xenorhabdus sp.
ctaaagcaagaggcagcgaagggcataattcggggcacttaccgttcgattaaaggaatgcccttaataatgaaattaaacgcccggcaaatcgaaactgcaaagcccaaagaaaaaacctacaaactcgccgatggcgggggcctttatttagaagtctcgtcacgcggttcaaagtactggcgcatgaagtattaccgcccgaccgataagaaagaagatcgtctggcatttggtgtttatccggcagtatcgttagccgatgcccgcgctaaacgggatgaagccaaaaaactgatggcgcagggcatcgatcccaaagccgaaaagaaaggcatcccctcacccgccaaagtgaactcgtttgaagacgtcgcccgtgcatggcacgccagtaacaaacgctggagtgacagacatagccaaacagtgctgcgcagccttgagcagtatattttcccgcctatcggcgcacatgatattaccacattacgcaccagccagcttttagcccccgtcaagaccattgatgatgcgggtaagcacaacattgcccaacgattgcaacaacgtgtcacggctatcatgcgttatgctgtccagaatgatatcctcgaatccagccctgccagtgatatggctggcgcactttccaccgtaaaatcacgccatcaccctgccctgcctcatgaagatttaccggatttcctgaaccgattgtctgtttatcgcgggcgcctgctgaccaaaatcgcggtagaactggcactgctgacgtttgtccgttccagtgaactgcggattgcccgctggcaggaaatcgaccttgaaaacgccgtgtggaaaattcctgccacaaggcaacccattaaaggcgttcgcttttctgagcgtggcatgaaaatgaaaaccgatcacattgtcccgttgagacgttaggctgtcccgcttatcaacgcgttacaggcactgagtggcaactgcgaagtcatgttccccagcgatcataattccgcgaaagtcatgagcgaaaacaccgttaacaaggcattacgggcgatgggctacgacacccaaaccgaagtctgcggacatggcttccgcacaatggcgcgtggtgcaatgggtgaatccggcctctggaacgatgacgccatcgagcgccagttaagccatatcgaacgcaacaacgttagagccgcgtatattcacacctccaaacatctggacgaacggcggctgatggtgcagtggtgggcagattatctggatgcaaaccgggaaaaatccatcacgccgtatgacttcgctaaaccactgcgcgacagaaaaaatcgataatgcaacctaaaaattaattttcatcgggagaaaaacaattaacgctgttcatttagtttggctttttaaataatccgcctgtcatcaaataacgtccacgatgagcgctcaaggactcggtaacaggagaattaaatatgacagtgacaacattgaaaatcagtctgaaccgtttgccggaagtacaacgcagaacgggttacagcaaagcgtggatttacaaactgattagcgatggcgaattcccgaagcaggtcaaaatcggcccacgctcagtcgcctttatcgaagcagaaattgataactggatcgcacaacgtatcgcagaatcgcgggcggcataacacaaaaaagactatgacataagaaacagaatataaaacacaacgccccagtgtggtcggacacatctgaggcgtttaaccaaaaccgtttaagtgaggtaaaaacgatggctgatacacagcatacccaaactcgccctgaatttacagccccaaaaaaatcaagcaatcaaaaaccgcttgatcttatccaaaccgtcaaaacttcggctatgtactcatggcaaaacctgctaccagcttgtggtatcactgttccggcaaaaggtaaacatggtgcctgtccggtttgtggcggcactgaccgctttcactttatcgacgatcatcatcacggcaactggcactgccgccagtgtgatgccccgaactatggcgatggactggatttagtggcaagaaccaatcggctcacgattattgaagcagccaaagttgtcgcggatgcactggcattgcctttgcctgaacccaagcccgccagagaaatcacttatccaacaccaccgattgtcgaaagcgtcgcggcactgatggcacagactatcaccggaaaatcaccctatttgaccgcaaaagggctgctctgccctaatcagcggttgttgcctgataattcggttttattgcctctgacaacactggataaaaaaatcaccggggcgcagattatcaaacccaatggcgagaaaaaattactgtcagtcagccagaagaaaggcgcgtttattgccgtttcagcgctggaagtgtcccccgacacagttatcattgccgaaggttacgccacagccctgactgttaaccagttatatcaaggcagcgttctggcggcactggatgccggcaatttattttctgttgccaacgctgttcgggaacgctggccggacgtaaaaatcattattgccgcagataatgactggcatagccccggcgaactggacaagcacggcaaacccaaagtgaataccggcaagatctcagcagagaaagcagcgctgacggtgaatggctgggttacgttaccaccgacagaacataaagccgactgggacgattatcgccagcaacacggcattgaggcagcccgacaggcattcagtcaggtgttatatccggtgagggaaccgataagtagcgatgcaatagaaacccgtcgttatgacaatgttgaaagcctctatccaaatcgtaaaacaaaattacccctgtcaatcggctctgagggctttgatgctcagttagactacgtggttaagggcattattccggcgcattccctgtgcagcatttacggggcgagcggttcatataaaagttttctggcgggggcatggggttgtcatattgctacaggtaaggcatgggctggaaaatcggttgctcagggggctgtactgtacgtggtcggtgaagcgggttccgccgaagaacccccaaaagtgacgattctgagtaccgttacaccgtagcgaggattttatagactgtagcacgcgctatttttaattgtcccgatatgtttgttgctccgataccttgttcatgaagatggcgaacttgagctttgtctattgtgggtttacggccaaatttaacccctttagctttagcctccagacggccttcgtttgttcgctccagtattcgttggcgttctgcctgagcaaccgcagataaaatggtgaccaccatcttgcccattgtcccttctgtgctgatcccatcatccagaaaacgtatggcgactcccctctcatcaaattctttgatcagctgaatcatatcggcagtatcacgaccaagccgatccagctttttcaccagaataacatccccttcttcaatctttagccgaagcatttggagaccttctcgatccaggctactgccggtcaccttatccgtaaatatacggtctgctctgaccccttccgctttaagtgccttcacctgcacttctagtgattg

SEQ ID NO: 46 - DNA, 2159 bp, Xenorhabdus sp.
taagctgcggatgcgggaactgattggggattatcaggcgggatgatgataaaaagccggaatatcacgaaaatatttccggctttttaaatataaatttaaagaattatatttaggctaagactctaattttaaaaagataaaatactctatattaataaaataatcttaacgttaaactttattcatcttctcctatagcaaattcaatagcatgttttacacgatagaattctttattacactctgtaaactcagggcagttgagtacttcattcaatttatcttctcctaaaatttctttaatatcagaaaacataaatgctaaatcagccacgtgatcatcacaagaatctatcaagtcagctgataaataatgattttttaaataagaaattgctctttccggagcagagtttaataaaatctcaaacgcttttaaatgatatactttcaacttaagtaaatcttctaaattattcagaaaaacatcatccaattcaaaaatttccgaatctggcagttgactgatacttttttttaatgcactgtggctttttataaaactgtccaatacagcagggaaattattttgcattttctcattctcctatgttcaagaataccttcaacttcaacgttatctttaatttaccagtccatattcaaaaatatgggcagtgcccttcatactatcatcactgaatagggaatgattaactaattttaatttaattcccaaaggatatttttatttcaggattctgctctttaatctgttagcatccaactttatgattatagctcaagcatttaaccacaatatttttatatttaaaataaaaattcacacaaacaagatagcgagataaaggaagaaaaaaaatcgtggtttgctgtatcctagatatggctgtcacacagcagaaaattaatccacaactacgccaataaaataaatcatcggcaattttatttgaccgatgatttattaaattaagtactaacaaaaaactgaataagatttttcagttttattcattactactttttatatactatcgatatatactctggcttttcctctggtatatttcgatacaatctcttctcatcatctcgccaccaatattctttatattcttccggctgtttatattcatatatcgctataacacctagcaatccacaaggcgtattcccaataaaatcccaaccattcttctctgcacaataagcctgtaattctttatcataccaaactctatatccttttttatcaagaatattaagcgctgtattataaacatttgtatattccgatagtgctggcataactcccccttctatttttttaaaatcttaattgcttcgaaaggtatttcacctttaaacaagacttcctcggctatctttgcattctttctagcttcgagacttcccgctctcatcactgcctgcattacattattatgatctatatagctagcacctaatttaactgccttttttacatctattgcaattagtccattcccactagtatatctttctgctgcacgagcggataatgcggctgatatatggccagtattgataccttctacatgggcagcaatcgaaccacctacacctttaggaaccaaacttaacccttgttcgagtctaagcgcgtcgtcaggtgtaagttcccgataaacctcctgacattttttggagcttagtcctagaggatcgatccaagacgttgggttattaacatacgaataatgattgaacccaccaactaacccaatgggatcaggcgtcaggtaacaactggccaccggcgaataataccggaaccgattgtagaccagcccgctctcttcatcccgccactggccggcaaagggccatcagctctgaggcagtcatacccgtagagcagcgtcagcccgcgcagggcaaggctttcagcaggacacgtttcacccattttaccccgatcacttttttgaccccgacgtacagtttgggattgtttttcacttctggcaacgggcgaacgctgcccggcttgccgggcggcgggcgcacgttctgcgggagcgggcggcatagagcccgcaagcggcgccctgcgacgctctggggcattgaggctcagaatttggctc

SEQ ID NO: 47 - DNA, 4687 bp, Xenorhabdus sp.
aaatacaatttcatccccaggatatagtttcccaatacgatgaataatgttgatccgttgtaagggccagctttggcgagcttcatcaacaattttatgcagcatgttttctgtcatgcccggataatgttccatagtcagtgcctgaacattatcacctaaattgtgattacgaactttccccgtaaaagtcacaatcgcaccatcttcatcagattgtgccagccattggtattcctctccgacattaaataccgctttctggatactgattcgtgtcttttccatcgttagcctccggtgaccggcgggaaaaatgccacttcatcaccatcattcagtgggtgttcggcgtgaacaaacgattggttcacggccgccagcaatttcccatcctccaatgccagcgcccagcgttcacctttttcaagtagcgacctgcgaaggtgcgctaccgtcggataatcattcggtaattcaagagaatcagtgcctaccaattcccgtacctgcgcgaaaaacagaacttttatcattttttcaccttaaaatttcccgatttcccaccacttttttccagcaaacgaaccggcccgataaccatatctttttgtactgccttacacatatcataaatggtcaaagctgccacggaagccgcggtcagtgcttccatttctaccccggtcttccctgtcaggcggcagcaggattcaattctgacccggctgtgttctgtttgtgcttctaattgaacttctactttgctaagtaacagcgggtgacacagtggaattaattcccatgtccgttttgctgcctgaatgccggcaatacgcgcggttgcaaaaacatcccctttgtgatggtcaccggaaacaatcatagccagtgtttcagcctgcatttcgacaaaggcttcagctctggcttcgcgtaccgtttctgttttggcagaaatatctaccatatgggcttcgccggatgtattgatatgagtcagttgggacattctcgctcctgaaaaatgaattgagccgttaaattaaccaccaatgaaagaaagattaggggtgataccactatctccctgatgcaaaaagtgagtttcacgcttatgcctcaacccaccttgtatgcgtaatttcaaatcgttaagagatccgtcatcagacagcaaatcacgtaatggaattccctgctcaccaaacaggcataaatgaagattaccaatggcagagacacgcaggcgattacagctttggcagaaattcttctcatagggcatgatcaggccaatttcgccctgataatccgcgtgcctgaaaacctgagccgggccgtcactccgtccacgttgttgcagttgccagtcctgctggagtaaacggctgcgtattacatcaccggaaagatgatggtgccggaagtgctcacttacctctcccgattccattagttcaatcaaacgcaattgaatctgacggacttttatccagtcaaggaactgctggcatgcaagtttcattgatatttgtcattaataccgcatttactttgactgtgctaaaacctgtttcaaaggctgcatcaatgccacgcataatctgaaagaatttatcctgcccggtaatagcgtgaaactggcgagggtcaagactatccacacttacattaatcgctgtaagccccgcttctttccagcgggtcacatcgcgctccatccggtaaccattcgtcgtaaccgcaatttttttaatctgcggattttcatgcactgctgcgattatgtcgcaaaaatcacggcgcatagtgggttcgccaccagtcagacgaattttttcggtgcctaattctgcaaaagcgcggctaacacggtggatctccggcaaagtaagaaatgatttgttgagttgattgctgccaggctggtagccgttgggcaaacagtatgtgcaacgaaagttgcatacatcagtaaccgataacctcaagtaataaaacttgcgggaaaatgtatcgataagttgttccactataacaccttccaatcatgggggatgcgagcatttctgcctcgcaccctggtgactcaggagccacggccaaagcatcatatcgatgtggtattaatttgatagaacaatttacggtagaatcaattaataaaaaatttatacaacaaagacttagacgcagaggctaggggttaatttcaaatttaatcatcatataaatcgtgacatacgtgattaaaccttgccgtgggattctaccccttaaattagaaaaaagctaacgacaatctcgatatatattttattatacaaagggttacaaaaaaccatcaacatcagcctattgttacctattcattctgtttatatcctgaaataattgataaaaatcgcataaaatcatggtgattgctaaaagcatcatactttatggtagattatataaaatttactcaagcacatttaattcagtagcaggaatcctatgcgaaaccgaacattagccgatttggatcgtgtggttgcccttggcggtggtcacggacttgggcgcgttatgtcatctctctcctcccttggtgcccgcctgactggtattgtcacaacaacagataatggaggctcaaccgggagaatcaggcgctcagaaggcggtatcgcctggggtgatacccgaaactgccttaaccagctgatcacggagccgactgttgcttcagctatgttcgaataccggtttggcggtagtggagaattagccggacataatctgggcaacttaatgttgaaggctttagatcatttaagcgtccgccctcttgaggcaattaatctgctcagaaatctgctgaaagtaaatgcgcatttgatccctatgtccgaacaagccgttgacctaatggcagtggatgctcagggatatgaagtgcatggagaagtgaatatcgaccagctggattgtgttccaaaaaagttaatgctttatccccatgtcagcgccaccaaagaagctctggaagcggttgaacaggctgatttgatcttgataggcccgggcagtttttttaccagcttaatgccattattgttactggaggatttgacccagtccctgcggcgcagcaatgccaatatgatttatatcggtaatttagggaaagaactcagccatgcggcggccgatctttcattgaaagacaaacttgagatgatagaaaatacaatcgggcgcaaaatgatcaacgcaatcattgttggcccacgtactgatatcagccagttagatgaccgaattgttacacaacaggtcttagaagcacaggatgttccttatcgccatgatcgtgaattattacgacaagccatagaagatacgctgcaaaaactgggctaataataccgttgatggagagtgttttgtttcactctccattctgattagtcattaactaacggcgagcaataatctcaggaattagcgataaactgtgctctcaatgcctgaacctgatcgcgcatgttagctgcctgctcaaattcaagatcccgcgcatattgatacattttttcttccaattcacggattttgttttccagttctttcgcagataatttatggaaatcatcaacccccaaatcagatttgcttctatttctggttctgctttttcctttgccattactaggctgaccaagttgtaggatatcgccaacttttttattcagcccttttggtacgataccgttttcttcgttaaatgcctgttgtttcgctcgacgccgttctgtttcattgatggctttttccatagaagcggtaattttgtcgccatacaaaatagctttaccatgcaagttacgcgctgcacgcccaatcgtctgaatcagtgagcgctctgaacgcaggaagccctctttatctgcatccaaaatagctaccaaagagacttctggcatatcgagaccttcacgcaacaagttgatccccaccagtacatcaaattcacccaaacgcaaatcacgaataatctcaacccgctcaacggtatcaatatcagagtgaaggtagcgcacccgctctccgtgttcttccagatattcagttaaatcctcagccatacgcttagtcagagtggtgactaatacacgttcatttttagccgcccggatacggatttcagacagtaaatcatccacctgagttgctaccgggcggacttcaacttcaggatcaatcagacccgttgggcgtaccacctgttcgaccacttcattaccggatttttccagttcataattgccgggtgttgctgatatatagatggtttgtggcgccagcgcctcgaactcttcaaaacgcatcgggcggttatccagtgctgatggcagacggaagccgtattccaccagcgtctctttgcgggaacggtctccccgatacatagcaccaagctgtggaacggtgacatgggattcatccaccaccagcaagccatccgcaggtagatagtcaaataaagtcggaggaggttcacccggtgcacgaccagacagataacgggaatagttttcaatcccggagcaatatcccagttcattcatcatttcgagatcaaattgtgttctctaagcgaatctgggctccccccttcgttctgatggaatcttta

SEQ ID NO: 48 - DNA, 5339 bp, Xenorhabdus sp.
  unsure (1)..(5339): unsure at all n locations
cataggctactgatgaatgattggtttttatttgaaaaatgacaggtaaccggtttttttataaatggaacataaacagtggcactcggccgatatcattgctgaatgggagaaacgtggcacatcattgtcggaagtcttacgtacggcggggctggcatcatcatcacttgctaatgctctacatcgtcactggccgaaagggagagcgactaatcgcaaccgcgctggggctgacgccataagagatatggacttctcgttatgaaaaaaagtaggcaaaataaaacccagcataatgctgggttttattataatgataatcaacgaattacagaagatcagctggctacgtttcactgccaataatgccaaccacaataccgccaaggcttaatactctggcaatatttgcagactcacccaataccataatcccaaaaatcgctgggcggtaccgccccaacacctgtccaaatcgcataggctgttcctgccggaagacttttcatagcataagccagtaaccctacgctgatagccatcgcactggcagtgatcaaactcggctctaaacggcaaaaaccctgggtatacttaacacccgcagaccactacaacttcagagagactctccatgagaagtatcaaccaagacatgttttagccctatatctaatggaagcggggccgtccccaatgagatgacgtttatccgggtcgtcccagataacgataggaaatgaaaagggattataacgatcaacccaaaccgctgcaatggtcgtaaaaatgaccataaaaaaaccgcaacctctggacgaagaggctgcggtttttttaaaataacaaagcgagattatttcacgcgagaaacgtattcgttagaacgggtatcaactttgataacttcaccgatctggacaaacagtggtacttttactaccgcgccagtgctgagagtagctggtttaccaccagtacctgcagtatcacctttcaggcctggatcagtatcaacaatttccagctcaacgaagtttggtggagtcacagcgataggacggccatcccacagagtcagaacacattctgcctgatcgatcagccatttagcattgtcaccaacggctttcacatctgcagctaactgctcgaaagtttcgttgttcatgaaatgccagaattcaccgtcgttgtacaggtaagtcaaattgacatccataacatctgcactttcaaactgaatgcctgaataaaaagttttttctagcagtttgccagaaatcagcttacgaatacgaacacgggcaaatgcctgccctttacctggtttaacaaattcactgtcaagaatagcgcacggctcgccatctaacatgattttaagacctgaacggaattcattggtactataagtagccatggagatcctctaatttttaacgaaatggcttagccaaaaaatggcacacattataacccatattcaccctgccagagaagtctggctacaacaacttactgatgttatcactgatcccagtgagttgttgcaattgttatccctgaacacgcacgccttattgaaagaaggtaatgaggcgcgacgtctgtttcccttacgtgtgccaagagcatttgtatcacgaatgaaaaagggcgatccgcaggatcccttattactacaggttttaactgcacgagaagagtttgatactccagccggattttccactgatccattagatgaacagcatccggtcgttcccggcttgttacataaatatcgcaaccgggcgttattaatggtgaaagggggttgtgcggtaaactgccgttactgcttccgacgccatttcccttatgaagataacaagggcaataaaagtaactggcaatcagcgctagagtatattgagcaacatactgagcttgatgagatcattttctctggcggtgatcctctgatggcaaaggatcacgaactggattggctgattactcagcttgaatctattcctcatattaaacggttacgtattcatacccgcttacctgtcgtcattcccgacagagtaacgctttcattatgtaatcgtctggcacaatccaatttgcaggtcattatggttacgcatattaaccatgcaaacgaaattgatgaggcattccgggagagtatggctcggctgagacaggccggggtcaccctgttgaaccagagtgtcctgttacgtggtgtaaatgatgacgctgatatactggctgatttaagtaactcattatttgatgccggtattttgccttactacatccatgtgttggataaagtacagggggcagcacactttcttgtcagtgatgaagaagcaaaagccattattcgggagctattaaccaaagtctccggctatctggtgccatgtctgacaagagaaattggcggtgaaccgagcaaaactccattggatttagggttaaaaaataattaaccagcggaaatttttcacattttttcgataacaggcagtgcacagaaattcagacagctagctcacgatgttgcaggctgtttttctgggcattgcccgaattcaatatgctgcttatcacgtacactcaagggcatttatagacttgaccgaccatcttactggcgaggggaataaagctatttaacagcccctctgacgggctatttacgccatatataacgttcccgcccatttcagctgctttattacgcaaatcattagccgcaccacgcatagaactactttcactgccgacgccattaagccagttactttgagttcccgtcacttcacctaatcgctggcattcactacccggctgagtatccacaaaacgcacaccggaacctgctgaagttaattgattatttgtcgtgcatcccgctaacagcaacaccgatgcgccgagcaaaaattttattcgcatgtcttccctcgttgattacgctaacttcatacacttcgtctttcaaattgcctctttgttggccgcgctcgttcacctcagtcacatagttatctatgttcccggagattactgagaggctcctgcctctcaccggaggccagcctttggctgggcaaattcgttcccgacgaatttgttactcccttgccgccgcgacgcatcttgaaatgcattgtgtatattacgatgataaatttaatcttttgtatgctattaatagaagaaaatcataaccacccgtataacgggtggtttgctcttgccctataagggcttgttaccgactgcgcctaaatgacgctgctttctcttcgttcaagctaagtgtctttgctgctttggcctaccccttgaaggggtctacatgctctttactactcaatttatccgagattaaatccgacttttcttgctctctgatatacttttgaattgtcgcttcatttagccctaccgtactgacatagaacccttccgcccaaaactttctgttgccaaatttatattttaaattggcgtgtctatcaaagatcatcaacgaacttttacccttcaaatatcccataaagcttgaaacgcttagctttggtggaatactcaccaacatatgaacatgagctggcatgagatgaccttcgattatttccacacctttatacttacaaaggtctctgaggatctctcccacacttgaacgaatattattaaaaatcactttccgtctatatttcggcgaaaagacgatatggtatttacacagccactttgtatgcgctgagctttgtgctttaatgcccataaacacctttccttatttgagttacgaatattagcttgaacatctatatcgtaacggaaaggtgtttttcttggtataacctttgaactccacccgcaaagcgggtggttttatgtttaagacgctaacgcgacttaaactggctaaagccataaataaaagaccatctattttaaagatggtcttttttgtcgaaaatcagattttacgtatcatcatttgaaaactatttcgcctttaggatcatagtcagcggctttcagtggagagtgtttttcaatatatcctttcaatacttccgcatcgacaaaaccggtatttacgtatcccggcaaattatcaattcgtggataaccgtcaccaccgatagcgttgaaattcaatgttgccatacgataagttttattcagatctaaaggcttcccagcaatttttacgtcgctgatgctcttaccctctttcacaaaactgacattatagaactgaccataagcacctgaatccgcttccatattagcagcagcggtcagataaggcagaacttcactgcctttgaagtcaacataaattagctgattaccgaatggatgaacttttaatacatctttatacgtaatatcccctgcttcaatagaatcacggataccgccaccactcatcacagcaaaatcagcattggctcgttccatctgagctgccagcacaagatgagccatattggtctgtataaaacgaaccttactacggtcaccttctaatttgtcgtcaactgacccaattttgacactcagtttctgattacctttatcctgataaggcgtcaacaatttcagcatttctgcgttctggggaatttgttgagtgtaataaacccgctcagtactcccatcctcttgtttgactcttttatttaaattgataggaattaactgatagtgcattaacttaaattcaccattacggaattgaaaatctgcccgaccaacatatttgccccattcatgggcctgaacaatccacgttccattttgacgatccggagagcaaggtgttcccggtacataatccacttgtttatagtttttattttccgcagacatacagaccggatcttgtgaatgcccccccacaatcatatctaaatagccagcaggtaaactacgcgccatttccacatctccgggagcattcgtaccgtgatgaccatcgtcatagtgccccatatgcgttgcagcaataatcacatccggtttttcattcttcttcagttcatcaatgacttttttcgcttctttcgcaggtacacggaattccacatcagggaaattagccggattacctattttcgcggtatcgtcagtagttaaaccaataacagcaattttcaccccttgcttatcaaatatcacatagggcttaaataaacgcttattggtactggtctggtagatatttgctgacaggaatgggaagttagcccatttctctgttataaagacttcaaagnttacaatttttagagcacatggtccgc

SEQ ID NO: 49 - DNA, 6050 bp, Xenorhabdus sp.
aagttccgcattgatttggcttgccatatgcccgaatacggtattacgcataaatccgtacagaggttccgcaatggcgagcgccagcattgccagaccgagaacatgcaggctggaaaggctgcgcccgactaatactttatcaatgatattttcaaacagtaaaggtgcggccagtgcaaaaagctgcaagacaatagccagcagaaaaatatcctttaactgttttttctgcctgaaaatggaagggtaaaaccagctcaggccaaatttgacgtgttttttagtcaggtttttttcagcgaccagcaggatcttatattgactacacagatcatgtattttttgttctcccgtaatgggattgagtacggtgaaacggtctgcattaatactcagcaatacccaccagcactgttccagctcaatcaatgcaggcagtggcagagtagatgcagtttctgctgacagagaatcaaacttactgtgcagcccgatagcatccactgcttcccgtagctgccagtccgtcagttccagcgaatccagccccagggcatgatgcaattgcccggcatcggcaactttatgaaattgttttcccagccagacggtacactcaatagcatgattattgacgtgattttctgtatcagtgccgtctgtacctgaaaaacgtttatcggaaaaaacatttaccatgattatttttccctcagcgcttcagactgatattcgcgaatcgggctgagcagataatcaatcactcgtcgctggtcagttttgatatccgcaacaattgacatcccggctgtcagttcaatcgggttcgccgtcacccataatattgttctggttgagactgatttgcgccggaaataccagccctagccgttcatctaccgtggaatcgcgggaaacacttaacaatctgccttcaatggtgccatagcgggtataagggaaagcatcaacttttacagtgacctgctgccccggacggataaaaccaacgtctttattcaggatctggacttcagccagctgtatatggtcgtcaggaacaatcaccatcagattttgtgccggttgcagcactgccccaagagtatggacactcaactgctggacagtgcctgttaccggagagcgaacgactgaaagctcttcccgttctttcatttttgacagctcctgtttcagtacagatagctgcatatccgcctgcttgattttttcaaaccattcgcgatctttttgcgttttcagactcttcagccgttcttccagacttttgttctgcgttatcaggacgccaagttctgccctttgttgcgtcagcagccgttccgtctccagaaactctttttctttctccagatattccatccggctgataacctgctgttggctcaatgtttttctggcttgtaagcgctggctgatattctggcgcaggttgctcagtgcctgaatatcattctctttggctttctgtgaagagagattgacattcatttcagcataaatattggttacaaccgcatcgaattcctgcttttcatgctggtaatgtgtcagaatttttttctggctgatggcggattgttgctgaaaaagttcggaggattcaggggcgtgattatccagcaatgcctgataacggatcttttcttcggtgagatattcacgctgttcaagcatacgtgtaatgtcctgattgacaccaagtgtattcagtgtcagcagttctgcgcctttttcaacgtgttgcccattggtgacatgaataatcgccagacggctctgctcataggcctgaatcacctgtgaacgaccagagacgatcaggcgtccggttgctgtggcttgtacatccagttttcccagataagcccatagcagaagtaccagtacactgatactgagcgcgattgcggtatagcgggcaaacggcgaaggcggacgttgcgacaatgccagatgcgtgggtaaaaaatcgtaatgttgagaaggagaacgcaggcgtttcagccctttacgcaaaatggccttaaacatgggaagaaccctcctgttcctgttttagttcctgttgcaactgccagagtttttggtaatgcccgccatgctgtaaaagctgttcatggctgccctgttcgatgatctggccgtgatgcagcacaataatccggtcgcactgacgtacagtggagagccggtgtgcgatagtaatgacggttcttccctgagcaatacccgccatattggtctgaataatggcctgtgattcatcatccagtgcgctggtggcttcatcgaggatcaaaattcgcggatcggagagcagggttctggcaatcgccagacgttgtcgctgcccgcctgacagtgactgaccaccttctgcgataaccgtgtcataccctaacggcagtttaaggataaaatcgtgtgcgcctgccagccttgcagactcaataacatcagacagcggtgcgtcaggccgtgattgggcaatattttccttgacggttttattgaacaggaaattttcctgtaacacgatcccggcctgttgccttaatgattccgtatccagttgttgtaacggaataccgtccagcctgattgttccatgctccggggtatacaggcgcagtaacagacgggcgagggtacttttcccggaaccggatgtgccaacaacgccaagagtttctcctgccctgatatccagtgtgaaatggttaatggtcggaggaatatcaggctgataacggaaaacgacatcagagaaggaaatcgcaccggttagtgccacctgtttcttctctgcctgtttttctacggattgctttgcgacagattgtttttcaacagatttatttgcgacagactgctgctctgtcggtaaattcagcatatctgccagcttatcgacggcaatccgggtacggataaattgcccccagagctgaaccagtttggctaatggctgttgggtatgattaaccatcatattaaaggcaatcaactgaccgatagtcatatgcagggagagtacttcggatgcgccaagccagataataacggcactggtgactttctgtaacagcatgaccagatgactggaacggttatcccattgctgaacctcataactggtactgaccatattttcagtctggctgtcccagcgacgggtgaaacgtggttctgctgcgaggcttttcagtgtttcagcgcctgctacagtttccgtcagaaatgacgtactgagcgccgcaggagtgacctgttattctcccgattttcgacgtctcggtgtaacccaccatgccagcagggcatagaaggggatggtaatcagaaaaatcagggttaacgtaccggaaatcaggctcataacatagatgaaaacaaacataaacaggacatcaatgcataatgtaaacatagatcctgttaaaaattcccgaatggtttccagttcccgtacccgtgtgacaatcgcgcccacctgacgggttttgaaaaacagtaaaggcagtccaaacagatgttgaaccagtttcagccccagtttgatatcaatccggttggcagtatgagaatactgatactcgcgcagtcctctcaggacaacttcagtaattccggcgaatataagaccgaataccagtacatccagtgtggatagcgcctgatgtaccaataccttatccatcacgacctgaatgaataagggggagatcagggctaatatctgcaaaacgaaagaaaatagcagtatttcagccagatttttcttctgcctgataaattcgggaatgaaccagtggatattaaattggctactgttttgctttattttcagccaatgaccgttccataaattgataaaatcttccttatccaatatttccggcttttcctgatgaggcttttgtattagcacccgatgttcatcgcattttgctaaaataaaaggatttccattattgtcaaacagaattgccggtaaagataatgtgttaattttcttctttatcgaacgcttatttttaatggatacattgttttctttctttaatttatttaaagcagcaaggtaatcatcattattatttatgtttttatcagatgtaaccgagggcttgccattagatatcattattattaatttaattaatgataatgttgttttttctatttcattcatgcatggaagtctatttgtaacgaaagtcaaaactcaaattaaagaaacaaccagaaaaatagtgtggcatttctcgatgaaatgtttttaataaatctaataacaattattatctgctatgattgtggatattagtgtgggttattgggacaaaatgtggtgcctaaacagacattttaatatttatatgttgattttaaaaggcaaatagatatattttcgctcaaagtagtcggtaatttatttgttttttctctcttattttgtctgccattacagattatgttgaattttatgtatgttttaaaccttcattctgattattcactcatattgtaatggtgtttttgatacgctttaaccaactgattttttgtaatcaatttacggcaaaaacggaatttaataataaatgaaatcctgcggagtatagcgttcatttatcatttaattatttcaatttaatatacctttaacattgggttaatatttatttaatggatagtgatatgtctgaaaaatttgttcaaacaatttcaagcgttaattacaataaaggcgtgttctctctttattttgttggtcaggatcctaagcgaatggcaaatggtgtactggccgaaaacgatcaggaactggagttaaaacaagttatccatatgccggcatccggttttatgtatatggtttctatggtgaaaggtatgctcgaagatccgcgtatggaagccgaaatcaataaactgattgcagccggttttttgccgatgccggaaatagatgaaagccccgtgacggctgaagctgacaatacagttgcagacgccgaacagccggaaaaacgtgctgcacggaatactaaaaaatcaaaataaaatcagctggatagttgctttattatgatgatcacacatcaactggcaaccctgaatcagactgaaatacaggccatcattggcggggtaatgttactttgccaacattcccccctgcatcgccgttatttagttgccgaatggcaacaacgtatcttaccgtcatttcagctcaatcagttttgctattacgaagatgaacaccagcgcccagttgctttttgtaattgggcttttttgtctgacagcagccgcgcggcaattctttccggtgaaagggagatattgcatgaagactggcgctctggtcagcatatcttttttccagaaatgattgccccattcgggcatgcacatgacatcgcccgggatttgcgccgccgtgtattttcggcctggaaaggccagagagcctgtactgtccggggtattttggatgttaaaaatgaccgctgtatccgccggatacagtggtttactgtttaattttttgcccaacaccaggaatatttatggggaaatcatctaaccgaagtacggaatacttctttaccggtagatatgaggatgataatgacggtaacacaatacacgcgataggcgttggcggcgttattaatgcttatggcggtaatgattatattgtcgtcgggtcaatcggtgccacagtcaatacaacatggggtcatgatacggttgtcggtggtgccggttatctgaacatcaatgataccagtggctccctgacggtcaaaggcgggtcagggtataccgccattaataaaacacataacggtacgatagaatttgccggtgctgctggtgggctgaacatcaatcacaccggtgataacggtgctatcaactacgcgggggtttccggttataacgggatcacccgtaaaggtgtaaaaggtgatatcagctttaagggagccggtggttataac

SEQ ID NO: 50 - DNA, 6360 bp, Xenorhabdus sp.
ttccgcaatatttaatatcgatagagaacgcaagggattatttaaatagtattcattataagaatgacaaaaattattggattgattttttaagaaaaaaagaaatacatcacttaaccccccactataaaaataatgaaaccggttatcgctctctgacactgcccttttcagctaaagaaagtttactggctttttgtcgtcaacataaaacgaatttactggctgtcttttccagccttgtcaccatcatgatggctgaacttacagggcaaaaaaagctgatttttaataccattacacatggcagaagaacagaaacagagaaatatgttgttggcatgcaggccaatgtgtatcccgtacattgccatatttcgccagcatccagtgtcattgaacaaatcagagaaatggaatcagctctgaaaaacagttacagacacagccagttccctcaatcacaccttgcccgactagcaagtcaacagggtttttctttacccggtatttttattgcctatgaccgttattcagcatcagccactgaaattaaccagaatcagcattgccatatcgatggaatatttaatatttatcccatcgcattccgcctgaaagatcacggttatgatcaggaattaaaaataacgatagattatttgcaggcctattttaatgatgccgatattcaaaatgcgcttgaacgtctgcaaaatttattggctgctatcattgagacgccttctgttcctgttaatgagttacctattttattagtgcaggagcgtcaaacattattacatctccaaaaacaggctgatatcgcgtatccacaggataaaactctgcaacaacatttcgaagctcaggcaaccataaggccggataatgtggcggtcatgtttgaggatgaaatgctgacctatcgccagttaaatgaacaggcgaatcaactcgcagttgtgatccgtgagcgttatcagcaacagcataatcaaccgatgccggctgatacgctggttgcactttatctggaacgcagcacggaaatggtgatcagtattctggcggtgttgaaagcaggcggcgcttatgtgcctgtctcaccggattatccagcggaacgggttcggtttattctggaggatacccgctccttctgtgtgatcactcagcaaaaatacctgccagtcttgaacgagtttgcaccggcacaaactgttctgattgccgtagatgaccgcagcgtgactgaaaatcgctccacggaaaatccggtatgcgctgggcaggcaaccgatctggcttatgttatctatacctccggcaccaccgggcagccaaaaggcgtgttacagacacatgctaatgtcgcccgcttatttgccagcacacaggcagattatcactttaatcaggatgatatctgggtgctgtaccattcctacacctttgatttcagcgtatgggaattgtggggagcactgcgctatggcggatgtgtcattattccgacaacagagtgcactaaggattttgaacaattcagccgtctctgttctgcgcggaatgtcacggtactgaatcagacaccgggggcgttttatgcctttatcgaggcttcattaaaggccagagctgaatttccccatcttcgctatgtcatcttcggtggagataaactgaatccggtacaactgaaaccgtggtgggattcttacggcgatcaaactcctgcccttatcaatatgtacgggatcaccgaaaccaccgtccatgtgacctataaaaaattaactcagagcgatgcaaccgccgtctcctgcatcgggcgaccactgcgtgatatgtctgcctatattctgaatcattccggtcagcttgcccctatcggcgcgcccggtgagctgtatatcggcggtgccgggctggcacagggttatttaaaccggccggaattaacggctgaacgctttgtggagaatccgtttgccacggataaggagaaaaaatccggttacacccgcctgtataaaaccggcgatttagcccgctggctaccaaacggggaactggaatatctggggcgtaatgattttcaggtcacaatccgcggttatcgcattgaactgggggaaattgaaagtgcgctcgcttcacatccacaggtaaaacaggcggtcgtgattgatcgagaatatgagggtaataaagttctggtcgcttatctggttagccatgaaaaaccttcagatgatgcgttaatcagccacttttctgccctcctgcctgactatatgctgcctgccagttttacctatactgaatccatccctctgacccagaacggtaaagtcgatcgacgggcattaccagaacccgccttcggcaataaagccggttctgtttctccgcgtaatgaactggaatcccggctttgtgatctttggcagaccgttctgggcgtgaaagaggtggggattgaagataatttcttccgtcttggcggaaattctttgacagccattaagctgatcagcgccattcgccagcaattagggctggaagtttcattaagtcagatttttgagtttaaaaccattgccgggctttcagcacagatgcagaaagcaaccggtatggttattactcatattgaacaggaacgttatccgctgtcattcgctcaggaacgaatgctatttatcgagcgttttgagcagggaacttatgtctatcatgttccttacctcgtgcaactggatgacaacacggatttgtcattattggaaatcgcgattaatcgagtggttgatcgtcacccgataatgaagacggtataccgcaccgatgctcgcgggcatgaatatcaacaagtactggcagaaaacctcagactcagatcacaatcctgtcaggatatgcatacccttttacaatcagtacgcgccgaaatcgccaccccatttgatctggccgctgagccaagtctgcgtttgtgtcactatcaaatggctgaaagccattacttattgttcctttggcatcatattgccactgatggctggtctaccgatatttttaccaccgaactggcagaaaattatcacgcacttctgcaagggcgtgccagccaattaccggcactggaaatcggctatggtgactatgcacgatggcaacgggaatatttacagggcgaagtacatgcacaacaactggcttactggcaacacacgctagcgggctttgaaacgctggatttgccagcagactactccagaccggcacaggtcagttatcagggccgggattttacctttacgctgaaccccgtcctttccgaacagttgcgggtgctggccaaaacagaagaaactacgctgtacaccgttctgctcagtgctttttatgtcatgctggcgaagctatccgggcagaatgatatcgtgctgggaactccgacggataatcgccaccatccccagactcagcctctgatgggcatgttcatcaacttactgccattgcgggcacagttagcacagaccgacagtgtaaaaacactgattggacaaatttataaagtcattgccggtgccaaagatcatcaggacatgccatttgaacagctgcttgacgcactggtgatggtacgggataccgcccgccacccgatttttcaggttatgtttggcttacaaagttttggtgaaagcctgacagacaaccctgcactgccgttcagcccggtcgatctggatgactctttatacagcccggccaaatttgatttgagcctgttcttatccgatgggcagacctgtcttaccggtagcctcaattatgccgtcagtctgtttagtgaagccaccgccggacgattggctgactattatcaacgtgtgctggcggcttttgtcgaagaccaccagcaaacactggcgaatattaacattctgtcagaacaggaatgccagactctgctgcatcattggaatcagactgatgctccgtatccacaggatcaaacgctgcaacaactgtttgaaactcaggtggaaaaaacaccggataatgcagcgctggtatttgaaggcgaaaccctgacttaccgtcagctgaatgaacgggcgaaccagctggcctgtgttatccgggcatgttaccgacagcagcatcatgaagagttgcaggcagatataccgatagcactctatttcgatcgcagcccggaaatggtgatcagcatgctggcggtgctaaaggccggtggggcttatgttcccatttcaccggcctatcctgccgaacgggtccagtttattctggctgataccgcggcattctgcatactgactcagcaacatcatctgacaacactggcagcatattgtcaggcactgcctgaacaaccgacactgattgcggcagatgaccagaccatcaccgcagagcagcctgtagaaaatccggcacgaatcaatacttccaccgatttggcctatatcatctatacctccggcacaaccgggcagcccaaaggggtcatgattgaacacaacaatgtggctcatatggcggcggcacaaacaaacattctggatacctcgaacataaagaaagcattaatgtttgctgcctatgtgtttgatggttccgtttttgaattattccccagcctgttcagggggatcacactctacctttgcagtgaaacagaacgaaatgtcatttcagttgcgcaactcattcaacgtgaaggtatcgaagcggcagccttaccccccgctatgctgaaattactgactgatactgaattgccttctttgcgggtattggtgacagcgggagaagcgccttcctccgatttcattaaacatttcagccaaaccagccgcgtactgaattcttacggcccgacagaagtcacggtgtgtgcgactgaaaaacaatttcagcagggggatatcccggctaatatcggcaaggccattaataacgtccgcctttacgttcttgacgaacaaggtcatttatccccagtcggcacaccgggcgagctgtatataggcggagcgggactggcgcgggggtatttaaaccagcctgaactgaccgctgaacgttttgtacctaatcactttgccaccgcagaagacagaaccaaaggatatacccgcctgtaccgaaccggagatttagtccgctggctaccaaatggtgaactggaatatctgggacgcgatgattttcaggtcaaaatccgtggttatcgtattgaactgagtgaaatcgaaagcgctcttgcttcacatccgaagataaaacaggcagtcgtgattgatcgcgaatataacagcaacaaaacactggttgcttatctggtcatcgatggtgaacttaccgatgaagtattaatccgttatttatccgcccgtctacctgaatatatgttgccagcctgctttaaccgtattgatgcaatccctttaacagtgaatggtaaagtggatcgccgggcattaccggaaccagttttcggcaataaaatgggatatgtcgccccccgtaatgcactggaaactcagctttgtgctatctggcaggatgttctggggcttgaacaggtaggtattgaagataatttcttccgtatcggggggaactccctgaccgccattaagctgactgcggctattcaccgtattctggcaactgaaatctcactcacccaactgtttgagctgaaaaccatcgcagaactggcaacacaaatgagggagaagagttatacagttatcccccatctggcacaggcgcactatcctttatcctttgcgcaggagcgcatgttatttatcgaacaatttgaacagggtagcaatgcttatcatgcgccttatctggttcaattggataacgatattaacctccctttattggaaaccgccatcaaccggctggctgaacgccattccgtgataaaaaccgtgtaccgccctcatgatgaaggccagatttaccagcaggtgctggacagggatctgaaaataacctcccagtcctgcgaaaatatggatgagctactgaatgctgcgcgcaccgagttagcacgtccattcaacctgactacagaactcagcctacgtttatgccactatcaagtggctgacagtcactatttaggactgttatggccccatatcgctattgatggctggtccatcggtatttctatggcagaacagtcaggcgtttattaggctatccggcataacggtacctgacagctcacacccctggagatcacttacggtgatgaggctgtctggcagtgtgatgacctttagagca

SEQ ID NO: 51 - DNA, 5924 bp, Xenorhabdus sp.
ctcggaccatgtgctctaaatgcataaaattctgcatttttatatctcttattttataaattattagcgagttttcttaatgtctctttgagtatttttccgcttgcgttacgtggtaaagctgaaaaagtataacctttggggcgcttatagcgtgcaacaatagttcggagataatcatccagttcctgctcagtaattgaggtattatcatcaatttcaataaacgcatgaggaacttcaccccagtattcatcaggttttgccacaaccgccacagccagaacgccgggataactcgacagcgcattctccagttcaagactggaaatattttcacccccggaaataataatatcttttttccggtcgataatttttatataaccatcgctgtcaataacagccaagtccccggtaaaaaaccactgacttgtcatatcgaatgtgactcgatcgacagggccgtaagcggcaacaatattaccccgaatagcaatttcaccaatggattgcccatcaaaaggtactgccagcccgttattttcatcaataacgctgatttccccctgtaaattggaaacaattccctggcgcatcttctttaaaattgtttctgattttggcagtgtggcccaatcgggtttatcttcacaaacaacgaccggcccataagtttccgtcaggccataaacgtgggtagctctgataccggctgcatcaagcagggaaaacatcttctctgttggtggggcgccggcaatcaacccatagacattgttgttgaaagagatgccgagcttttgtgcttcccgtcctaaggaataatgcacgataggcgcgccacaatagtgtgtcacctgatgcttcagcataatttgtatggctttctgtgcatcaaatttgcgtatacagacatgagtgcctgcccgtgccgcaatagtccaggggaaacaccttccattgcagtgaaacatgggcagtgtccataaataaatcgggtatttgggcatatcccagtccaggatattcgaaattgcattaaggtatgcgccacggtgtgagtatacaactaacttaggtgtgccactggttcccgaagtcgagttaatgctgatggcttcctgttcatcaatcggataaaaattcagggtttcagaagggtactcagatatcagtgactcatagctaatcaaatccaacgctgattctggtagaggagtattattttcagtaatgacaacaattttgaccgggtttttaaaggaaacaccatccagtaatgcaaggtagtttttatctataattaatattgtgggattaattttttcaaagataaaattcagtgtagctgcatctgtcctgatacttaaggcattcagtattccgccagacaagggaacagcatagtgcagttccagcaattcatgaatattaggcaataaagcagatacaacacagccttttccaatccccatttgctgaagtgccacagcaactctttcacaacgttctccatattgtcgccatgtgacaacattgctctccatctattaccgcaaggtaatcaccattacttaatatggctctttttagaaataaaataggtgataatgcattgccgtcatattcattcaatagtgaattatagcgagtcatattcccatccttttttattttcgatttttttgcctgtcattatttttcactgattattaaaggtaatagtggaggtgggaatttgcaatctatatcaaatggttattagtgtttttattagaagtggatcttagtgtttatgaaaaatatcacgtactttatttgtgtgtttgagtgatatttcattgttttttaatatgctaattatatttattgttattgatagggtagtgttataaaaatatattgggaaattaagagtgatgtaatataaaaacttaatatactgatataaaaggaaacaaaaatgtttaatttaaccggaaaagttgcatttatttctggaggaacaaaaggtattggcaaaggaattgctcaggtatttaagcgggtgggtgcaattacgatcatttcaggtacggataaaacgaaaggaatgcctgtagctgaagaacttggagtggattttatcgcccttgatgtaactgatccctctgcatgtaaaaatgtgattaatgaaattgtcgaaaaatatggcagactcgatattctttgttcaaatgcgggtatttttccacaacacaatattaaagatatgacggttgaagattgggatttagtctatagcgttaacctgaaaggcacatttttattgactcaggctgcactgaatgtcatggaaaaacagcagtatgggcgcattgtgattacttcatctatcaccggagagattgtaggaatgcagggctatagccactatggtgccagtaaggcaggccagctcgggtttatgcgcagtgcggcattagaatatgcaaaacaaggaataacaattaattccattatgccgggtatgattatgactgaaggcttaatggcatttggtgaggataatctgaaacagattgaaacagtaattccaatgggcgctttgggatcaccagaagatattggttataccgcttgtttccttgcttctgatgaagcgaaaaatatcaccgggcagacaattgtggttgatggcgggcaggtattaccagaagtgcaagggtactgattgacttaagatgttcagatctggctttacttgttttccattgccgtaaagcaaaagaacaaggtaagatgagcaactaataaacacagggagggatatgttctcttcctggttttttattgtctaagtcaggtaaaaaatattatgtcactgaactatgaacgtaagcagcttccactccctaatggccacagcaaaatgttactgcactcgtgttgtgccccatgctcaggggaagtgatggaagcaatgctcgcttcggggatagatttcacaatatttttttataacccgaatattcatccacaaaaggaatatgaactgcgtaaagaggaaaatattcgcttcgcagagcaaatgggtattccttttattgatgccgactatgatcgtgacaactggttcgagcgtgcgaaaggcatggaaaatgaacctgagcgtggcatccgctgtacgatgtgttttgacatgcgtttcgaacggactgcgttatatgctcatgagcatggtttccctgttattacgagctcgttggggatctcgcgctggaaaaatatgcagcaaattaatgattgtggtgtccgtgccgcttcccgttatccggggttaacctattgggaatataactggcgtaaaggcggtggttctgcccgcatgattgagatcagtaagcgtgaagaattctatcagcaagagtactgtggctgtgtttattctctgcgggatactaatcgtcatcgtctggcaacaggacgggaaagaattaaactgggaacagttttttatagcgcagatagtgttcaaaaaaattagggattatattgatccttactatggcttttcagttttaaataaaacaagcttacatgaaactggaaagccttaatttatataatctcaatattaatagttaatctttaccatatctggcccgattcggggtataaccaaaacgtttccgataactttgggtaaagtaggactggctggaaaaaccggattccagtgtaatatcagcgatactcatttcactgtttaataataattgatgagcataaagaatacgctgttcactgatccacgctcgtggagatgtgccataaacattactgaaaagttctttgaacgaagttaaccccataccaaactcgcgggcaaaatcattcagccgccactctttgagatagtgagtttccataaatgtctgtagccgttctacttgccgattactcaatttacgcagaactgacatgagtaatgctccttgtttcccgagagagagcagcaaaagtaactcctcgcttcttaactggatcagggctgatgggtaatcatacgtgagtagtttctctaaactacgtatactttctgttaataatggaaacttattgaaaggaattaaccgataatgaggggattcacagcgttcaatattaattaataatgttccaaaacgtttcataaaatggcggaagaattccatatccaatggcaaccataatatctgacaacttcttgtatgggttttagcggcatattttccagggtggataaaaaggatatcatttgacttaatatgataggtattgttgctgtctttccataccatttcaccatcaagtaaaatatatagccctccttgttgatgttcgagaatatcgaagttaggtatggttaattgtagagaaaaaatactcttctgatttaagcccgtcgtccttttcatttaatactcctaatcttccttatcatgagtaatttgaaatgtattgatgatatgttctgttgttcaaatagtttacttggggattggaaagcaatctgaaatctactggatagatagtgataaattgagtagagagttaaaaatattggctgatatcaaaattgtatacgtaacatccattatataacttcagtattatatctctaaattaatatttatgttagttttaaatgttaaaaatttagatttaaatttatttattaacagggtagcagaacagaagaaatgatagaactttcatctattcaattagttaaagtccaatatgtttatattgggtaaatttaaatcgataatttcacggttagataagtattcaggtaggttagttaaggtacaattctctaattaaaattacatatcctgtaatgaaatataaataaactgtattgcatatgatgttattttgttaagaattggtttagtgatgttgcatatttattggtttatatggttcttatatttaagataccaaaatatttctattaaaatgagtttcctgtgttggattttaaagacaaactatcgataattcagaccattaagctttgttggtaacgttatccatgtaataacggcataaatacctctgttatagcttcgtagattgttttttatactggtacaatgctaggatgtattttcatcgcctttcttctatatccactaaggcatagagacatagatatatttgctgatgaaagataaaagattacaagaacgagaaacatatggaaaagtatcgtttttcagataacgcttttttatacagtttatggctcgcttgggctattacactgggattgtacgtatatggcaacaatattggttgtaccataacagcaattttatcgtttttagccctgggattttactttactaatatgaaacagagaatgaaagctatgtttggaaaaaaaactgaggcatctgctgctagcccggtcacacaaatcactcctcctgtacagactgaagagaaaaaaatctctggcactgaagcccgcgctaatacgattgtcgcgaagaattccgtattcaaaggggatatcgagatggaaggggatatccagatttggggaaaaattatcgggaatattcgcgtaaaaggcggggctattcgtgttatgcacgccggtaaagtggaaggtgagttgattgcacctgaaattattattgatggtcacgtagaagggacttgctgtgctgaaacactcgatatccttgagcatggggaattacggggtatcagccgttgtgggagtatgtcaatccgacgtggcggattatttatcggtcagtctgaacaagtggaaaaagaaaataagaagaaacaggaagcagaacgaattgtttccatcaaggatactccgggagataaggcaaaatctaaaactactgcttgatatctcttgagagcac

SEQ ID NO: 52 - DNA, 3464 bp, Xenorhabdus sp.
tgctcggtccgtgtgctctaaagtttggcactcagtctgggacagaaacagacatcgctggacgttaaagtgatcgttgtcggtggcgagcagatgagtcgtattcatctggagtatctcagcgctattgcgcctgaaagtgtgtgttttaatgagtatggcccgacagaaacggttgtgggttgctgtgtcgggcgattgaatatcgggtcagacctccaaaggcgtcaaggggtgttaccgattggctcccctattgccaatacacagatgtatgttctcaatgaacggggctgccatcagccagccggagtggttggtgagttatttatcggtggtgcgggggtcgcgaaagggtactggcagcgtcccgacttaactgcggctgcgtttattgaagatactttctcccgtatcagcggcgaacggctttataaaaccggtgatctgggttgttttactctggataacacgctgttgtgtctggggcggaaggataagcaaatcaaactccggggctatcggatcgagccggaagagattgaatcctggattaagcaagtgccgaatattgataaagctgtcgtcgtcgttgaaaaacagccctatgagcggctctgtggttatctggtgccagcttcggggattatagatagctcccatcagcttattgatttggtcaaacagcacctgcaaggccaattgccggattatatgatcccaacgcaatggcgggtgatcgatgctattccttataccataaacaataagattgatactgccgctttattgatattagggcaaaaccaacatgctccactggcagaggaacatgtggcgtgtgaatttaactctgagattgccagacagctctgttcccatttcagtgaggctctcaatcacagcactgtttcgccggaggacaatttctttgagctgggaggagattctctgatggctgtacgcctattggcaaaaattaatgcccattttagcattgagctaaaacttaaggccttttatcagcgcccgtctctgacaaatttgattgcgttagcggaagaacaactgcgctatcgcaatacgcatattaataggtaatttatggaaaaacaggaggggagtttggaaagtaataagctatttattatccctaagccgatccataacccgaggctgagaatattctgttttccctatgcggggggctctgccaagacgtatcatgactgggctaaatattttacggatgatattgaaattgttgccgtacagccgccgggtagaacaacccggcttgatgaagcgccatatgaagatttgcaattactgatcgatgaattaatggctcatgcggaatttattacaacaatcccatatgctttcatcggacacagtctgggctcccgggtggcatttgagcttgcctgcaaacttcaatcccgtggttatccggttcctgtgcatttgtttgcatcaggctgtacagctccgcatttgagacataattaccccgtaactcacgacttaccgcatgatgaatttatctgtgtattacgggaaatgaatggtgctacggatgaagtcctgttaaacagggagctgatggatttcttgctgccgcttttaagggctgattttaaaatggcagaaacttattcgataaaacggagattgttgaaaagcccgataaccgttttaagcggagatgctgacccggacattaaaccaattgaactccatgcatggtcagaattatccagtgaaggtgtaaccgtacaatatgttcagggcggtcatttttttattgatgaaaataaagagacggttattggcgttgttttagcgtcactgtctgaagaacccgaatgatcccgggttctttcagtcagagaatgagctgcagttgtcggaaaaactatgaacggaaatatatggtctgctcagtgtgctccgccactaccctgttttcctgctacaaaaggtggttttgccatccagataagtaatatcaggatcaagaatatacctgctgaaatccaaaaaatttcattagctgaaatgatcaacccctgatgagtgatctcttttgccagataggcggcaatttgctgatcattcattcccaattgagagagttgctgatgaacctgctgataattggggttatacggggtgatctgctcggtaaagtttgcatgatgcatcgattcacgttgtgtccacagtgtggttgtgatcgatgtaccaattgagcctgataatatacgggtaaagtttgacaggctggaagcggatgccatgcgttcaggccccaaacctgacaaagtgatggttgtcagtggcatgaagaagcaggccatcgcaagcccttgtaagaattggggccatgccgccgccgcaaaatccattcctgattcgaatgtatatgcccgccagtaaaaacagatagcataaacaataaagctgaaggtgatgaggacacgcatgtcaactttatgaccatatttaccgaaaagtggtgacagtaacagcgggagtatccccaccggagcggctgcaaaaccggcccatgttgcggtatagccaaatacttcctgtagtagctgcggtagcagaacgatgctgccgaaatacaacataaaggcgaggctgatactcaatgttccgatagtaaaattacgctcccggaacaatgaaaggtcgataatggggttatcgtcggttaactcccatatgaccaaaagcactaatgaaataagagcgatagttgcgagaataataatttcagtcgaattaaaccaatccagctccttacccttatcaagcatgatctgtaagcatccgacacctgcgatgagtaaaattaaaccaactgtatcaatcggtttaatttctgttttggtttcccggctccgcaggagtttcattgtgacaaagataattccgataccaagagggacattgataaagaaaatccagccccagtggtagttatcactgatataaccgcccagtatcgggccacaaatgggagcaaccaccaccatgacagaccagagtgccagcgccatatttcgcttggctggtgggtagttattcaataacaggctttggcaaagcggaagcactgggcctgctactaatccctgaataatacgaaaagcgattaacatctcaaggctgcctgagatcccacacagccatgaagagagggtaaacagtgcggtagaccagatgaacagcctgacttcaccaatgcgttttgccagccagccggtaatggggatggatatggcgttggcaaccccaaacgaggtgataacccatgttccctgggagtttgatgcccctaaattccccgcaatagttggtatggcaacattggcaatggttgaatccaagaccagcataaaagtagccattgcgagagaaatggtcactaacgccagtctatagggcac

SEQ ID NO: 53 - DNA, 4820 bp, Xenorhabdus sp.
ggggccctaaagtgtgcctccctatacgtggggtataacgcttactgaccacatgcagtttccctgccaatgttttttcatcacttttcgtcttgtcctgtcgtagacgtaaaagagccagcgtggctgtttctttgacttcacatacgaccattgttcatccatttcacagcagataatcacttcggtgccgagtgcaatggcttctgttaccgatttgggtctgagctttttaagtggcgaagcacggtatttaggccaatccccatcatccgcgctgtcgcccgacatcccatgccattcatggccatatcgacgatttgcttatgggttccgggacgacatgcgcataatagaaagattatgcatgatcaataaattgatatcataaccggcgttacgtaatgaaatttcaatgagttataatataggtaagaaaatactggccagttgtttattctatagataaactcctaagcattgttcaggggatttcccgccaaaaaacggtgactgataagtggaaaatctggaggcagaaagtgattgggtaattgcttcaatagccattatctgacggagtcctttgtgaatttggcacagtataccgcttgtttcgttcagattcacagatccaacaggataaactggtctaatttatatagatgaaaatctaatgataagtacctttattaattcaatgattattcccgctagatttctagcgcgtggtcttcacgtccatttttacatactgattatttttcacagttatgaataaaaatgctattttttggacaggatttggtgctcggaatgcctccaatttgataactcagatagctgtaaaaacaaattcgcaggtaatatcgactccacgaggaaaagggatcttcgatgaaaagcatcgtctttacgctggaaccagtggtttaggtacagatacagagagtattcatcaagcactacattgtccttcattatcagcagttattattattaaattaaataactataataaactatggttataaacaggaaaaattatgacaagagtagcaattgcagcgctaggaatttggcatccttcaactgtagttgataataattggtttatagagtattacgctgaacaaggtattgatgttagaggattactgaatagtcttggttataaaaaccgttatcttatccgtgactcatctgatacaacactgacaatgtcagttgcagcttctaataatgctatccgacaactcggttgtcaggctaatgatctggatttagttgtatttgcttcacagacaccagaatatcttattccttcaacagcgctcaaaatacatcatgccattggaggcggggaaagagcctaggcgtttgacattaatgcaaattgtgcagggctattagtagcggtagaaacggtttccagagtaatgatggtgcacccttcctgtcagcttgcactagttgtaggtggggattatcttggcgctcacagtagtcattcacctgtctatcattcatgtttttctgaggctgctgttgctgttattcttcataaaactgaacaaggaaatggctttatagattcagaaaatcggatacaaacttcagtaattaacaattcactttttccagagtgtggattatctaatattcatcaacataatatttcagcacaagtgaaattcacaccttttgatgattccatttgtatcgatgttgcagtcggatcaatacaattattactttcacgaaataatttaattattgaagatattaagggatttatgttttcacagttttctataagtaacattaggctactttgtaaagtccttggcgtggatcagagtaaggcattatttattggtgataagtatggttatactgcgactaatagtccatttgttgcactttatgaagcgttggaaaggaaagaaattgcacgaggtgacttaatcgttttttggtcggttggtgctggttggcaaagtaccgctattttgatggagtattaaatgatgcaatactctttgtctttcaaactactgctatgttatagctcaaactaatatttggctgttattaaatttgtctcggtaattatctataggtgtaatactgagggtggttgctttcatagtagtttgttatggttactattgagagaaaattgattataaagcacaagcaatcatcaaatcctcttttatatgctaaagacattccagcttattgttcaagttagacctattcgccctgaacatgaccatttatatacattgatgtgtgttatataattttcgaccagaggaaactctacttgtgtaatcacccacccctacttgttgtgatggtcggggtaatatttctcaaaaaaggctcctgaaggggccttttttgatcctgatgatgagtagtgagtgaataaccattaatagatatttaggtttataatgatcgttggcagatttcacacctagggtctttcactagttttatttcgcgaaactgcattgtcatcgcatcaaacagtagaactctgcttcgagcaactttcccgtactgagtcagcagtttaattgtctccatagcctgtaatgagccgattgtacctacaagtggtgccatgacacccgcttcaacacaggtcaggctattttcaccgaataatcggctaagacaacggtaacagggctcttcctcatgataggtaaagactgacagttgcccttccattcgtatggcagccccggaaactaaggccgttttatgctggtaacacagacggttaagctgttcgcggatggcgacattatcggtacaatccagcacaacatcatgctggataatcaactgacttagagctggatcatctaataatccttcaaccggacggacagtaatatgcgggtttatctcccgcagtgtcagcgcagcggaatgaaccttagccataccaatacgctcatcacgatgcaggatttggcgctgtaaattagacagggaaacagtatcaaaatccaataatgtgattgttcccacccccgctgcggccagatattgggaagcggcacagccgagacctcccagaccgactattaacacgttggatgattttaatttttcctgaccgtcaaaatcgaaaccccgcaggacaatctgccgattgtaacgaagcatttctttatctgtgagttcactagtcatttctttaatcatttattgatttttcagcagctggttgaaaaattctatctgtactgtttcccccgctgcaacagagccgcgttccctttcaagtacaataaaacaattgccgagactatatgaactgaaaatatgggagccctgatgaccggttgtttttacttctaattcaccctgttcattcaatcccgcgatcccgcgttggaaatccagcctgccgggcgattttttcagcggtgtaaccactttggcattaagccgaagaggaggctgccatgaactgaagccggacaagtgtgcaatcagaggctgtactaactgatagaaggtcagaactgcggataccggattgcccggcaggccacaaaaccacgctttttccagcttgccgaaagcaaaaggtttaccgggtttaatggctaatttccagaagctaatctggcccatctcatctagaatctgtttagtgtaatcggcttcaccaacggaaacaccaccactgctgataaccagatcagcaaggtcattagcctgaataaaagcgtggcgcagggcatcaggatcatccggaataacaccgaggtcgataacttcacaatccagtttttccagcatcaggcgaacagcaaaacggtttgtgtcataaatttgtccggattgcagtggcttaccaatggcttgtagttcatcgccggtagaaaaaacagcaacttttaatttgcggaacacttcaacctttgcaatccccagcgaggcaagcagaggcaattgtgctgtagataacttagtgccttgtggcaggacagctgtattttgggcaatatcttcgccaatagtgcggatgttctgtccctgacgaaccggatgagtaaaccggatgcctgtttccgttgtttctgtgtgctcttgcataacaacggcatcggtacccgtggggatgggggcgccagtcataatgcggatgcaggtacctgcgggccattccccctgaaatggaacaccagccagcgctttcccggcctgcggtaaagtctgtgtttcgttcaaatcggcaaggcgaatggcgtaaccatccatcgctgagttatcaaaagggggaacattaattggggaaataatatctgtggcagtaatacggcctgctgagtgcatcaggcagattgtttcggtttcggagagagaggcagtctgggacagtagtttttctaacgcctgttcgagtgaaattaagcctgaggtataacaatgatccatgaaaactcccaatgtgcggcaaatagcatggtggcattatggcaaagatccttttaatgggaaattgttataccggatagattccagattactgctgaaggataaaagaaagcggtgcggattggctaataaaagatgtatatcatatccatgatttgctataactaaattacgacaattaaaacaaacgattacatgaaaatttaatcactatgagtaaccaaattacaacatctggtaataataactatctggctattcaaattgcattgagcggctttcttgctttagttgttgcgatgggaatagggcgctttaccttcacaccacaagatccctttagagca

SEQ ID NO: 54 - DNA, 6735 bp, Xenorhabdus sp.
tgtgctctaaagagcagccgatcagtttggctctttattactggctgcgtcatggttggaagatcaggcggcagaagatgaagttcaggctcagataacattattcgatgaatatttattgccgtggtgtgggcagttccttggaaaagttgaagctcatgctgtcagtggtttttatcggactctggctatgattacccgtgaggcattacaggcactacgtgaggagctggaagctgagtgacattgtcacttagctgaggctaattgcgttaattatcgataaaataagggcaaattatttatgaataatttgcccttattatttcaatgacaataaaaattatttatcagttaacccaataaccagttttccaggcttaatttccagtcccttagcgaattttgccgctgctgcttcggacttgcttttttccggattcagaacataaaccggatgagtatcaaaaaactcagttaacgaggtattcagataaggaatcaatgccttgatcggcccggctactttttcaggggtagtttgataatcgataatttccagccctttaacaaaaatagcccctttttccgcatcaaatacaggcttggccctgatagccaatgtcatatctgcctgtgttgaaccaaataatgttgaaatttcaacttttcccttgctggtcaggatgattttttccggatcctgacggcctatctgactacttaaatttcccagagaaacgttgaaatttgctatgccagcaatcccaatctctttctgataatgtactttctttaataaataatcattgagcaaactttcactgatgctgagatctttaaactggccgcaaccactgagtaaaccaatcagcactaatgctgcccctaataaaaattttttcatgccggctcctatatttatttttgctgggcagattctacaccattattcatattgttaatgtctactaatggttactggttcgatttttttctgattaaattggcgatgaagagcataaatggtgaacaagccgattaatcctaataaaacccacggcaattgaggcatattcaatgcatggccggtatcgtaaagccagccgccaccggtatagcccaatacaccaccgagcgccagccctaatcgactgaatcccatataactgccacgggctcttgggtctgccagaccagcgctgagggtttcccgggcaggctctgcagtaacagttcctaagtaaaacagggcaataagggcaaaaagcaggtgtaattggttaatccagccgataggaaacatgcaaaggctcattaaaaataagcctatcatcaggcgctgttccatgcggaaatgtttttcactccaccgggcgatagggtaaagcaatgtcagggaaataaccgcttcgatagcatacatccattttacggctgtgtggctgccggacatttcatggataataatcgggaacatcagcatcacttgtactgataaaataaaataccctgtcagggtcagcacataataaaagaagcggcgatctttaataacccgcgtcataccttctttgatgggggtgcggattgttgagatacgatatgcaggtaacaaccaggcatttgcaatagcagccagaacgaaaatcccggcacctatccagcacaccatattgaaattgtattgtaataaccagcttcctatcagtgcaccaatcacagcgcctgcgctgtcttgcatcaataacagtgaatagaaacgaccgcgttcatgtgggcgggttagtttaatgaccagcgcagcccgtggtggatcgaacaatgttccgcccaaaccagataaaatacaggaaaagattaatacccacggttcagaagctattgccatcaaagcgaagcctaatgcacgcagtaacattccacagacaatcatcggcttggcaccaaatttatcagcaatggcaccaccaaaaatgcccagcccttgctgaacaaactggcgagttcccagagcgaacccgacaatgacggccgcccaacccatttgctcgacgaaacggatcgaaattaatggaaaaacaacgaaaaatcctaaaacgactaataggttatcaagtaataaaaaatatttacctaaactgcgcgcctgtgaaaccaatgacatttcgcaccatcaatatatgagaaaataaaaatgaaatttctattattctgtacgcaatcctatttttaagatagaggatttatatatgatatttttttatcgtaaaataatgatattgacttctattagctataaattattgagtatctttttaaaataaatatcgggagaaggcatgtttggttatcggtctacatcgcctaaagttcgttttattacggacaggatgatcgtccgtctggtatatgagcgtgatgcttatcgtttggctgattattattcagaaaataaagattttcttaaaccgtgggagccgataagagatcggagtttttaccaaccttcgggctggacgaataagctgagttatgttgccgaattacaacggcaaaatgcgacatttaattttgtgttgttggatcctaatgagaacgaaattttaggtgtggcaaattttaccaatgttgtacgaggtgcatttcactcctgctatctgggttattcgctggcggaaaaattgcaagggcaggggtttatgtatgaagcattgcagccggctctttgttatatgcaaaatcaccagaaaatgcaccggattatggctaactatatgccgcataaccaacgaagtggaaatttgcttaaaaaactgaattttgagcaggaagggtatgcaaaaaaatacttaatgatagatggtgtctggcaggatcatgttctgacggcattaaccaacaatgattggtgaacgggaaagagcatacagggttaaaaataattaataaaaaggagatagccaatgtaggcagggtttttgtctgttaaactttgcctatcagtgctatctcatcggatcatattcggttccatagcatatctgatgacgttgctttacgctttcacgctcatttcatagaaatatacttattaaacaatatcatgaacttactaaaatcactggcagccgtcagttcaatgacgatgttttcccgcgttctgggtttcatccgtgatgctattattgcccgtatatttggtgcaggcgtagcaacagacgccttctttgttgcgttcaagttacctaatctattacgtcgtatttttgctgagggggctttttcacaggcttttgttcccattcttgccgaatacaaaaatcagcagggggatgaagcaactcgaacctttatcgcctatgtgtcgggtatgctgacgttgatcttagcgattgttactgtaattggaataattgctgcgccgtgggttatttatgtaaccgcgccgggctttgctgatacaccggataagtttacgttgactcgtgatttactcagaatcacattcccttatattttcttgatctctttggcatctttggcgggggcaatcctgaatacatggaaccgtttttcagtacctgcttttgcaccaactttgcttaatgtcagtatgatcttttttgcgttgttcgtggcaccttactgtaatcctcccgtgatggcgctaggatgggctgtggttgctggtggtattttgcaactggcttaccaactccctcatctgaaaaaaataggtatgttagtgctgcctcgggtttcttttcgtgatagtggtgtatggcgtgttatccgccagatgggaccggctattttgggggtatcagtcagccagatttctttgattatcaatacgatttttgcttcatttttggtttccggctctgtttcatggatgtattacgcagatcgattaatggaattaccttctggtgtcttaggggtcgcattaggaacgattttattgccttcattggcgaaaagtttttccagtggtaatcatgatgaataccggaaattgatggattgggggctacgtctttgctttttactggcattgccttgtgcagtggcattggggattttggctgaaccattaacagtatcactgtttcagtatggtaatttttctgcttttgatgcagccatgacacaacgggcattgatcgcctactgtttcggcttaatggggttgatcgttgttaaagttctggctcccggtttttattcccgtcaggatattaaaacaccggtcaagattgcgattgcaaccctgattttaactcagttaatgaaccttgcttttatcggtcctctgaaacatgcaggattagcgctttccattggtttagctgcttgtttcaatgcagtgatgctgtactggcaattgcgtaaacgtgagatatttaaaccattagcaggatggggagtattcttgcttaaattgctggtggccattgcagttatggttggcgttttgctggtaatgctatggtttatgccgaactgggagcagggtaatatggcaatgcgtttgttaagactgatggctgttgtagttgccggggcaggcagttattttgctgcattagctttattgggattccggttaaaggatttcgcacatcggggattacagtgattatttaatctattagtgtgtttaaatatcccgccgcaaacggcgggatatttttatagttcgatcacatccgctctacagtctgaatccccagagtatccagaccctgcttcagggtttttgccgtcagcaatgccagtttcaggcggctctgacgcaactctgcattttccgcattcaggattgggcagtgttcgtagaaaccggagaacaggccagccagatcatacaggtaagcacacatcacatgtggtgttccttcacgagctactgttgtgattgtttcttcaaattgcagaagacgggtagccagcgtttgctcgcgttcttcattcagtacaacaggcagtgtcaggctgctttcatcgatttcagcgcgtttgaaaatagaggagacacgggtatatgcatactgcatataaggagcagtattgccatcaaaggccagcatattatcccagtcaaatacatagtctgttgtgcggctcttggagagatctgcgtattttactgcaccaataccaactgcctcgataacttttttaagctcatcttccggcatatccgggtttttctcacggataagtgcatctgcacgttcaatagcttcatccagcaggtcggataatttcactgtaccgcctgcccgggttttgaatggtttgccatctttgcccagcatcatgccgaacatgtgatgttccagtgacatggattcagggatgtagccggctttgcgtacaattgtccaagcctgcattaaatgttggtgctgacgtgaatcgatgtaataaagcacacggtctgcattcaggacttcatgacggtatttggcacaggcgatatctgtcgttgtatagaggtagccgccatcttttttctggatgatcacgcccatcggttcgccttctttatttttgaattcgtcaaggtaaaccacagttgcgccatcgctttcaacagctatgccacgttgtttcaggtcagcaacgatccccggcagcatatcgttataaaggctttcacccatcacgtctttttcggtcagcgtgacgttcaggcggtcataagttgcctgattctgtgacatggttatttcaaccaatttacgccacatattgcggcaatattcatcaccgccttgtagttttacaacatagccgcgggcgcgaatggcaaattcttcgtcttcgtcataatttttcttggcggcgcgatagaattcttccaaatcttctaatgccatatcactggcattttcattttgtactttttccagataggcgataagcatgccgaactgagtgccccagtcgccaaggtggttagcacgaataactttatggccgaggaattcaagggtacgcgctgcagcatcaccgatgatggttgagcgaatatgaccgatatgcatttgtttagcgacattaggagcagaataatcgataacgatagtttgtggttctacaggagatacccccagtttttctgctgacagcgcgttttctacatttgtggcaacccattctttatcaaggaagatattgataaaccccggacctgcgatttcgattttgctggcaattccttgcagatccagcaaattgacaactttttctgccagttgtcgtggtggcataccaacttttttcgctgccgccatgacaccatttgcctgatagtcaccaaattgagcttttgcagattgacgaacgtgagcctcactatcggctggagcaccagctgcaatcagcgcactactgattttttctgaaagaatagcctgtatattcacagtgttaccttaaattacgtgccaaaactacacatttttataatgaagcattttctggcatgcgggttatgagaaaataacggggtttataccatattcaataccctgcatgctactatcagccccggttggctagggcaaacgggtctaaattgaacagttagttcagtgatgtgccttcagtacataaaggtaggaacattgatgatcgtttgtgatttacaatccgttttctgtcaatgataaccgtagaaaccgtcatgaaagcaaccaccctcagcaatacctttggaca

SEQ ID NO: 55 - DNA, 6040 bp, Xenorhabdus sp.
gtagttatcaataccataccccaaaatattcagccgtcagaaaaaatttgggaatggttcgggtatgtattgattgccaatctgattttaattattccattaatctggcttgctgcggactggagtttacgcccgattaaattactcatcactcagatacgctccctggaaaaaggtgaacggcaagagttagatgaaaatccaccagctgaattaaaaggcctgattaagaacctgaacgccttactggataatgagcgccaacgctataaaaaatatcgaacaacattatcagacctgacgcatagcctgaaaactcctctggccgtgcttcaatctacgctgcgctctctacgctcaaataagcaaatgaccattaagcaggctgaacccgtcatgcttgaacagattgacaggatttctcaacaaatcggttattatttacatcgggccaatatatacaacgatcataacctcattctgaaaaaaatattttccgtcccaactctgcttgatagcctgaccaatgcactgataaaagtttatcaacacaaagggatcaatgttaccttagatatttcgcctgaattaacctggctgggtgaaaagaatgattttctggaagtaatggggaatattctggagaatgcctgtaaatattgtctggagtttgttcatgttactgccatgatgggcgagaattacctcaccatcattgttgatgatgacggacccggtgttccccctaataaacgtcatatcgttttcgaacgtgggttaagagccgatacactgcgtccggggcaaggattgggattgtcgatcgcctctgaaattgtagaacaatatgacggtaatatcagcatcgataatagccatctgggaggcgcaaaagtcagtgtgactttccgcaaccagcaaatcacctaaaatctgtatcaacagcttatcctctcttctggatacaaaatggctatcacttaatcagcagcagggatactcacaataaatacagaatgggagcggcctcgaaatatttcatccgaatctgataactctattgactatccgttataatgacctgaaattttcttgtcactcaggatatcaccatgaattatcagctgaatctggattggcaggcgttcttgcagaatcactggcaaaaacgtccattgctaatcaaacagggtttccagcaatttaccgacccactttctcccgatgagctggcgggactggcgatggaaaatgaaattgacagtcgtttagtcagccataaaaaagatcgctgggaagtttctcatgggccatttgaaagttacgatcatttaggcgaccaaaactggtcgttactcgtacaagctgttaaccactggcatcacccctcttctgcccttatgaagccattccgtgtgctttcagactggagaatggatgatttgatggtttctttctccgttccgggtggcggtgtcggtccgcatcttgatcaatatgatgtatttatcattcaaggtgaaggacgcaggcgctggcgtgtcggggacaagatcccaatgaaacagcattgccctcatcctgatttgttacaggttgagccttttgaagccattattgatgaagagatgctacccggagacattctctatattccacccggttttccacatgaaggatatgccattgaaccatcactgaattattcagtcggtttccgtgcgccaaatgcccgtgagctgttcagtggttttgccgattatgttctggcaaatgaattgggtagccatcgttacagtgaccctgatttggcattccgtgataatcctgcactgatccagccaaacgaactggcaactctgcgtaccatgatgcaggatttactggaacagccggaaacgttccaaaactggtttggggaatttatctctcagtcacgccatgagctggatatcgcgccaccagaacctccatatgaaagtgatgagatttatgatctgctcaaacagggtgaaagcctgaatcgtttgaatggactacgtgtattgcgtgtgggtgataattgcttcgttaatggcgaattgatggatacatctcatttgcaggcagctgatgcactttgccagtatgatactgtcactgcagatattctgggtgatgctattgatgatgttcagtttatcagtctgcttactgctctggtgaacagtggttattggtattttaatgattaaccaccgcacagctgaatgcggcaggttttaaaccctattccggacaacctgaatgtttgccccagtcacataactgacaacgtagctggggcaaatctctcattcagacatctgatgaagcagtgactgaacatactgattaactatttgactagcattgccataatgtttttcatcaaacatgctctcaacctgactgggttccagattaagctcaacagtatgggcacccgataatttcgcttcatgtacaaaccccgcagcaggatacacatgaccggaagtgccaatggcaataaaaatatccgcctcagataaagcggaataaatttgttccatccccaaaggcatttcgccaaaccacacaacgtgagggcgcagtaacgaaggaaactgacaacagtgacatcgatcatccactgtcaggtgagatgtccattcaataacctgcccggactgacagcagcgcaccttcagtagttcgccatgcatatggagaacacgcttgctccccgcacgctcatgcagattatcaatattctgtgtgaccagcaggaaattatcgcctatttgttgttcaagttcggctaaagcatagtgtgcggcgttgggcttaatttccgcctgctgtagatgctctcttcgcgcattatagaatgcctgaactaattcagggtcacgtttgaatccttccggtgtcgcaatatcttcaacacgatgttcttcccatagtccatcagaagaacgaaacgttctaattcccgattcagcggaaatacccgctccggtcagtactaccacatggggtttctttattttatttgccacacggatatccctgtaaaaaatttgccgatgaaacctctgattccgtagtcgcctactcttacggaatttactgagccgatgaataacacgcatttaaacgtctccgccgaataacccttttatacacttagtctttcaagttgccgctgtgttgactgggttctttcccccggccatactgttatctatgttctcggggggattactcactcgtcaccacgaggtaacctgaaattcatagggtatagaactatttcctcagtttctgttcacttaccacgactttattcatggtgtgttcagctcatcacttctgctcagttcactccgtaagatagcgcgcttaagtgatatagtgaatactccggaatatcattgaccactcaaaatccgcgctggatcaagtttactggcccgacgagccggataccaactggctaacaagctcaggatcagtgccgttaacaaaacatagaaaatatccatggtatgtaattctgacggcagaaaatcaatgaaatagatatcaccggaaagaaattgatgcccggacagcttctctatccatttaataatagctgtcaaattaagcgccataaaaattccgacaatagcgccaataatactgccaaccattccggtcaataatccataccacaagaaaattgacctgatatggccatccttagcccccagtgtacgcaaaatagcaatatcactgctcttatctttaaccgccataatcagcgttgaaacgatattaaaacaggctaccccaatgactaaaatcatggctaagtacatgataccccgtatcatctggatatcgttgtacatataaccgtaatctttcagccatgtactgatatagacatacctgcctgttgcattaccggccgctataacccgcttctctgctgcaaaaacatcgtctgctttaatagcaacgccggtaatagcatcgccataatccagatactgttgtgcatcagataacggaaccaaagccagacggtgatccaacatgccacttaactgaaaaataccggtaacttgtaaacgtattcgtttaggctgtaataatttcaggcttggatcgctgtttgggatcattactgtcagccaatcaccctgtttcacattcagtgaatttgcgactccctgccccagaatgacctgatgtttgcccgcctgaaatgtccgccatgcaccatcacggacaaatttatataaggtactgacttcagcttcagtctcaggatcaacaccacgaacctgaacagcatgaagtttatctcctcgttccatcagcccggtgaattcaatataaggagaagctcctgcaatgcccggagtttgtctgatttgtttaagcgctgatttccagtgctggaaaggctgttctaccgtataaatctgaccatgaggaacaacagaaagtatccggtttttaagttcgcgctcaaaaccattcattgcactcaaaccgatgatcagcacagcaacacccagcatgatccccagtgttgaaatgactgataccaaagataccattcccgcgcgacgccgcccctgactgaagcgaattgcagtaagtaatgcaagaggcagatttgccattacactccccccgtcagggttaattcatcctgtaaatacccatcacgcatttctacctgacgcgccagcctgtcagccaatttcagatcatgagtcacaactaaaaatgccgtgccctgctgttgattcaagttctttaacagctcaaaaatgctgtccgcgttacgttggtcaagattacctgtcggctcatctgccaataccagtgaaggttcgttcaccagtgcacgggcaatagccacccgttggcgttcacctcctgataattcagaaggccgatggtgtgcccgcttttccagcccgactgccgccaacatatcccgtgctttttgttcagcctgcttcttccccccaagcagccttttactgccgatcaatagcggcatagcaacattttctaatgcattaaaatcaggcagcagatggtgaaactggtaaataaaaccaatttctctgttccgtaattctgcccgaccggaagccgacatattgttaagtgattctcccttgaaaatcacttcaccggaggttggtgaatccagccctcctaataagtgcaacagagtacttttacctgaaccggaactgccgacaatcgccatcatttctccttgctgcatggaaaatgtgacgttttttaatacctcggtggaaacctgcccttcctgatattttttatacaaatgatggcatagcaataaaggttgattactcataacgtaaagcctcagcaggttgggtggcagcggcgcgccaggaaggatataaagtagataatagagagattaacatggcactgacggcaataatcgccacctgagtgggttcaatggcaacaggtaattgaataccttctgtcagcaggccgataacaggcattaagttattcagttgactagaaagcagtattcctaaccccgttcccaataaagcaccaataatgcctgctccggctccctgaatcatgaaaatggtcatcacttgccgacgggttaacccttgtgtctgcaaaatagcaatctcaccctgtttttccatcactaataaagaaagagaagtgataatattgaaagcagcaactgcaatgattaggctaagcaataaccccatcatatttttttccatacgtactgcctgaaaaaactcccccttacgttcacgccagtctttccagaccaagcctttcggcagcggctgctgacttaactcatctacctttaatggttcagtgagaaataaacgccagccggtaatattattaatgggatagcgtaaaagtcgggcggcatcctgctgattaaccagcatttcagtgtcatcaacttcgctgttggcaaaaaatgtcccggctactgtaa

SEQ ID NO: 56 - DNA, 8390 bp, Xenorhabdus sp.
  unsure (1)..(8390): unsure at all n locations
gctctcaagaaaattgacgcaaaaccataagtgataacagccgtttaattttcctgattgtgtcaaccattctatgggtaaccgccagagaatactaagtctattttttattttgtgtaaagatagaataaggaaaaacgtcatgaaggtattgatagcaaaaaatgaggtgggtacaaagcatcatagtcattatattgaaaacgcaatacatcgcttggcagataaattaattgaacgggatgttgaagttgttattgcggactcttttgatgatagctatacgataattgctgctaatgagcccattgattgtttaatggtcagttgtgcattgatggatgaagatttatatcagcagatccaaaaattactgaataagctatttgagcgtcaggaagatgtaccggtatttttattaagtgatcgggaaaaggcagtctttttactggatcatgcgatgttggaacaattaactgaattcgcatggatacttgaagattcctcagattttattacgggcagggctattgccgcgatgcaccgttatcgtcagcaattattgccgccattaatgtcagctttgatgaattacagaaaaatctatgaatattcatgggcggcacccgggcatcaggcaggagtagggtttaataaaacgcctgttggtcgtatttaccatgattattatggagaaaatctttttcgctctgatatgggaattgaacgatcttctttgggatcattgctggatcacaccggagcgttcggcgagagtgaaagaaatacagccagagtgtttggtgccgatcattcgtattctgttgtagtcggaacatcaggttctaaccgaactattatgcaggcctgtatgacagaagatgatatcgttcttattgaccgtaactgtcataaatccattgaacaggggcttattctgacaggcgcaaagccggtttatatgctaccgagccgtaatcgatacggtattatcggcccgatttatccgcaggaaatggagacaaaaacactccagaaaaagctgaaacagaacccgctgaccaaagatatggtgaagaaaaagcctgtctatactgtggtgacaaactgtacttatgatggtgtttgctataacgccaaacatgtacaaaacctgctggataaaagcgttgatagaattcattttgatgaagcatggtatggttatgcccgttttaatcctatctatcatgatcattatgccatgcggggtgaccccaaaacacataaagggccaaccgtttttgctacacattcatcccataaactcttgaatgcactatcacaggcctcttttatccatgtgcgagatggccgtaatccgatagatttttcaagatttaaccaagcctatatgatgcatgcgacaacgtcacctctgtatgcgatctgtgcttcaaatgatattgctacttcaatgatggacggtaacagtggttattcgcttactcaggaagttattgaagaagcagtcgattttcgtcaggcattagcacgtttgtatcgggatttcagtaaaaaaggtgactggttctttaaaccgtggaatcaggagcaagtgacagatcctgccacaggcaagaaaatgctttttgcggatgctccgcgggatttgctgaccacaaaacagagctgctggacgatgaaccctggtgacagttggcatgggtttgaagatttgccaaatgactggagtatgcttgatcccattaaagtcagtatcctcactccgggtatgggagacaacggtaagttattgaaacagggagtgccggcagcactggtgacagcatggttaagccagcatggtatagtgccgacgcgtaccacagatttccagatcatgttcctgttttcaatgggaattaccaaagggaaatggggcacattacttaataccctgctttcatttaaacatcattatgatgctaatacgcctttgagtaaggtatttcctgatttagtgcacgattatccggatgtctatagcacgtcaggagtaagagatctaggcgacaaaatgttcgcttatttacacaaaaataacccgggtgagaaactgaatcaggcatacgcgatactgcctgaagttgacatgatacccagggcagcctatcaggcgattgtgaccaatgatgtggaattagtcgcgctcgataaacttcctcatcgtattgctgcgaactcaattattccttatccacccggtattcctatgttgatgtcaggggaaaacttcggtgataaaaacagtccgcagattagctatctgcatgcattgcaaaaatgggatcatgaatttcccggctttgagcatgaaacggaagggacggaaatcattaatggtatctaccacgttatgtgcgtaaagcgtaagggaaaataaattatggctacagttgcggaatcaacaaaagtgggtttgatccccgttacattaatggtagcgggaaatatcatggggtcgggtgtttttctactgccggcgagtctagcggcaacaggaggaatagcgattcttggatggctggttaccatcattggtgccgtcggattatctattgtctatgccaagatctcttcactggatgatagcccgggcggttcttatgcttatgcgaggagagcattcggaccatttttaggttatcagactaacgttctttactggctagcctgctggattggtaatatcgcgatggttgtgattggagtaggttatatcagctactttttccccattctgaaagatccggttatttcaacatttacctgtatagcaatactgtggatatttgttttcctgaatattattggccctcatgttattacccgagttcaggcggtcgcgacaacgctggccctgatcccgattgtcgccgttgctgtatttggctggttttggttcaacggctcaacctatatggatgcctggaacgtcagcggcatggatacgtttagcgccattcaaagtactttaaacgtaacgttatggtcttttatcggtgttgaaagtgcctcagttgctgctggagtcgttaaaaatcccaaacgaaatgtaccgattgccacgattggtggcgtattaattgctgctgtgtgttatgtcttatccagtagtgtgattatgggaatgatcccgaatgcgaatctggttatttcatcttcgccatttggtgatgctgcccgtctggcgctgggggatacagctggcgcaatcgtggcattctgtgcagcagcaggctgtctggggtctctggggggatggacattgcttgccggtcagacggcaaaagccgcagctgatgatggtttatttcctaaagtctttgccaaagtgaacaaagccggaactccggtagtaggtctgttgatactgggtgttttaatgactgttgtccaattcagcagcatttctcctaatgcggcaaaagagttcagtctggtttcatctgtttcagtgatttttaccctgataccttatctgtatacttgtgctgcgttattgttacttggtcacggccattttggtcaggaaaaagggcgttatattgcgattacatttatcgcctttgtttactgtatctgggctgtagtgggtacaggtgcaaaagaagtcgtctggacgctggtggctatgatggtcatcacagccatgtacacctttaactacaatacgaaacacccggctccttttccgttagagaaaaaagattaacctaatttatatttaaaaaggtgctgcatatcagcaccttttttgttttattttttaggctaaactgatttcgctaatacaatatattgcaggctggggggatatagaaccccaatacatattgaaatccactgaatataactatttgtttattagtctggtttaaccctaagatgttgagttgttagacaactcacagtaagtagtaccggatcttaatatactcgtagaatcagctaatttaggtagttgagttaataggagcgtgcattatgtacagaactattttattaccggtagatatctctgaggatgaactgacaagcaaagctgttcactgcgcgcttaacatagccagagaaacaggtgctaaattacatattttacatgtattgcccatttcatccgcgattattaatgcttacgcattaggctatatggaaattaaagataaagcgactattactgctgagaaggatctgggtaagctggttgcttccattgatctacctgctgagcgtattagttactctattgcttttggttcaccaagagatgaaatcactgccatggctgatgagctgggcgctgatcttattgtgattggttcaaggcggccgaatattaccactcatttactggggtccaactctgcggcagtcgtcagatatgcgaagacgtccgtattggttgtgaggtagttatctgaattaactgttgcagcttagcggctattagtggtttttgttgtggtttcactaattgtaaaaacgtaatggtatagcggctataccccacgcatttcaagatgcagccagaaaaaagctacggcttggaaaacgatgggaaatattcgattacaggggagtaaatatgtataaaacgattttggttccaatagatattgctgaagatcacctgactgacaatgcactcaagcatgcggagtttttggcaaaaatttctgatgcaaaggttcatctgtttcactcggtgcctgatatttcgagattttctgtaagctatagctatcattatgatttactgagcgcctttgcgaaaaaagccattgcaaattccgaagaggaactcaagaaagttgtagaaaaaatcaacttgccgaaggataaagtatcgttttccgtcgcctttggttcaccaagagataaagtgctctctactgcccgtgaaatcggggctgatttgatcattgtcggttcacgcaggcctgatatttcaactcatctattgggttctaatgcatcggggatcgtggggtacgcgaatatttccgtattagttgttcgttaagttaagttgtaccaatgtttatttattaaccccgtcagatatttttatccggcggggttaatagttaatggcaataaatattattttttcttatgtttatggaagggtatactatgtcttattctactgttgtagtaagtgctttaaaatatatgcttgaaacagataatgttactacttcagatattgaaagctatttttctcatgattatattcaggtagccaatggcaatgagcttctcttcaatgatttcgtttcacatattaacgtattaaaagaagctttaataagtacgaatattaatatcttatccatagcggaaaatggaaataatgttcatacccatcacttagtcaaggtagttaaaaaagatggaactcatgcggaatttgaagtatttgccaggttcctgcttagcgaaggcaaaattacccactgctacgaactgaccagaaagatcatcggtgatgaacaggatgatgatttggggtataggaaataatatcagttattatcactttaatattgcttaacttttattatgtcaattttaagtattaattaatcttaacagattagcaataaagggagccattaattcaacgatggttccctttgcttatttttcagacatgtaatgtagtcattgttcatcagaaaatgaatttaaagtaatatctaactgatttttaccagcgatgataacctgaatttgtaagttgttttctgaagtattaattgtgttaattgtaacttcttcatttcctgaatattttttcacaacatccagtagctcgtgttcaagctgttcaattttagcgttaattgtcatttatggtattaaatattctaaagttgatttaattttacccaaataaattgagtgcaatagcttaataaacaaggtatttgagcctttaaagttgtaataaattaacttattcgatgaattaagtgatattagttttgacaaactaaaataacaaaccgatcccgtaataaaaattaagcaagattcgaaacataaaaaatgtgtcatttatttttctattcaggcaggataacagattggtattatacaacaagtaaataggtattattttgagcaataatattcgcctttgggcaaattatcttttattttttgggtttattgtatcttttaacgcatggagtgctccggccaactttgaacaggctaaagtcgaatcacgaaaantatgtttatgcggggctggaaaagtcaggtgttggtactttgtattgtggctgtgactggcaatgggttggtaaaagtggcggacgcgttgatttgccttcatgtaactatcatgtaaggtcgcagcagaaccgagctgaacgcatcgagtgggagcatattgtaccagcatgggtattcggtcatcagagacaatgctggcagaatggcgggagaaaaaactgcgttgatagtgacccggcatttcgcgtaatagaatcggatctgcataatctggccccttctattggcgaagtaaatggggatcgcagcaatttagggtatggaatggctgccaaaaatctgcccaatatgtatggcgcctgtagtagtaaagttgattttaaatcacgtttgtttgaaccgcgtgacaaagtgaaaggcatggttgccagagtttatttctatatgcacgaccgttataacctaacaatgtcgcgtcagcaacagcagttaatgatggcctgggatcggcaatatcctgtggaagcctgggagcgggaaagagataatcgtatcgcccggattatggggcaccacaatccattcgttactggaagcaaaaagtggcagttagggcataaaaattcaggtcagggggttaccgggcaagctgatagccgaaatgtaaatgctgtacggtcaatatccgaaccagtttcagtgactaaatcaacagctaaatctgctgcaaatgaagcgattaaagggaataaaaatagcatgatatatcatctttctcattgttcagggtataaaaccacttcagagaaaaatgcggtttattttcgttcagaatctgaagcccagaaagccgggtatcatttagccgctaattgtaaaaaataattaacactggctgagttgttattttatgtttttgttgctttgtgatttatcaatcaaaagttaaaaaatgtttcagtaaaatttaaattgttaccttgtcataaataaaagattgtcattatactgacatcatagtccgctaaatttagtctggttacgataaagcggatatgcgaggaatgccgatgacagatactgaaacaattacaattcagtcaggaagtgaaccggtgatgaagaccgaactgccaacagaaaggcggttgtctcatcaccggtttttttatgggtcttaatgagctgaaaagggagctcacttctattcaatataacgcagttattctatatcggtgatagaacaccgcaagtgtgaagccaacgataaggtgtgcgactatgagtagacaaaaagcagtgatgaaatctcgccgcgaagtcaggagaatgctaaaaaaagatatgcgccagtctcgttatcgcaatgataataacgttacctcattagtacagattggcggagtagaagcgattggaatggcacgtgaaaacagggatacctctgaaattcgcccacacaatgaagtgcagtaccgttacatgcgcgctatcaagaataaacaattggttattgctgatggtgaagcgggttgtggcaaaacgtttatcagtacagcaatggcagcagatgcactgattaataaagaggttgataaaatcatcgtgacacgtccggtattgcaggcggaagaagatctgggttatctgccgggcgatgtggcagaaaagtttgcgccatatttccgcccagtttatgaggtgttattaaaacgtatgggcgcatcgtttttgcaatactgtcttcgtcctgaaattggaaaagtcgagatagctccttttgcttatatgcgtggcaggacatttgaaaatgcgtttgtgatccttgatgaagcacaaaatgtgacgattaatcaaatgaaaatgtttttaacccggttgggagaaaacgtaactgttattgtgaatggaaaaattaaccagtgcgaattacccgattgcagcaaatcatggctggctgatgcccctggaacgttttttttatgatgaagcaattgggggtaattatttttctcaggaagattgtgtgcgctcttattatgtcaaaaaacattgcaagcttatagttcttcaaactaattgaaaataaagatggctca

SEQ ID NO: 57 - DNA, 4354 bp, Xenorhabdus sp.
gcttctaaacagtacgcaccgagtgatgctcgtcgatttgtgagccgtagtgaaggggcatcatccagccatgaaaatctaccatgctcgctccgcatgccagatgttgctcatacaatggggtgtgttttgacattatttccctctttccattcttgacatgaagatgttcttgatctgagtaaatacggcgtattaaccgacaaatattggatcatgaagcagaaaaacggttaacagcgcaaacgataccttggattagaagttatcactgaaaagggaaatgaaccataggataaattattaacactgtagtgatagcttcaaaaatgcttcactatcatgcaggatttttttctaatttattgtggaaggacgctaaaaactggcagtaaaatacaaaatatatactttttttattagaaacagactaaagcgcgaagcaaattgactgaatacactttagcctgatataaaaaaaactaatcctaaattgaaggcggcattagaatttttcaactgaatcggactgagtcatcaaccaatccggtagatcatgaaggcccattgcatgacgaagcaattgtggtttcactccgggtaaacggtcagccatagccagccctacatcacgaaccagctttttgacagggttatttccatcaaatagctggcgaaaaccctgcataccagccagcatgacagccgcactgtgtttacggcgacgctcataacggccaagatagagatattgcccgatatctttgccctcctgattcagccggttaagttcgccaatcagctctgctacatccataaagcccagattgactccctgaccggctaacggatgaatcgtatgtgctgcatcccctagtaaagctaaccgatgagcggcaaaattacgcgcataacgccccatcagaggaatagtttgccgctcactaaccagttcgcattgccccagacgcatatcaaaggtagcgctcaactgtcggttgaataactcagtatccattgctttgcgctgttttgctgcttcagcgggtaatgaccagacaatagagcataaatgtggatcagacagtggcaaaaaagcaagaatgccatccccatggaagacctgacgggcaacgccctgatggggttccgctgtatgaatggtagcgaccagtgcatgatgttcataatcccagaatgtcagtggaatatccgcatgctgacgcaaccatgagtgagcaccatccgcaccaaccaccagccgtgaagtcagcatgctttcatcagacagagtaataaaggcttcgttttctccccatgcaacatttctcagcgaagcaggagaataaacggtgatgtcagataaactttcaacctgttcccacaacgcctgcctgatcacccggttttcgatgatatgcccaaggtgactcagaccattttctgctgcactgaattgaatacgcccaaaactatccagatcccagacttccattccctgataaggactggcacgcattgccagtatcttctgccagacgccaagatgagttaataatctttcactggcagcattgatggcagaaacacgcagcgcatgctcatcattggtatgaaatttaccggttggcgggtgttcttcaacaatcgcgatacgcaagccgctaccctgtaaaccacaggccagcgcaaggccaaccatcccgcctcctgcgatcaccacatcaaatgactgcatgtttttatttcctcttaatctgacttactctgccgttgaatgatggttgacccacccgagtgtctggcgagccagtgttcctttcgtcaatggcaacatttccatcgccatcagcccaagatttctcccggccttcaacggaaaataatcattggcaaacagcctgaccaacccatcagtaataccaattgttacttctcgatcaatatcccgttgctgccgataacgcgccagaacgttataagaaccaatatctagcccttcaatcgcagcttcagaaatcacctgagccagcgccataacatcacgcatacccagattaaaaccttgcccagcaatcggatgcagcgtttgcgatgagttacctaccagtgccagacgatggctaatctgctgcccggcagtggataaagccaacggataacagtgtcgctgacctgtttccaacattttacccagtctccagccaaaggctttctgtaactggtgaagaaattcactatcttcccactgactgatttccggcagtttttctgatggatggcaccagaccagtgaactgcgcccttctgacattggcagcaatgctaacggaccatgcttggtaaaccgctcaaacgcccgtccctgaggtttttcagatgtcagaacattggcaataatggctgcctgaccataattttgtcgttgccacggaatatgacaggcactggccacagtggactggcttccgtctgctgctaccagaagttttcctgtcagtttttcaccgttatccaaagtaatggagacagaagagtcgaaacgctcaacagaattcactttcgccggacagtaaagccggatattcggtgcctgttttaataaaccaaataaacgacttccggcattgtgcaattcaatcacgttgcccaatgccggaatgttatagtcatccgctcggatattcacaaaaccgctatgaccgcgatcactgacatgaacgtgagtaattggcgtcacacaatctttcagggcagaccagatgcctatctggtttaaacgctgacatgtgccataagctaaggcaattgcccttgcatcaaaacccggatgttcctgtgccggctctgccgcttcaattaaagaaacctgcaactgcccccgacttaaagcagaaatggcaagtgccagtgttgcaccggccattcctcctcctacgataatcacgctcattatcacttcctgattactttccccttcgtttttcaaactgtctgctgactgctatacagtctgaaacccatcgggtatatgactctaactctattttgcctgtgccatcagcgcttcaatctcatcaggatctttaacgacatattcagttaaattttcattacctgattctgtaatcaaaatatcgtcttcaatacggatcccaattccccgatattccggcggtacatcagcatccggcgcgatatacagccccggttcaaccgtcagtaccatgcccggttccagaatacgatcacgatccacaccatagtgcccgacatcgtgaacatccagacccagccagtgacttaaaccatgcatgaaaaattggcgataagcattggtctcgatcaaatattcgacttcgccatgcaaaatgcccagcttaaccaattcttcaaccatgatacgcacaacctgccccgtcacttctcgcatgctggtccccggtttataaagctccagagagacattgatggatttcagcacaatgtcataaatttctcgctgagggcgggtaaatttaccattgaccggaaatgttcgcgtaatgtcacccgcataacctttatattcacaaccggcatcgataagcaccaaatcgccagctttcatacagcgatcattttctgtgtaatgcagaatgcaggcattttcgccggaaccaacaatggtgttataagcaggataacgtgcaccatgataggtaaattcatgatgaatttccgcttcaagctgatattcaaacatatccgggcgacaatgctgcatcgctctggtatgagcctgtgcactgattttccccgctttacgcatgatttccaattcagcttctgatttaaacagacgcatttcatgcaaccacgggcgccagtcagctatgattgatggcacagtgagattacgacggctgtttttccgcaatttatccagggcactgaagactatctcgtccgcatattcaaattcgccctgggcatgataaaccacgtccagcccgttcagcagcaggtagagttgctcgtcaagagcatcaaaaggtaaagcacgatccacgcccagtttttccggcgcagcttcttgcccgagccggcgaccaaaccagatttccgccgtcaaatcacgcacccggttaaacaacacactgtgattatgagtttcatcacttttgatcaggataagaacagactctggttcattaaatccagttaaataaagaaaatcactatgttgacgataaggatattcactatctgaattgcgtgtcgcatgcggggctgcaaaaataatggccgcaaagaaaagtgccattttcgacaattatacctgacgacggggcagaatattcttgtttggtca

SEQ ID NO: 58 - DNA, 4492 bp, Xenorhabdus sp.
cattgactgcatgattatgtacaacagcatttaattcagggcgggcttcatagcaagaaagatggaagtgccattcgcttgaggggattttatctggttctgcttctcccgaataattaatgtagacaatttgttccggagttaacttttcatatgggaccccgctgggggtgataagaaatccatcttgataacgggcactgatgttaccagatgtgccttgatttaaacccagagcatttatcttaaggcaagtgtcgataattgcctgagcaatatgttttctactgatggtcataaaaaataatcattataaattatatggatataaatcaggaaagagcatgcgtaagtcttctgcgctggcatcacaaattccacgttctgtaatcaagccggtaattaattctgccggggtaacatcaaacgcataattcccgcaaagcgttccctgaggtgctgtattgacccaactgtattttccttcagccgtaatcccgtagacatgtgactgttcatcgcctgaacgttgttcaatggggatttcttttacgccatcccagacggtaaaatctagtgtcggtgatggtaacgcaacataaaatggtacctgatttgcttttgcagccagtgccttaaggtaagtgccaattttattacacacatcacctcttgcggttgtccggtctgtacctacgatacacagatccactttgccatgctgcattaaatgcccgcccgcattatcggcaattaaagtgtgtggtacaccatgcgaacctaactcaaaaaccgtcaatccaccctgattacgagggcgagtttcatcaacccagacatgaaccctgatacccgcatcatatgccatgtaaataggtgataatgcggtccccaatccacagttgccagccatccagcgttgcagtgagttaatatattcactacttcaccggctgattttcgggttgcaatttcctgtatgattttcaaaccattttcaccaatcttatggcacagctcgacatcttcatctgcaatttcattggcaatacgataagcagtttctacacgctgaacgggaggcgtgttttctagtgcctgatatgcacgattttaaattaatggcggttggccgggttttaactaaagtatcgtaagctatttgtagattttcattgctgctactttgacgcatcgccagtgccataccatatgcagcaactgcaccaattaaaggtgcacctcttacccacatatctttgatagctgttgcagcatcttgaaaggtattcaactgaatagtttttaattcaaaagggagtttggtctggtcaaaaatttcgacagtatacccatcgtcagcaagccaaacagagcgataatgggttccattaatcttcatctcggtttcttaaccttatgtcatatgatgtttaatctgtgaaaaattttggtacttatgcttgttgacaattaactcacgtgccagttttagtgcttgtttttcacaactggctcgtaatgtcgggtcatcaatctgtttgaaatcagcaacaccggcgaatccaataatgcggcggttaatttcaagcccggcatataccagagtttcttcgaataaattggagaaaaaatcatcctgggcagttttaaggaacgatgaattgaaagttccctgttggtagatggtgacaggataggcttctccggttgttttttcattccataattgacgaaaacggcgttcaaatatttcccacgttgtttcaagctgcatgaagagccatgattgataatcagcacattgctctatattctcccgcaaagcgggctgagcaaaataagccataaacagattgccgatataattgcctatatcaaatgccattgggcccataaagctaaattctggatcaattacttttgtggaatcaggtgtgaccataatggaacctgagtgaagatcaccatgcaaaagtgcctgcgtttcagtcatgaatttgtatttataccgcattgcagtttggatcatggcctgatcctgccagatggcatgaatatcattatcaagttgaggggaagtccagttgtttctttcagcattaaaatatggctctgtaaaaatcagatcttcagtgatcttacaaagctcatggttattggcaaaacggcttaccagttcttttttctctgtgctgtccatccctatatcagaggtatggaatagtgtatcagcaagaaaaatgccaatgtctttagctaaatgagggaatttttcaccagaaatcagtctattgcgtaagataatgtgtttatctaaatattccatcgcaaacaaagacatttcttcatcatagaaatagacatcgggtacatactgatgagcaaattttttttcttctaatagggcatggtattcgaaataggttcggacaagggaaagctgccatgattcaccagcagcccgaacgtaaggtaaggattgtttgaccacaatagttttttctgttccggcaacaataaaaactaaattcaggtttccatcacctacttcctgtatctgccaggtttcaggcaatcctccgagtgagatagtggcgggtaaatttttcgcaagataatgtggtaacgactcacaggtctgggggatatactcagtaggaacataaacagacattatttttcatcctgataatatcatgaaagaaagttcataaaatgaacagggataacacattttgcggtaatggatttttactgttgttaactataagtatacaaaagtaaagtgtctgtgatgaaaataacgaatatggtctgataacaataagatatacccaagaaattccaaattgtatcgcaatgataaaagtacgacgaatgtgctagttcaggttttcggttttggtaatggaggaaggccatgagcggctctggcacgatcacaggcttcattgtaattgtcagtttcccatgcctgtgaaaattctcggcaaggggaagggcgtttgtcataaatagtacaggaaaccgaatgaccaactttgccctgtaagtttatacaacggggatgggactcgtttgtacctttcatgcagcacataaaatcgttcagtttctcagtggcagcaaccgggactgtacctcctccgtcctcagcttccgcccaataaaatgagaccctgaaaaatgcacagcaggcaccactgctgatgcagaaattattctgtgattgggtatttaatatatgatccataccagacgtctctatctgatgtttaagagccacattttgacgaagttattaactatagaaaattatcttttttgtataaggatatttaatgtatcacaaatagtcaatataaggtgtctttagtcatgaatttattttaattaactgatttttaatttaattaaattaaccttgcattcttattaatcaacagcagtcgagaatgttcattaggtatcatgaaaaaaatgtacatgtaagtgtacataatctacagtaagagttatgttggtttttgaggaaattaatatggcaattactgattcatggctccgttctaccaatggtaagccccaagaaaaaatggttaccaaatcagatagggatggactgtctgttcgtgtgacacccaaaggaaaaatcatttttcaactcaggtatcgttggaatggaaaaggggatcgaattgacattggaacctacccagcaaccagcttaaaagatgctcgtgactctgtgattttctatcgcggggagttggaacagaatcgcaatccaaaaatagtcaagcgtgttcgcaaagaagcggttttgaatgctgttacggtggaaaccattatcagggagtggtggacggcaaccatgcaaggttcaaaggtaagggcggacgatattttgcgctcttttgaaattcatgtattccctaaaattggcatgctacctcatgacgaagtgacgcttcatgtatggctttctttaattgaaagcatagctaaacaagtgccatcaattggcgatcgcatattaacatacaccaagactgcgcacagatgggcagttcggcgcggaatgacaaatttcacaccgttgtctgaggttgaattaaatgatttaagtggaaaaaaattggttctggtgctagggcgtgttgacgttttgttttcatcacttactcgacccacatgggtaaccagataatgataaatgccagtgctaatgtgctggcgtaatttctcgctaatttatcgtatcttgtggcgattgcacgaaaatgtttgattctggcaaatgcattttcgactaaatgacgataacgatataaatccttatcccactttttatccgaatttcggctattttttcggtagggaataaccgctgttgcaccttgttcttcaatataagttctcaatgcctgactatcgtatcccttgtcagcaacgacaaaatccgcgggcggtgattgctttagagcac

SEQ ID NO: 59 - DNA, 7213 bp, Xenorhabdus sp.
caattggaatacccgggcatcaataagcggatatttcatcaacagttcagccaattcagttaattttttttcctgttttttaaagcaagaagtaagtgactctattgaaaggtatttattcatattcgaacgctcacactcatattctagtggatttcctcattttagttacaacatactaattaaaacataaaaaatccagtgcaactatccagaacagaagaaaataaagccaaatagggaagttcatggcaaattatcttttaaattggttattgccaattatttctacattatgataaaagctaaatgtgtgattacttcgctatactattgggagagtttttgaaatcggttgggataaagcgctcttcatttttcaaagcgtatgagaaaaatttttattttttatggatgttattccggggtggtttgatatgaataaattaattaagccagtgaattcttttaataaaattattgatgtattattaccttcttctgaagaagttttatccgatttaccaacgcaaggttcattaattaaaattgagaatgaatttgccaagttctttttattagtgaagggatatgtgaatatacgcagaatagaagataatttaattatttcgactgttttttctccttatatcttagggttatctttttattctggctcagaaacctattattctatcgagcttggccctgattgtaagatataccaattgcctcgtgttagtgcattgaatgctataaaaaaacatgatctttaccgagagtggatgagagtgatttcatataaaatggcattcctctatgccagagatatgagtatattccgtcacggcgctaaagacatagtatgcagtctattatcccgtcttatcacgttacctgatgaatttagagaaaatatctcagctattaaatatatagaacagcgatgtacactttcgcgtagttgtattcagcgcatattagcttctttgaaaaaaagtaaaaatattgagattattgatggttatttagtaaaggttgtttttttgccaacagaatcatattattaataatcatatctatcttttttcaagtcacttttctatcggctgaacttaacaataatcgtttttataacatatgattatctatatttatctggattttgagagggttctgcctctcaaaatccactggatatattttgttatgctgctagtttattgagcttcatacctatataaaaagcactaattgttaatagtgaaataaaaatagcaacaccgttccattgatagtaaaaccaaaatactccacctaacgtccctgatatactcgaacccgcataataacagaacagataaagtgatgaggcctgtgctttggctcgtttagttctcgcgcctatccatccactggctacagtatgagcggcaaagaagcccattgtcaaaattgtcataccgaggaacaaagcccagagagaggaaaaaaccatgattaaattaccaatcagcatcatactgattgcaatgagtaacacctttcctcgtccatgcttactcagtaatgagccggcttttgttgcactgtaaacaccggtcagataaacaacagataataatcccactactgtctggctcaaatgatagggtgcatctaataaccgatagccaatatagttaaacattgtgataaagcttcccatcaataagaaagcttcggcgaataaaaggggtaaaccttgatcgcggaaatgtaattttagattaataaataatgtcttaggtttaagagaactggatttaaaatgttgggaggaaggaagcatcacccaaaatacgatagcggcaataagtgaaaatgaacctaataaaatgacagccagatgccaggaataataatctgtcattacaccgaatgctaatcgcccactcattccaccaaatgaatttccactgatatacagcccaatctattaggctgcgcacctcggatgaataccttcactgacatacgacatctcaaccgctgctacgccgcttaaagacaaacctactaaagcccggataattaaaaaaccataccagctggtagtcatgctgcttaaaagtgtaagtaaggaagcaaaaatcagagagatagctatcacatttctacgaccaattgcatcagacagagggccagtgatcaataatcccagtgataacatgccagtagataatgagagagctaagctgctgttagccggtgaaactgaaaactctttcgataagataggtaatataggctggatgaagtaaagcagggcaaaagttgctaacccgaccgcaaaaaatgacaaagtaacacgtaggtaggcagggtcgctgctctgtatgtagccactatgttccctataacgaacttctttttcagtatctcgtgtaacatcagtacttactgaatttctactgatatcagagattgtacccattctacttccttaaaatcccttcattcaggatttatactaagaggctaaaaaacgttaatgttttgttttataaaaaggttccggaacaagagtaggaagttgttaatattttgtctaatatattaataataacaaatgatattttaaacatatcaattgacggtagatgatgaatattaatatagaattaaggcacttacgttattttattgcggttgcagaagaactgcattttgggcgcgcagcagagcgactgaacatttcacagcctccactaagccagcagatccagtcccttgaagcaaatattaaagctaaattgctggcacgtaataatcgtacagttacccttacaccagctggtcatatgttcctcaaagaggcctatcagatattatctcaggttgatgctgcggcaactaaagcagccagaatgcagcagggtgaattaggcgaaatatcaatcggttttacatccaccacaccttttatgcataaagtggcacttagcttgcgccagtttcgggaacgttaccctgatgtattggttcacatgcatcagatgaacaccaaaactcagattgctccattgcagacaggtcggattgatatcgggatcatgcgcaatacgttattacctgataatttgcagcaccggctattgtttcgtgaacgttttatgcttgctgtgtacgatggccatccgttactggagtgtgtaaacgaagggatcacaataaaaatgttatctgaataccctttggttttttttgagcgagatgtgggaacagctctatatgatgaaattattactttgtttatcagtgccggagtatctccgatgatttcacaggaagcaggcgaagcgatgactatactttgccttgttgccgctggtttgggaattagtattgttacggaatcatttatacggatgaaaatcgatggggtgcaatatattccgttagctcatatgtcggttcactctgaagtttggctggttaaccataaaaaacggcagaacaatccggcagtagagcggttaactgaactattgctctcaaatatctacagctgacagagagtggttaaacaaacgtaacaatcacgagaaattcgtgtgaaagatcacatttttgttctaaacggatatcttcaaatttaaacaacgacataatcattactaattatttagaggtgtaaattaaatagcgggaggctcagtgagtatagacgtacaaccaagccatgttgaccaaatcaaacagattaatcttggtctggtttacggtctgatagatcaatatgggcctatttcacgtattgcactttctaaaaaatctcagttagcacctgccagtattacaaaaattacccgagaactgttcgatgctcacttagtgaaagaagttgaatttcctgatttagggtttcgtgggcgtccggcaatcgggttaaaaaccgacagcaaaggatggcaattcttatgtatacggattgataaagatagcactgtatttgggcttagggatttgggcaataacctcattgttgaagaagaattatccttagctgcttctgaaaaccactcttttctgaattgccttgctgagctgatcgataatttttttttccggcatcaatcccacctcgagcgtttaactgctatcagtgtgaccacaaacgggattattgacccgattaatggagttattcataactcaccgcattacagtatccagagtcttcctctcagcacatttttataccgacgtatcggcgtaccagtttttttgcagcatggtattaccgcatggacaatagctgaatctttatatggtgcagggaagggttgccagaacattattcaggttgttattgatgataacgttggtgttggcattatgatcgccgggaaaatgcttcatgcaggaaatcagagtgttgttgaaattgggcatactcaggtcgaacctgatggcgagcgttgctattgtggcaacacaggttgtttggaaaccgttgtcggcattaaaaatattttgctgaaagcacgagaactagccagccaataccctggttcattaatatctccggcaacacctctgacagtggaatttctttgtctggctgctaatcagggtgatcctctggcaacagagattatccggggtgtaggggaaagaatagggcacatcatggcgattatggtcaatatcttcaatcccgataaaatattgattggttcaccactgaacgaggcgaaacatattctttatcctgtcattcaacagaaaataacgcagctttcactccccggatacagccaaagagtcaatatagcagcgaccgcatttgccaattcaggaaccttaccggctgcatcattgatcaagcaatccttgtacagtggtcatttactgctcgaaattatgcaaggatagcgtacatcaggcaaaacattgagctaacgcaatccctatctcaaacacatcacctaaacttcaactcagttctctagttacagcaaagagtaaccagtctaatcggttattacggaaataaatttatgttaacgcgcttatttgttacaggcacggataccaatatcggtaaaacggttgttacccgcgcattactgcaattctttaatcatgaaaaggaaattgctgtagggtatgaacccataacaggagaaggaacttcggttgattttgctcaaatgactgattgtcttaataagctgagtcataaggcagatcgtgtgattgttgacggaaatggtggctggcgggcgttattacaagataactctttctattctgactgggttgtgaaagaaaaactgcccgtaattttagttgtaggaattcaaaccgggtgtgttaatcatgctattttgactgcacaatccattatcagtgatggcgtgccattgcttggttggatagccaatcgcattaatcccggtttagcacattacgctgaagtgctggaaaggttacgttgtcacataccagcgcctcaactgggtgaaattccttatctattaaggccagaagagcgggaattatctcattatctggatagcactgttatatcgacatttgatcatctgtgaatacaagaagggagtgaacacagcggcactcccttcttgtgatgtaattacttgtagcgatagattagtgagtggactggctttcgtcattagcgtgaggaagtcgggtataaataattttctgtttgccacgattacagctcccaacgactttctcatcactgttaaccgcttgatcattatcaataacttcaagcttaaagtctgcttgtttaacgccgttgttaataattttctgcgctatttgctctgtaagaacatcacatgtcacaactttatttgtcactacattggattgcagattttgatcttgtgatgcctgagttacaaaagatgtagctgcagtcattaaaatagccccggctagtaagaattttctcaccttatctccttgttttattggtatgggtatagcctatttaggattaatagggcgacctgtattcacatccagacagcgctttgtttttggttcccaataagcattcaggttgaagtttttcaaacaagcatcctcattgtcaacgtcattctcatattcttcaaatctcttttctttgcgtttattaattttattacgcaaatcacgttgtgcgttccactcttctctatcctgtctggcggtctctctggtcatagaattctcactaccgccattaataatgacgcagttatctgatgtgcaaggattagatctggatagcgcaggagtctgccaaaatagcagtaaaagaagggcaatggcagggaagtatttggctatcaagggattatgaacattcatgcattaacctctctcacaaagtattcattgaatgatacccgaaataattgaaacctcttttaaagagccgccttattattccgagtataaaataacacctataccattaccgattgattaacagattaaatttttaagctctgtgtatactcaggcctgcaaatgtctggcaaacaggcatcatttctaatgtattgatattgacgcgacccggcaggttagcaacccagaatacagcttctgcaacatcatccgcagtcagtgcatctgcgccttcataggttttattcactttttcaccatcacctttaaagcgaacctgagaaaactccgttcctccgaccaaacccggttcaatatctgtaacccgaactttcttcccttgtaaatcagcacgaagacccagactgaactgttttacaaatgctttggtagcaccgtaaacgttaccgcccgcatatggccagcttgctgcgacagaaccaatattaataatatgaccgtgattcatttttaccatgttaggtaataaggcgcgggtcatattcactaagccttttgtattggtatcaatcatagtttcccaatcatcagggttagcctgatgagcgggctccagccctaatgcaagaccggcattattcacgagaatatcgatattacgtaagttatcaggcaaatcctgcataactttctctattgcagcacggtccctcacatccagttgtataggataaaaattctcacctaattcttcccttaatttatccagacgttctttacgacgccctgtagctataacgatggaaccgtgttcaataaattttcgtgc

SEQ ID NO: 60 - DNA, 7266 bp, Xenorhabdus sp.
acgtaatgttatgggattaacaaatattgaagtcatgatcccgtttgtacgcacagtggcgcaggcaaaagccgttgtctcagagttggcatcacaaggcttgaagcgtggtgaaaatgggctgaaagtcattatgatgtgtgaaatcccatcaaatgcgttattagcagaacaatttctcgagcattttgatggtttctctatcggctcaaatgatatgactcaattggcattaggcttggatcgtgattcaggtgttgtctccgaattattcgatgagcgtaatgatgcggtgaaacaattactttctatggctattcaggcggccaagcgtcaggggaaatatgttggtatttgcggtcagggaccttcagatcacgaggattttgccgagtggttaatgaaagaaggaattgacagcttatcattaaatcctgatacagtggtgaaaacctgggtttctttagcaggaaataattaataaccatctaattcagacatgaattaaaaagcctgttaaaaatattttcaggcttttttctttataacacgatcttttttaatgcgagtggtattttatataattccaacgggaattttttccaaaaaaaagcctatcatgggctgacaggcaaagactacacacagcaatatatattacttcacacatctcagtttgtggcgtttacaaactaagactgctattcatgggaaacatagtttcgatgaaatgaatactaatttaataaatcagtttattcattaagaattctcttaataaatcagaattggaaaaacaaatttaaaaagcaactttctcgtaacaagttttttgaaattatttactggtggaatgaatgtgtattttttataggcactagataatacatttactttaatgataattgcgcggaaaaataattttccgcgctttgtgttttctcattacatatgagcttttttgaaatacagcttagtgacttctatttaatttcgggtttgggcacttcatccatccatgccagtaataggctgtaagaaacagccagtacaatcggtccgataaataaaccaattacgcccagcgaaagtatgccgccaatgacgccagtaagaattaaaaccataggtaaatcggcacccagacgaataaggaaaggccgaagaacaccatccatagtgaccagaattaaactccagaccactaaaattgttcccagagttgtttcgcctgtccagtaaagccagataatagacggaataagaactaacagaggccctaactgtgcaacgcagagtacaaacatcagaacagtcagaaccatagcatagggaatacctgcaattgctaacccaataccgcctgcgatggcctgcacaagggcagttacaactacaccaagggcaacggcgcggatagaacgggcagccaatataacaaccgcatcgccccgtttacctgctagtcggatagcgaaatggcgaattccctgcatcacgtgttcacctttccagtaaagtagaacactgaacagcaccattaaggtcagatggaataaaaaccggccggcattggcagcctgagcaaaaaccatgtggctgtttttccgatataaggcggaattttagccatgagcatattactgccctcagagatgatgttctgccatttaatatataaatcctgaccgacgaccggaattttatttagccattccaattgaggtaggtgcatattggatggagattttgcccattcaatgagtggcgcactgttttccagcaggttgctgaccaataatgcaatgggaataacaaataataaaatgagcagtaacgtcataatggaaactgctatccaacgttttccccataaacgtcgttgtattttttccattagtggccaagttgcgataaccaccattcctgaccagatgaaccctaaaacaaatggacttaaaacccaaaagctggtcgtaatgagcaataaaatgaagaacagtacaaatagcagtttgggtaaatcctgatgtggttgcgatttttccatgaaatgatttctctcggcgattaaaaatactgtcgggatccacaatggtaaataaatataacgttatttcacatgttgctcaaaactggcaaatattgtgatattgttaaaagcctgcctgttcagatccctgtctgaacccgacaatgaaggtagtatataactatagcaatgtggacaattattagaaaaggggcaatgagccaatgatcccacgtataccacaagccccccgagtcagtgaactggtaaaggaatatttgactgtactgaaggaagccggttttacaggcgatactgccagtaattacgctgatcgactcactatggcgacagataatagtatttatcagttgctaccacaagcggttatctttccccgctcaactgctgatgttgctctgttggcaagagttgcgggagaagagcgcttccattcgctgacatttaccccccggggaggcggaacgggtacgaatgggcaggcactcaacaatggcattgttgtggatatgtcccgttatatgaaaagaattctggaaattaacccggagcaagggtgggttaaagttgaagccggagttatcaaagatcagctcaatcaatatctaaagcctttcggctatttcttttctcctgaattatcaaccagtaaccgcgccacattgggtgggatgatcaataccgatgcatccggtcagggttcgctggtgtatggaaaaacgtcagatcatgtacttggtgtccgggctgttttactgggtggggaaatgtttgatacccgcccaatgaatacaacattggcggaatcgattgcgaaagaaaattcaaccgtcgggcatatctataaaaccgtactcgaacgctgtcgtgaacaacgggaattaattattgaaaagttcccaaaacttaatcggtttttgacggggtatgatttacgccatgtctatagcgatgatctgcaatcttttgacctgacacgcatcttaaccggctctgaaggcactctggcttttataaccgaagcaacgctggatattacgccgttgccaaaagtcaggcggcttgtaaatgtaaaatatgattcttttgattcagccctgcgtaacgctccattcatggttgaagctaaggcactttctgttgaaaccgtggattctaaagttctcaaccttgcacgggaagatatcatctggcactcagtaaaagagttgattactgatgtgcctgataaagatatgcaagggctgaatattgttgaattcagtggcaatgatgaacagcaaattgatcaacaggttagtacgctctgccagcgccttgatgaactgatggtgaacaatcaggccgggataatcggttaccagacctgccaccatttagatgatattgaacgcatttatgcgatgcggaaaaaatctgttggtttactcggtaatagtaaaggtgcagccaaacccattccatttgtggaagacacgtgtgttcctcctcagcaccttgctgattatatagctgaatttcgccagctcttagataaccatcagcttaattatggtatgttcggccatgtggatgctggtgttttacacgtgcggcctgcactggatatgtgcgatcctcagcaggaaatgctaatgaagcagatttctgatgaaatagttcatctgacggccaaatatggtggattgttatggggagaacacggaaaaggcttccgggcagaatatagccccgctttctttggtgaaaccttatatgatgaactgcgtcggattaaagccgcatttgatccgcttaacaggctgaatccgggaaaaatctgcccaccgatgggcattgatgctcccatgatgaaggttgatgcggccaagcgaggcacttttgacagaacgatccccgttaatgtcagaagtacattccgtggagcaatggagtgtaatggcaatggcctatgcttcaattttgacgttaaaagcccgatgtgtccttcaatgaaaatcagccagcatcggatccattcgcccaaagggagagctactcttgtcagggaatggctgcggcttttgacggaacagggtgttaaacctgaattactggagcatgggcttgatcagtcgcgtcccagcctgcgtggtctaattgaaaaaatacgttatagttggcaggcatggcggggcgagtatgatttttcacatgaagtaaaagaagcgatgtcaggctgtctggcctgcaaggcctgttcgacacaatgcccgattaaaattgatgtgccatcacttcgttcccgttttctggctttgtaccatagccgttatttacgtccgttgcgtgatcacatcgtcgctaacgttgaaggcagtactccattaatggcaaaagcaccccgcgtatttaatttcttcctgcggcagccatgggtgcaaaaactcagccagcaaattattggtatggctgatctacctcggctttcctatccgacattgcagcaacagctggctgggcactatgcggtgggtacgacactggaacagctcgaaaccttatcttcatctcagcgtaaacagcatgtacttattgttcaggatcctttcaccagttatcacgatgcaaaagtggtaactgattttgtgcgactggttgagaaactgggatatcagccagtgttgttaccgttttctccaaacggaaaagcgcaacacgtcaaaggtttcttaaataagtttgccaagacagcccggaaaacggctgattttctgaatcgtgcggcacaattggatattccgatggtgggtgtcgatccagccttagttctgtgttatcgggatgaatacagggatattctcggtgaacatcggggcaattttaatgtccaattagttcatgaatggctggttaatatattgccagaaattattccaacagaaaaacgtgacaatgtaacacctaatcatgactggtatctgtttgggcactgtacagaagtgacagcattacctaacagcggtaaacagtggagtgacatcttccaccattttggcggtaatttaaatagcgtcaacgtggggtgctgtggtatggctggaacgtatggtcacgaaaaaaagaatctcgaaaactcgcttggtatttaccggctttcatgggcgccagcattgagccactttgctttggagcattgcctcagcaccggttattcatgccgtagtcaggtgaagcgcatagaaggaaaagtacttaaacacccattacaagctttattggagatagtgtagtgattcagaaacaacacatttggaaacgtagcgcagatgtcagcatgctaaatcaattgagaaatgactgcatgctagaatatgttggaatagaaataacccgccttggtgatgatttccttgaaggcacaatgccggttgatcaacgaactaaacagccattcgggattttgcatggtggggcatctgtggtgttggctgaatcactgggttcacttgctggctatctttgctctgaaggtgaacagaaagttgtcggtgtagaaattaatgcaaatcatattaaagccgtgcgtgatggcatagttagaggagtctgcaaagcaatccatcttggacgttctcatcaggtctggcagattgatatttataacggacagcaacaattatgttgcacatctcgtttgactacagcgatattgtcctaatatttggtatataaaagcagtttgcttagtttttattgtggcaaaggggggtaaaatagccttatgtgaggctattaattaaccactggcattcaaattatcattgaggaagtgtgtatgaagcgatttttgacttttatcagtactttcttgatcggcatgttgtcgttctgcgggatagctaatatggcttatgcggtggaatatccgctaccacctgctaacagtagcctgattggtgagaattccatctatgtcgtacctaatgatggacttccactggaagccatagccgctaaataccaaataggtctgttggcgatgttagaagccaatcctggtgttgatccgtatttacctaaacccggaaccaagctggtcatcccatcacagatgttgcttcccaataccccccgtcagggtattgttattaatctggctgaaatgaggctctattattatccgaaagggaaagatagtgtcattgtgtatccaatcggcattgggcagcttgggcgcaatacaccaacaatgacaacctcagtcagccagcttattaaaaatccgacatggacgcctactacaaatattcgtaaggattatgcgagtcgagggattatcctgcctgctgtaatacctgccgggccagataatccaatgggtaattttgctttgcgtctgtcagccgggcgtggggaatatctgatacatggcactaatgccaattttggtattggcatgcgtgttagctccggttgtatacgtttacgtcctgatgacattaaagcgcttttccacaatgttccaagaggaacccgtgttcagattattaatgaaccgatcaaatatgcagtagagccggatggaaaacgctatgttgaagttcatcagcctttgtcaaaaacagaatcggatgatcctcagaccatgccaattaagcgcacggaagggttattaaaatttattggaaataagggaaccaatgttgttttggtcgatcaggaaattattcgtcgttctggaataccagtagcggtaaatgagaagggggcttcatccagccacagggaaaaagagatatcacacttagtggaggagcgggaagacgaaactctgaacgttcagcctgttaaactacccccgttgaatcagcccacaccagtctatcagacaaagtcctgacttaagttgtaggataattcaagatatacataaagaatggcgtacttagtaagtacgccattcttgaaaatgctacaaatttattttttgtaggaacgaacttggttgtcaagacgttggttagcacgagctgcttcgtctttagctgtttgtacatcagaacgcattgagccaacttcgttgctcagttggtcaactttggaacccaaagttagaacctgagaagaaagctggtcaacttttttagccgtgcttgtacaacctgctaacatcgtagaagcgagaattactgcgccaagtacaattttagtacgattcatcacaataccct

SEQ ID NO: 61 - DNA, 6175 bp, Xenorhabdus sp.
tttaacgtacaatcagcggcatttttagtcgtaacgtaagaattttccctcacgtttttacccgggtattgtaggagatgtcatgaaagtagcaaaagatttggtggtcagcttggcttatcaagtaagaacagaagatggtgttttagttgatgagtccccggtgagcgcaccgttagactatctgcatggccgtggttccctgatcagcggtttagagaaatcactggaaggtcgtgaggctggtgagcgctttgacgtaagcgttgaagctgacgatgcatatggtcagtatgatgaaaatctggttcagcgcgtaccaaaagacgtttttgttggcgttgaagaattagaagtgggtatgcgcttcctggctgacactgatatggggcctgtacctgttgaaattaccgctttagaaggcgatgacgttgttgttgatggtaaccacatgctggctggccagaacctgaaattcaacgttgaaattgttgcggttcgtgaagcaacagaagaagaactggctcacggtcacgtgcatggtcagggtggttgtggcgatcacgatcatcagcatgatcacgaaggccatagctgttgcggcggaagctgccactaattttggcaggaaaaagggaagctgacgggcttctcttttttacggtctgccccggactttgctgacaggtattgacgctggtcagtcatgcaggggcgtccccacgaagtcggctcttaatagtgcggagggggtgtttcttctgacattggtgcgataattgatgactggtgggttttcagtcgttcggccattaattttagctgctctttcagtctgtctatttctacctgctgctttctaacctcttggtttaattcttcaatggtcatttcctgataggtcagtttagtttccagttgctcaaatctttgttcaaagctggataattccattatttcccctctcatctttgtttgttgtttgttcatttaatttcatggtgaaatgattattctaaccgggttgatactataataccggtggcctgatgcctatacccttcgtctttcaagttgcctctttgttggctgcgctcactcaccccggtcacagtttttataaacatacggttagctatgctcccggggatgagttatcttgccgccgcgatgcaactcgaaatccagtgggtataaaccttttggcaaaggtgagggcagagaaaaaagaagaaaaaacggaataagtaaaaagcttttgacatcaatatgttgctaatctttttcaggccaatgtatagcaaatattgttattggttttagtaggcagttatagtacatgtggttgcatgatttttgctgatgacaaattcagtcaaatttattggagaatatgatgaaatcattcttaaaaacaactttgttagcaactacactggcaatgacattcggtgtaccttatgtaatggctaatgaagcaaaagccagcgacgaagtgaaattgaataaagctttcaagaccgcagaacagcagaattcttatgcgctgggagcttccattggtcgttatatggaaaaatctttagaggaacagaaagctctgggtatcgatctcgataaatctcaggttatgtctggctttggagacgcaataaataataaaagcaaactgaatgatagcgaaattcagcagatcctcagtgagtttgatgcaaaaatcagggcttctttacaagttaaaatggaaaaagaagcgagcgaaaatagcgaaaaaggaaataaattccgggaacagttcgctaaggaagccggagtagtcaaaactaaatcaggtcttttgtacaaagttgaacgtgaaggaacgggcaagactcctacattaaccgatactgtcatcgtgaactacaaaggttctttgattgacgggaatgtgtttgatagctcctatgaccggaaagaacccctgtctatccctctgaatagcgttatcacaggctggaaagaaggccttcaacacctgaaaaaaggtggaaaaatgaagctggttattccacctgagttagcttatggtaaaaatggtgttcagggaattccggttaactcaactctggtctttgaaattgaattgctggatattaaacctagcgcgaaaacaaaataattttcatcgtaattaatacgtgattttataacaggggctatcatgcccctgttttgttatgagaatatttacttcgacttgataagttataaagattaaatatagaaaatgagtttgaccacttattattttctacggtattaaatagaataactttctcatatatcaggtgtattcgaacactaagctgtgataaagccgaatggtctgcccagcgagaacttgacgataatttaatgtagttttaacgtcattattctggatagaatacagcgtattaaaaatgttttctgctaagtgcggttataataaatctctccctgatgttttagtgaggcggagtctaagcttgaaggatggtgtattacatgtctaccccgttattttctggtgaaaaaatatctggtgataaaatatccggtgataccagcgatattgatttactggaaaatcaaccgttcagtgaaacggatcatgaaatcttaaagtcttatgaagcggcagttgatggcctggctatgctgattggtgggcattgtgaaattgttcttcattcactggaagaccttaaatgttcagctgtcagaatagctaacggagagcataccggtcgtcaaatcggttctcctattaccgatctggcattgcggatgctgcacgatattactgatgaagactcttctgtttccagagcctacttcacaagggcgaaaagtggcgcattgatgaaatctgtcactattgctattcgcaatcgtcagcgtcgggttatcgggcttttgtgtatcaacatgaatcttgatgttcctttttctgaaattattcagacttttatccctgagaaaactcacgacgtttcttcaaacgtcaattttgcttcttccgtggatgatcttgttgctcagacactggaattcactatcgaagaagtgaatgctgatcgcaatgtttccaataatgccaaaaacaggcaggttgttctgaacctttatgagaagggcatttttgatatcaaagatgcgattaatcaggtcgctgaccgcctgaatatctccaagcatacggtatacctctatattcgccagtttaaaaacggtgaatgtgcacatccggagaagtaatgttgccactgtcttactgcttactggtaaccgggccggcatacgggactcagcaagccagtagtgcctatcagtttgctcaggcacttattgcctctggtcataaattgcatagcgtgtttttttatcgtgaaggtgtccagaacggtaatcagctgactgcacctgccaatgatgagattgatcttgtcagggcgtggcaatcattggctattcagcatcagtctgagctgtttatttgtgttgcagccgcgttacgacgcggtgttgtggatgaacagcaggcaaatgaactggatttgagttctgcaaatctcgccgatggttttgaactcaatggccttggttctttggctgaggccatgatgctgtgtgatcgcgtagtacaattttaagagtacgatggcgtaatggcacagggttaggggcataacaggaagacattcataatgaaaaaaatcgccttcatttttactgaggccccccacggctcttctgctggtagagaagggctggatgcactgcttgcaacatcagcactgacggagcaggtcggcgtattctttatttctgatggagtacttcagctgctgtccaaccagcagccggataaaatcctgtcacgtgactatatttcaacatttaagattttacctctgtatgacattgagaaatgctatatctgcctggaagatctgacggttagaggatttactccagaagatgattttattctggacgctgaatttctctcggctgcggcaatccggcaaatgctggcgggctacgatgttgtgttgaaattttaatctactttggagagatgacatgttatatactgttagatgctcaccttatcagaatgacttcaatgcaatacttggcttgatcactgatgcagatgatgtcctgatgctgcaaaatggggtattactgggtgttaatggcaatccctatttggctgagctgattcacacgggtgcgggtatctatgccttacaggaggatctggatgcccgggggcttacggagcgggtttcagagcatgtaaagatggtcaattacaatggctttgtcagtttaacggtgaaacatcagcaaagtttaagttggtaaatattccgcattttttccgcagatattgcctgtgatcattcagttaataaatcagtggcctgtgaactttttagtgcgctgacagaatactgacagataccaacatatagaaagactgtatatttcttgacacctcgtcaagtcagcaataaaattccgcgtcctctcgttttgtcatcatggctgacagagggtaaaatccgtgtttacgaagcaaaaaaaccaggagtttttttaataatggctactattaaccagctggttcgcaaatctcgtagctcgaaagttgtgaaaagcaacgttcctgctctggaagcttgcccgcaaaaacgtggcgtatgtactcgtgtatatactaccactccaaaaaaaccaaactcagcactgcgtaaagtatgccgtgttcgtttgactaacggtttcgaagtgacttcttacatcggtggtgaaggccacaacctgcaagagcactccgttatcctgatccgtggcggtcgtgttaaagacttgccaggtgtgcgttaccacactgttcgcggtgcactggactgttccggtgttaaagaccgtaaacaaggtcgttctaagtacggtgtgaagaagccaaaggcttaatgggtctccgttaagtaaggccaaacattgttcactttaaatgtcaaaataaactcgtagagttttggacaaccctgaaattcgaaacggagtatttccatgccacgtcgtcgtgtaattggtcaacgtaaaattctgccagatccaaagttcggatcagaactgctggccaaatttgtaaatatcctgatggtagacggtaaaaagtctgtcgcagaagcaatcgtatatggtgcgcttgagaccctggctcagcgttccggtaaagaacatctggaagcattcgagctggcactggataacgtgcgcccgactgtggaagttaaatcccgccgtgtaggtggttctacctatcaggttccagttgaagttcgtccggtccgtcgtaatgctctggcaatgcgttggatcgttgatgctgctcgtaaacgcggtgataagtctatggctctgcgcctggcgaatgaattatctgatgcggctgaaaacaaaggcgctgctgttaagaaacgtgaagacgttcaccgtatggcagatgctaacaaggcgttcgcacactaccgttggtaatccatttttttggaatccatcggcagtaatatgttctgggtagctgcggctgcccgttctccaaattgaagaacgcccacgagagaggaaaaaatggctcgtcaaacacctatagcacgttaccgtaatatcggtatcagtgcccacatcgacgccggtaaaaccacaactactgaacgtattctgttttacacaggtgtaaaccataagatcggtgaaactcacgaaggttcagcaacgatggactggatggagcaggagcaggagcgtggtattaccattacctccgcagcgactactgcattctggtctggtatggctaaacagtatgagccacaccgtatcaacatcatcgacaccccgggccacgttgacttcactatcgaagtagaacgttctatgcgtgttcttgatggtgcagtaatggtttactgtgcagttggtggtgttcagcctcagtctgaaaccgtatggcgtcaggctaacaaatataatgttccacgcatcgcgttcgttaacaaaatggaccgtatgggtgcgaacttcctgcgcgttgttgagcagatcaaaactcgtctggcagctaccccaa

SEQ ID NO: 62 - DNA, 7901 bp, Xenorhabdus sp.
ttccttcattgtgctctgctctaaagtcatggcagataatcaggcgataatgtctactcctccccggcttgaagccagttgctgaggggttagccggattgcggattcatgagttgccggtgcctgtgttgctgccagtgctctatggtttccagtatggctaccggtattgtcatgctgttgaggatcggcggcctgttcctgttgccagtttcctgatgtatcactacccacactgctttcagccaactgaatgccgttttccgccagtgagaggcgaaggttaggcagagcggcttccaaagcagcacgaacatgttgatgtgcagaaacaaaatgcagctgtgcctgattatcttcaacattcatgcggatatgcagggcacccagctcttgtggatgtaagcgtaattctgcctgttgcagcccgttccggttaaaaaacagtacctgctgattgagttgctgctgccactcttcactgccgaggtgagcgctcagcaaaggtgcgggagcattattcagctggatctgcccgttagcttgatggcctgtagcgagcaggggagcactgaacagattgtgtagtgtattggaagaagaagtttctacagaagctgaagccagtgctgttgctccttgtgttgatagaaacgcctttccgatatccccttttccgctaactgatgactctgcattttgctcagtgccgttagcggtggcttttacttttccggtagctggtaccagagccgcacgatttgtggctgaggctgtctgctgtgtagtaaaagaacggatatcgctatccaaatcattttcttcagccggatttgttgctatcagcgctatatcggctttagtctttttaccagatagttttctgtcggataatgtatcttcaagactgttttcagtgcgcagtaaatcatctgagctttctgaaccctcaccggccggacgatggttgattaatcccgccagctgaataggcatcgcgttgattaacatttcagcagacagaagatcatcctcttcggataaggtgaattctgtatcattgccggatgctaaaaagcctgaaacagaagatttatccagtctggcgacctgcccagtaacagtcagcgaagaagataacttttcttcatcccggttatcagtggaatatttctctccagattcgctattactgccatctgtgcgatttttagcggtctgaacagagtttttttgttctgcactgagaatctggccgaattcagtcacctgctctttaggggcgttactgcccggagaggagttcagtgcttgctgattttttcccacacttttttcaagtgttaaatcagtaggcaaaagagtgagattcattgtttcattctccgttgtgcaccacgttgtgcgtactcatccatttgtttttgctccatgcgattctggtgtaacttcaaactatgttctgcccgttgttgcagcgtatcaaacgcgttcagacgctgctgtttttcctgccattgcgacatagcctgctcaagccgttttttccattggttgagctgtaatcggtgttgctcgatggccatttccagggttttcataaactgctggtaattctgccaggtcgagctggacatgccgctgcttagtgtgtcgttcaaacgtgtacgatattcatcctgataactcattaacgccgtgagttgttgctccatttgctgatggctttgtcgtatctgtgccagttgggtcgcggctttttccgctgcgtcctgagcaagttcgcgcaaagtcacaagaggggagtgttgttgcatgtctatcctcagcgttttatacccttcgtctttcaggctgcctttggctgggcaaattcgtttctgatgaatttgtcattcccttgccgccaagatgcaacccgaaattcatcgggtatagttaagttgcggtcttaacttggtaataactgttgcagctgggcacatgctgcatcgtattcactgcgttcctcaatgttttgatgcaggaactgagccatatgcggatacaactcaattgccctgtccagcaaaggatcactaccggcagcgtaagcaccgacattaatcagatcccggttgcgctggtagctggaaagcagctgtttaaaatgttgcacccgtcgataatgggtattatcaatcagggatgtcatggcccggctgattgatgcttcaatatcgatagccggataatgcccggattcagccaaggcacgggacaggacaatatgaccgtccagaatagcccgtgctgaatcagcaatcgggtcctgctggtcatcaccttcagtcaggacggtataaaatgcagtgattgaaccgccatcactgacaccattacccgcccgttctaccaacgccggtaatttagcgaacacagaagggggataacccttggttgccggtggctcaccaattgccagcgcaatctcacgctgcgccatgctgtaacgggtaagagaatccataatcagcaacacatgcttcccgcgatcacgaaaatcttctgctatacgggttgcataggaagctccctgcattcgcagtagtggcgaaacgtcagcaggtgccgcaacaaccacggaacgcgcgcgtccttcttcacctaaaatattttcgatgaaatctttaacttcccggccacgttcaccaatcaggccgaccacaataacgtctgcctgcgtataacgggccatcatgccaaggagcacacttttaccgacaccagaaccggcaaataaccccattcgctgtccgcgcccgacagttagcagagcattaatggcacgtacacccacatccagtacatcactgatgggagtacgttgcagggggttgatggggggtgtggtcaagggggcgcgatatccggtatccggggcaggtaaaccatcgagagggcgacctgcaccatccagcaccctgccaagtaattccggccccagaggtaaacgccgtccgctacccgcttcttcaccataagcacgtgcatagacacgggcacccggcacaataccttcaagttcctccaaaggcattaacagcaatttttcaccattgaagccgacgacttcactttcgacttcttcaagggtgttgccattttgccgttcaataaggcaggttgctcccagtggcagatgtaaacctgtagcttcaagtaccagacccgtggcgcgggtcagacgtccgtaacgacgtactttcggcgttttttccagacgtttttccataccatctaatgtagccagccagcgcccaagtcttgcagtcatcacagttctcctgataccgccagacggcacatttcatgccagcgcgttgccagactggcatccagatcaccttcatcagcgctgaccttacagcctcccggatgcagtttattatctgcaaccagacgccagccatgcagagccagtatctcgcccagttgttgttcaaccagtgggatattttgcggatgaacacgcaattgaggcttgccactgaacatgggttcctgctgaataaattcacggatttggttcagcagggcagtgccgtcacacaccgccggctggccgagaatatggtgcgctgccgtcagggaaagctgcatcaggcgtgatgcaacaaccgtatccagaccatccagtgaatgactaaaatcattcagtagatctttccactgttcaataacaacctgttgttgttcctcggcttctttgagtccctgttcaaatccggctttccggccttcttcgacaccctgctcatatccacgggcatgaccttcagcaacaccttgttcgtgacccgcctgacgcgcctgttctttcagttcgtcgagtattcgggcctgctcctgtaaacgctcctgttcggtaagctcctgtatctcatccgatgattccagtttcgcttgtaatgtttcccacggagtcaattcacttggcagccatcgctgccagtttccattattcgaattatcagacataggtatcatcaccaccattcaggatcatttccccgttttcggccagacgacgaaccacaagcagaatggctttctgttcagcttctacctgagacatacgaaccggaccacgggttgccaggtcatcacgcataatttcagcagcacgctgcgacatattgttgaggaagtgatcgcgcagtgcctgatcgcagcctttcagtgcaaccaacagcgaatcggtagtaacttcctgcaacagacgctggatactgcggtcgtccacgccaatgaggttttcgaacaggaacatttcatcgatgattttctgtgccagttcgccgtcataggtacggacagcatcgataacgctctcttcctgctggctcttcatcaggttgataatttcagccgcagtacgaataccacccattttgctgcgtttcagattctgaccatccagcaggttgttcagaacttcggtcagctcggccagagcggctggctgaacaccaccaaaggtggcaatacgcagcatgacgtcattacgcagacgatcatcaaacatggcgagaatatctgccgcctgaccacggttcaggtgaaccagaatcgtggcaatgatctgcggatgttcatcgcggatcatgtcagccgctgcctgcggctccatgaagttgagtgtttcgataccggttgtggtatcgcgtgattcaaggatatcctcgagcaggctggaagcccgctcttcgcccagtgcttttaccagcacactgcgcagatagtcgttggcattgatgctcagagcagcgtactgctcagcatcttcctcaaactgggccataacttcagccagttgctggttggagacttgtttcatccccgccattgcaatacttaactgttgtacttcccgggagttcaggtgcttaaacacctcagccgcctgatcttctcccagagtcattaacatgatggcgcttttttctgttccggtcagactcattgttcgttactcatccattggcggatcaccagcgcaactacgcgaggatctttttccgcaagttcacggatacgctggctttgaagctcagcattgacacgctggcgagccaactgacggcgcactttttcatccatttcagcattggattcagtcgcaggcttattctgtttcttctgcgcttccagtgcagctttttccgcagcccgttttctggcaatttgcggcacgatcatcttacgccacagcagccatgcaaccagtgctaacagtaaccaacggcccagctccagtaatttctccagcaggacagggtgttgccagaacggcagtgtttctatcacttcggcggtattattgaacggtgtgttgacaacgttcaggctgtcgccacggtcggcagaaaagcccattgcctcacgggtcagtgactcaatctgggataactgctctggtgtcagtgcctgagtttccgggccattctcaccctgaacagtggcatagttgaccacaaccgcaacagagagacgctccacgccgccagcctgtaacagggtatggcggatagtgcgatccacttcatagttgatggtttcatcatgacgattattgcggttattactgatcatgcgctcatagctgttattgccattgcgcccctgagcagatttgtcgtcaccattacctttcggtttctcaattggcgcactcggtgcggcacttggctgattcgacagcgctcccggaacaccacctaccaacggcccgccactttgttcgctggcactggtctgtttagaacggactgctgcctgattcggtggctggttaggcttatattcttccgcagtttcttcacggcgggaaaaatcgacttgcgcggtgacctgagcatgaacattaccacgaccgacaacaggtgccagaatggtttcaatgcgatgctggaagcggttttcgacttcctgtatgtacttcaactgggtggtattcaaatcccgtccattggcatcggattgagtcagcaggcgtccggcctgatccacaatagtgacattgcttggcggcaatccggccacactgcttgaaaccatatggacaatggcattgatttgcccttcatccagagcacgaccctgcaataatcctactgttacggaagcagaaggtgatttttgctcacggacaaacagggaaggctttggcaatgccagatgaacgcgggcactttgcaccgggccgagagactcgatagtgcgtgccaactcaccttccagcgcacgctggtaattaacctgttcactgaactgactgatgccgaacttttctttatccaacaactcaaaacccgcagcgccaccttttggtaagccctgttgtgccagtttcagcctgatttcatgtaccttatcagtcggtatcatgatggcggcgccgttttcggcaaaccggtaagggacattcatttgagttaattgtgtaacgatctcgccgccatccttatcactcagattgctgtaaagcacccgataatcagggctgcgcaaccagagaaaaagggcgacgataatagcgatggcagcagagccagcaactaataatggaacttttggatcagcttttatcctgttgatgatagcgctgaaacccttctgtggattctcagcgtcggttgttgctgcactcatagacgatccttgccttgctggtcaacatgaatactaaaagcgtggcgtaacaaaacagactccccatacgcaagcgaaaaaactatctctatacctttcattttattacaaattgcctctttgctgactgcatccgcctcagtgacatcgttatctgtgtcaccgggaattgcttaatttgccgccgtgatgcaacttaaatacaatagatataattaatcccgtcattattcgctgttcacacatcttttaatggcacaataagcttcgaatttttacgttaattacccgctttagtttgaaagggctatgttacggtggcagcctgaaaaaactgccaaccagcccacggctaatatggcatttaatcacgtaatcaatagggtgatttaacacgaggtttttatgtcaattcaggcaattgaaggtgtactgcaacagatgcaggcgcaggcattacaggcagcaagtattgccaagcctatgccggtaaaaggaggctttgccagccagctcaccgccgcggtagaaaaaataaatctgtcccgcgtagaagcaactaaacaggcacaggatttcacactgggcacaccgggcgtggaactgaatgacgtgatggtcaatatgcagaaagccactatttcactgcaaatgggtattcaggtcagaaacaagctggtcagtgcgtaccacgaagtgatgaatatgcaggtttagtggtttatctatttgacttatagttagcgattcatgctagttgattgtttggggtatatatggggcaatcgtgagtttttcgtttaatagcttaatgtgatcatcgctattttcactcatccatgcaccgtaaacgttatgaaccatttgagctgatacatgccccatttgagtggcaataaatgaaggattggcgccagcagataacatccaacaggcataagtatgtcgtgtttagtatgattttctgtgcctgacgcctgatctttttatcagtgatttctaaattttgtccaaatccttccggtgaatagaactgagtttttaatagtatttcactgtaggtttcgagattgagctagcgagtaatgttcataatttttagttttaaattggtgaggaatacatggaaagttttaaaactgatattgatattaaaaagttagtgattgccattgttgttatggctgttgtgtttatcgcaggttagg

SEQ ID NO: 63 - DNA, 8645 bp, Xenorhabdus sp.
aaaaaaaagtatagatgactttacatacgaggcaacgccaaaagtcactatagtaaccactccacgtacagatgctgtttgtctgagtagattatattttcagtcaccagtacacgatttttgggatgattgggacaatgcgagccctttattcagattcacagatatctacggaaataaatcgtatctaatagcaatcgagatgcaggattatgaaaactttactatgaaagattggaaaccataattgtgttttggcataaagtgcatatcacacaacctgtggcctgaaataaagcaggtcacaggtttttaattaaatagactcttcatctttccagttgattctttgctgaatttattcagcagaatgtaaatccacccataacaactggctatcagtgactaacggcttaatcacaccttcgcgtatctcatcaggcaaccaccatgcaccttgcccaaaggccagctgaacattatttgtacccgttatttcccagcgccctttcaggacataaagcacaccgctgtgagatgttggtaatttgcgctcatcagtcacaaaagaaatttcagaaacccactcagaattacgggtcatgatattgaaacactgaacagaaccatccaacagttcagcattacccggagtattaccggaaaaatggaagggagctattttttgtaccagttcatgttcaaggaacccaggactggttaaacgaagccccttaccttttaataatacaattgaacgatcaatccccgggaagtgccccaataccccatttttatggatagatgtgaagcaggcacgccaggcaaagtcatcagcattcggccaacaaacaatatctcttacttccccgatgcccccaacccattgctctcttggtaactctgtataatcgaaacacttcattctcatgctcctatttttccactgcttttatattttatttacacctaaagaggcaatttatgtcgaattgtaaacttctcaaagaattttatatatcgcaatagaaaaacagttaaaatgtgactaattacccgtattcctttaacaacatacgacacaaacttcctaatgttttcatagcagcagtctgagtttcgttccatacaaacgaagtattcagacggaaagcatgatcaaactgagaactggtagaaaacatactgccgggcgcaatactgatatttttggccagcgccagctgatacagtcgccttgcattgaaaggcggttcaaattccagccagataaaatacccgccccgtgtactgttaactttgacagaatcgggaaaatactcactcactgcccgtagcatctgaatctgcctttgctccagttggcgccgtagccgtcgtatatggttatcatatcccccctgagacaagtattcagcaatcgccagttgagtcgggatgctggctgaaacagtactcgtcatctggagttgctgaattttcagggcatgttttcctgccgcgacccagccaacccggtatccgggagcaaggcattttgaaaaagatgaacagtgcatgaaattattttctttatcccatgccttaaccggcattggcgggttctgatcaaaatagagttcgccataaacatcatcttcaatcagaacaatttcattttcattcagaatttctaccagccgttgtttgttttctgtcggcatactgacgcaaagcgggttctggaagcgggacatcagccaacaggcttttatcgggtattttccagccacttcttccagtacatctaaatcaatcccggttttaggatccgttttgatggcaattgctttcaggcgcaaacgttcaatggcctgtagcgcaccataaaaagcgggtgattcaatcaccacccagtcgccgggagatgtgacagactgaaggctgaaacttaaagattccattgctcctgcggtgatcacaatttcatcaggagaaacatgcataccctgtgaggcataacgacgggaaatattgcggcgcaactgttcatttcccggaggtaagttcaccagtgaactatggggagcaaaacgacgggctacagatgctaatgtcttggctaatttgggctccaccagcaaggatgggtcgggaaatgcggagccaaaaggtatgattctgggatctttacacgcctgtaaaacatcaaaaattgaggcgctgatctctacattttcgctcaaattcagcctgtttcccccttttgccgcagcaaacggctttatccggggagcgacataatagcctgactgtgggcgtgctacgatccagccctgactttccagtaattgataggcctgcaatactgtcatcaggctcagccctgacgatttcaccgattcccgtaaggagggtagcctatcccccaccagccagatattatcttctatctgttggcggatggtcactgccagttgctcgtagcgtgtcatataccgggtcttccttagagtgttataggtcattaacagagcatttccactattatacacttcgtctttcaagttgcctctttgttggcgacgctctctcaccccggccacatagttatactcaagtcttgcaatagctctttcaataacgggatgttacctattccaatagtctgtgctcattttctcagaggattattttcatttcagaaaacaattttcaggataacaatgatccaaaacccggcacgcaggtattcagactaagctgcttcagaagcatataggttgtcgctacagaagctgaaattaccggtaagcccatacgggcttcaatcagaggcactgaggccagtgaaggcatttgtacacaggcagaagcgactatcacatccacattgctgttcagtttttttgttatttccgctggtgccagcggatcctgacgcccgaccgccagattatccgcaatttccagtgaaatactgtcaatgacttcaataccttcattttctatataatcgatcaccagttgcgttaacggtttcatatagggtgtcagtattgagatccgttttgcccctaacgcgtgcagcccatccaccaatgcgccggcacttgtgatcaccggtgccggatatccgttttctgatgtcctcagatgcaaacgtttttcagaaatccggtggtatcctttacccatactcatgattgccaccagacaggcatatcccaacacatccactgaagcatctgacagttccagtgcgcagcgatcactgtctgcatccattgccgccagttcatctttgctgactgttttcattctcatacgactcgaatgaaaggtaaaacgctcaggtgctaccgtttcacgggcacgtaaaatagccgggatctctgtttccatcgtggtatttgaggagggtacaatcagccctacccgaaaacaacgctgttcactcatggaagatcctcccgtatcggattaaccccatccacaactggattaaaatcagtctgttcaggttcatcagtaaatctgactgcattcatggctcgtcggctgacagccagatcgaaaatatcaaaacgattgtaatgccctgtaatatcgtgcatctggcggggctgaatgcagcggttcaagtcaatttccgcataaacaatccctcctttatcaatcagaggagtgccaatcacacgcccatccggcccgataattcccgtaaacgcgctattacgacgtgccaacagatgttttgcttcagggtggctggcagtcatagcctgcacaatttccggcgatatagtggaacaggaaacaatagtaaaaactttgccttcaaagcaatgcgcggcggcccgtaaacgaatggcttctgccatatcataatctggcggggcgacaggcagggaaatgtaactggcgacatgcaccagctccccctgtgatagcaaagtaaaacgcgccagtgggttggtattctcaccacaggccagcacacccagcgggccaatgctggtgttatgtacggtcaatgaagaagcatcaccattcgcccatgtcagtttttctgcccatgtcggtaccagtttacgatgccgtcccaaaatttttccttcgtctgaaatggtcaccagagtgttataaattgtcgcaacaccattgggattgcgttcattgatgccaacaacaacattgatgtgatgacgagctgcagcctgtgccactttgaggatctcagcacccggtacttcaatggccgatttgcacagcttttcaaaccacggactaccctgcacagggttcataatccagttccagtagggataaccggcaataaaaacttcaggaaaagccaccagactggctccgttattcgctgcctcatgaatcagccggcaaacgagatcaaccgtggcttccgtatccagaaagatgggagcagcctgtaccgcagctgccttgaatttaggaagagtcagcatgtcagattcctgtatgaggtttatacggcgatgacgggatgacgcaaatccccgattttctcaagatgagcttcaataacatcccccggccataaccacttttgcgggttacgccctgcccctacgcctgacggtgttcccgtggcgataatgtcgcccggctccagaacaatacctttactgatatcagcgatcagggcatcgaccttgaataacatatggcgggtattggaatcctgtttggttaccccgttaactttcaggctcaaggcgaggttatgcgggtcggggatctcatcagctgtcacaatacaggggccaaaaggcgcgtaagtatcctgccccttagaatagatccactgcccggcacgacgacagtcacgggcactcatatcaataatcaggctataaccgaaaacatgcttcagggcatcagcttccgatacgcctttggcccgtgttccgatgataacggctaattccacttcccaatccagttgccgggtaatttcactgttatgctcgatggcatcccccggcccaatcaccgtagaaggtggtttggagaagataaccggttctttgggcagatcttttgccgtatccagcaaacggctggattcttcaatatgctcaacataattcaggccaatgccgaaaatgtttttacgtgggcggggaataggagcaagaattttgacattttccagtggccggatgacaccgactggccataatccgtcaaatgaattcagcaacattgcagtactacttatggcaagtggccccagttcaataaaatccagcatattatccggtaatgtgctgccactatgagccgccaattttgccagatcaacgacattattattcactatcgcccccaatcgggcctcagccgttatctcagtacgataagtaattaaacgcattttattctcccactcgctgatgcccgtgattctcgttcagggcttcttcataatacagctgtaatgcctgcatcaccggcaagtcgctgaaacagaacaggcaggcatcttcggtttgtgatgcattcgcatgctcatgatatttccatgaaggtacgcaaaagatatcccgctcctgccagtcgaatctctgaccatcaataatagaatatcccgctcctttcgcgacctgatagataaagctgccggtatgccgatgagccttaccaataaatccggggcgcaatagctgcatactggcacccagagttggcataacatgcccgccagtcagaggattgatgtagtacatcaagatgtcatcaaacggtgatccccgtgatattcgggcataaccttgcagagcggcgtaagttggcttccactggtatctgaataatggggaatagggtttatcccagcccacattttgcggacgcaaagcaggcgctccccacagcgctacagaggaatccaccggttcagtcacggcctggcgcagatcagggtgtaccttataaaacccggcttccagagtattcactaatggcatatcaaggccatcctgccagatgcacggagaaccatcaggctccaccccatgttcatgccaggttccattgggtgtcagaacaaaatcattcgcttccagcaacatcttctggccatcaacaatcgtataggcaccacgcccttccatgatgaaacgcagggccgaagaagagtgagcatgagccgaagcagactctcccggttgcatagtctgaagtccggaatacagtaaaccgacagccggcccttcaccggatttacccggattctccagatagacgacccgacgaccggctttttccggagtcactagttcagcggatttaagaacatgttcacgtaagtcacgataacgccagagcaccggaacagaagtggactgaggttgccacggctctattttgttggcgattgtccagagtgcccctgtgtgatattttgccagctctttgtaatatgccagcaattcagggctatcggcgacattggcgcgcccgaggatatcttctctgtactgatcgtggctttcttgcctattctgctcatattcctgcacattttcttgttgagacatgaggtatctcctatacggataataactgccatttggaaatcggcctgaaattcagaggatactcttctgggcaagctggcgttccagttgctctttgccgtaaaggtacggttccggccaattgatgtctgtccagccatatctggcacattcatgcagcagccatgcggcatcggataaaaatgggcgggataaggcacacagatctgccctaccggaagcgataatgctgttaatctgatcggcatcggtaatcgcacccacggcgataacaggcacattgccttcattacggatacgatcagccatcggcgtctgatacattcttccataaacgggttgttgttcagcggaaacttccccggttgaacagtccaccatatcagcacccgcctcatagaaagtacgggcgatgatgacagcttcatcaacggtggtgcctccctttatccagtcagtggcagaaatacgtatggatatcggtaaatcagccggccagacacgacgaacagcgcgcaaaaccgctaatgggaaacgcagtctgttttccagtgcccccccatactcatcgtcacgcagattggtgacaggcgaaataaaactggaaagcagataaccgtgagctgcctgaatttccagccagtcaaaaccggcggtgatagcacggtgagttgcttcaacaaattgcgaaataatttcactcatttgtttctgagtcaccgcagttggtacctgtgaaataccaggcagataaggcatggatgaagcagaaaccagtggccagtttccttccggcaaaggatgattaacctgttcccagccccgttgagtagaacctcgccttcctgagtgccccagctgaatgcctatccgtgcatccgtattctggtggataaaatcggtgataattttccatccctgcacttgttgctcattccacaaaccgggacaagcaggcgttacccgcgcctgtggtgaaatcgcggtcatttcggcaatgactaaacctgcgcctcccaaagctctgctgccaagatgaatctgatggaatgttcccggaataccttccaccgccttgtacagcagtgttggcgaaactacgactctgtttttcagcctaatcccccgaacctgataaggcgttagtatgggagggatcaacggggaagattgatcaggctgccgattgaaccaatattcatagttttccagccatgatttatcccgcagcctcagattttcatgggaaatacgctgtggcgggtgagtaaagaataggcaaattgctctggcgggaaatcttcataacgggccacattttcaaaccattctgtggaattacgcgccgcattctggattttcagcacttccacgctgcgtaatttctggtaatgggccagccctgccgataaattccccttattggctttcaggctgttagcgagttcaatggcatcctccaatgccagtttggttccggaaccaatggaaaaatgcgcggtatgggccgcatcccccatcaatacaatcggtacatttttgcccttatcaccttctggtttaatccagtgtacccagtgattacagaggatccggggaaaacggatccagattgcagccccgcgtaaatgggtagcattggagatcaggccatgcccatccagccattgggcaaagatactttcgcaatacgcgatgccctcttcctgtaacattttgtcaattcctgctgccagccacgtatcttccgttgtttcaacaatgaatgtggatagcccttcctgaaactggtaagcatgagcctgaaaccagccatgttctgtttcagcaaacagaaaggtaaaagcatcaaatatccgatgggttcccagccagacaaaccgacaatgacgctgttcaacatcaggccagaagttttcagcataacggttacggatttggctattgatcccatcggatgcaatcaacaaatcagcctgatactggcgagctaccttttgcttatcctgaacctgcgtccaaataccagcttgactcccagttcctgacagcgatcctgaagaatattcagtaattttttgc

SEQ ID NO: 64 - DNA, 8635 bp, Xenorhabdus sp.
ccttatatcgggaataaatcaggtaatctatcaccgtgaattctggtaatgggatgaagaataaacgaactccttttcgcgattatacggctgaatcagccctctttatacgccgcgcactcgtggcgtttgttggcgttatccttttaacaggggttctgattgccaacctctataatctccagatcacccggcacgaagattaccagacacgctcaaatgggaaccgtattaaacttgttcccattgcgccaagccgtgggctcatttatgaccgtaacggcatacttctggcagctaaccgtacaatttaccaattggagattgtgccacaaaaagttgatgaccttgataagacactcaatgagctgcgttctatcgtcgggctaactgatgaagatatcgaaaatttccaaaaagaacggcgacgtgcccgtcgttttacctcaattcccctgaagacaccactgactcaggtacaggttgcccggttctctgttaatcagtaccgtttccccggtctggaaatccgaggatatcaacgccgctattatccttatggctctgccctcacccacgttatcggctatgtatctaaaattaatgataaagatgtagaacggctcgatcaggaagggatattaccggattatgcggcgactcatgatatcggaaaactgggtattgaacgttattacgaatccattctgcatggcaaacccggctatgaagaagttgaagttaataaccgtggtaaagttatccgccagctacacgaacaacctccgcaagcgggtaaagatatttatctgtcaatagacttagagctgcaaacttacattgaaaaaatcctgacaaccagccgggccgccgttgttgttaccgatccccggactggtgaagtgctggcgatggtatcgactccaagctatgaccccaatctgtttgttgatggtatttccagtaaggattataaagcgctgctcaataaccctgaccgcccattgattaaccgtgcaacacaaggcgcatatcctccggcttcgacagtaaaaccatttatttctgttgcagcgctaagcagcggtgtcattacaaagaatacaactatccacgacacaggaagatggcaattacctaactccaatatgagttaccgcgactggaaacgttatgggcatggtctgctgaatgtgcataaggctattgttgaatcggctgatacctttttctatcagctcgcctataatatggggatcgataagatctccgagtggatgacaaaatttggatacggtcagtttaccggtattgatctgaaagaagagactgcgggtaatatgccaacccgtgagtggaaacaaaaacgctataaaaaaccttggtatcaaggtgatacaatatctgtcggtatcggtcagggttactggaccgctacgcctatgcagatggtaaaagcactgatgatattgattaatgacggcgaggtgaaaacaccacacttcctgctgaggactcatctgaacaatagcgtccatccttaccagcctccagtcattgaacctatcggcgatattcattccggctattgggaaatcgccaaagagggaatgtatggcgttgccaacgctccgaacggtacggcacgcaggtttttcgctggtactccctacaaagccgcaggcaaaactggtacagctcaggtgttcaggtatgaaacctataatgcaagtaaacttgcagaacatctgcgggaccactggctaatgattgcttttgctccttatgataatccaactgttgccatatcaattattttagaaaatggcggtgctgagcggaaacctattggtgccatcgtgcgccagattttggatcatatgctaatcaagagtgataaagatccttcacctactgagcctgctgataaaaacaggtcactacccgcagggaagccagccagcgggacacgaattaatgagtaatgctatgacagaatcgcagaaaaaagttcctttctggaacaggatacatatagataccccgctgctattgtgcattctgctactgcttgcctacagccttttcattatgtggagcgccagcggacaggatgctggcatgatggaacgtaaagtcggacaggtgcttatcgggctggtggttatggtagcccttgctcaggtaccaccccgaatatatgaaagttgggcaccttacctttacattgtctgtgtgatcctgcttatccttgttgatgttttcgggcaaataagtaaaggggcacaacgctggctggatctgggcattgtacgtttccagccttcagaaattgccaaaattgcggtccctctaatggtggcccgctttatgaaccgggacctttgccccccttccctgaaaaatacgggaattgcattaatcctgattttcttgccaaccctgcttgtcgcagcacaacctgacttaggtacatctatcctgatcgccgcatccgggctgtttatcttgtttctggctggcatgaactggcgcttaatcgcgattgccgttgtattggcagcctgttttttaccgatattgtggttctttctgatgcatgactatcaacgggccagagtcatgatgctgttagatccggaaagcgaccctctgggaaaaggctaccatatcattcaatcaaagattgccattggctcgggcgggttatttggaaaaggctggttacagggcacacaatcacaattagagtttttacctgagcgtcataccgattttatttttgcggttctggcagaagaactggggttagttggtgtcatcgtattgcttgccctttatttactgatcattatccgtgggctgattattgcagccaaagcacaaaatactttcggccgagtcatggttggggggctaatattgatactgtttgtttatgttttcgttaacatcggcatggttagcggtatcttgcctgtggtcggcgtgcccctgccactagtcagctatggaggctcggcattaatcgtcttaatggctggattcggcattatcatgtcgatacatacccatcgcaagttattatccaaaagtctatgaggaagagatttcatgcgtcaacaatggcttattctcggcatagtggctgtactgatttcaggctgtacaacaaaaaatgaaaaaggcgccacctccgttctgcccattccgacccgtgatgttttaggtgcagagcctgtctatgagccttatcaccccagtgccaatcaggattacacaaaagacggtgtgaattatcacatcgtcaaggatccggcccaatttactcagacagggtatgccagtgtatttggtgaagaatctaccggaaaattgaccgcaattggagaacgggatactccctatgcactgacagccgcccatccgacactgccaataccgggctatgtacgggtcactaatttaagtaatggacgtatgataattgtcagggttaatgatcgtggcccttataataagccgggaaaaattatcgaattatcacgggctgttgctgatcgtctgaatttaatgccacaaagtaaagttaagctggatggcgttcaggttactcctgatggctcacttgcgggtttgggtacagaaggttcaactattgtcaaacaaagctacgccctacctgacagacctgcgctgaactcatcagcttctgtcacaggcatggactccggtttatctgagcaaactcccccagaacagaatccatcctcaaatactgtcagcattgatagtcaaagcgtttcacaacctgataagcctgcttctgtgcaggaaaccgtgcaggagcctccggcacaaacaaagtcagttgtcacatcttctgttaccccagaatccgctaacgtatcaggctttatggtacaagttggcgcggtcagcactgaagctaaaggcagagagtggcagcagtcgttaagtaaacgctttaatactcccggtcgagtgattcaatttggtcatgtttaccgcgtgcagctagggcctttcaatgcccgccagcaggccgtagagttacaaaagaaattaacggatcaaatgcaacaatcttcctttattactactccgtgattagcaaatcccccgctgatatttgcctttattcaggccattatcagtggggagaaaccaagtaaaatacaggcagtcatcgaatacagcgcaatcgagtaaaaaagtgcaaatatacttctgtcccaattttgtttaatgtcactcttttcgtcatttgttatgatgtgacttatcttttatcaatgcttcttcacggatgttatctaatcaatcatgaaatacatagttacttcccgttttattaaaaatgccacgctgagcattgctctggcagccagtgcttctgcattcgccaacaccgatgatagcttcaaaaccatgatccccggtgttccacaactcgatgccgaagcctatattctgattgattacaattcaggaaaaatattggctgaaaagaattcagatgtccgtcgcgatcctgccagcctgacaaaaatgatgaccagttatgttattggtcaggctattaaatccgggaaaatcagcccgaatgatatcgttaccgtgggtaaagatgcatgggcaacaggaaaccctgtattcaaaggctcctccctgatgtttttaaaacccggcgatcaggtttctgttgccatgctctcccgcggtattaacctgcaatcaggtaatgatgcctgtgttgcaatggcggattatgtagcaggtagtcaggacgcgtttgtcggcctgatgaacaaatatgttcagagcttaggattaaaaaacactcattttcagacagttcatggtctggatgcagcgggtcaatacagctctgctcatgatatggctctgattggtcaggcgctggtccgcgatgtaccagatgaatactccatctataaagaaaaagaattcacttacaacaacattcgccaacctaaccgtaacggcttactgtgggataaaagcctgaatgttgatggtattaaaacagggcataccagcggtgctggctataaccttgtctcttccgccacggaaggtaatatgcgtctgattgctacagtgatgggcagcccgaccttcaaaggccgtgaaacagacagtaaaaaactgctgacctggggcttccgtttctttgaaactgtttcccctttgcaggcaggtaaagaatttgcctctgaacctgtctggtttggtgataacgataaagtacaacttggcgtcgaaaaagatgtttacctgactattcctcgtggtcgtctgaaagacctgaaagccagctatgttctgaacagcaatgagttacatgccccacttccccagaatcaggttgttggcaccattaatttccagcttgatggtaaaacaattgagcaacgtccactggtcgtgatgcaggaagtgaaagaaggtggtttctttagccgtctgattgattatatccgtttgatgtttcatcactggcttggctgatatcttgaaaaattaaagttaaaccacatattcatataacttgtcagaaaatagtcatgccacggtagaatgcctgattttaccgtggcgaataaatcaggagtgcccatgaaaacgaaattaaatgaactgcttgagttcccctgctcattcacttacaaagtgatgggcttagctcagcctgagctggtggaccatgttgttgaagtggttcagcgccacgcaccgggcgattactccccagatgtgaaaccaagcagcaaaggcaactaccactctgtttctattaccatcaatgcaactcacattgagcaggttgaaacactgtatgaagagttgggcgcactggaactggtgcgtgtcgtgctgtaatacatcactttgttaatctgtgattatttcgacaaagcgctggcaaaaaaccagcgcttttctctatctgctctatctaacctgactttatccaatatctgttaacctccactcaaaaacgccagaacgctttcgaacagaggatcaaaataggatagatttccagccttcccaataacatagcagcacacatcatccatttcgctactgcactaaggttgccaaaaccttgtactgtatcgccgtaacctactcccatgttattgatacatgcagcaaccgtggcaaatgaagtcaccaaatcataaccaagaagatttagcgcccaaataaagaaacagctacaaaaaacatataagaagaaaaaaccccagaccgaacgcagtaccctttcctgcacaggtgcctgacccactttaatggttgaaatcgcattcggatgaataagttgattaatctcactgaaactttgttttgtcaggatcaggaaacgtaatgctttgatgcctccacaagtggaaccaacacagccaccaaagaaactgacagccaataacatcagcatcgtatggggtggccactgtgcataatcggaagtcgacagaccattatcggtcatcattgaactggtcataaagaaaccatgcacaaacgagtctttcagcccatacataccggaacggtataactccagccaaatgatgcaaactacgatgaaaagtaccaacaggaaaaatttaaactctgcatttttcagtaacggtttaaggcttctccgggtcagaatgacaaaataaagtgtgaagttaactgccgacaatattgagaaaacaccgcccaccatttcaatcagggagttgtcataatagccaagactttcattgcgggtcgaaaatcctcccaaagaaaccgttgatatcccatgacaaatggcatcaaaccaagacatcccggcagcccagaagctgaacgaacatagtccacccaataacagataaactacccatagacttttagcactatcagccagacgtggcgttaatctctcctctttaaatgggcccggcatttctgactgataaagttttacgccaccaatgccaagcagcggcaggatagccacagcaagaacaatcacgcccaagccaccgataaaatttaactgggcacgatagtaaagaacggatttaggtagggtagaaacatcattcagtactgttgctccggtggttgtaataccggatacaccttcaaacatggcatcaacaagattgatattcaggcttttatccagtacgaaaggcaaggcactcaacaacgaaaagagcaaccagaacaggacgataataaggaatccgtcctgagtactgggttgtatttttgtttttcgagtgaaataccacccaacgccgccaaaaatcaacccgattataaaagtttctaaaaaagcaaaaacgcttttttctttataaattagggcaacaaaagtaggcagcaacattgagaggctgtaaaggagcaccagagaactgcaaagatgccctacaatcaaaagttggttttttctgaccatctgttagctcaaacagaaaacaagggggaaatcatcaaaatatataactatgataatataaaatttgaatatattcgtctaattaacattattcgtgtattagcgcattgtgaactggtgagaatccttttagagcgttatactggcgggcaatttttgttaaccgatgatgacagtccattgcaacataacaccgttattttacgccagttgggtattcagccctacgagccggtttctgaagccatgcaccagttcaccgagcagcggacagcggaaactaccgatgaaatctggtttgtccaacatgagaaagtgtttacacaaggtcaggcgggtaaagcagaacatataattgccgcaggtgatattcctgttattcagtccgacaggggtgggcaaatcacttatcatggtcccgggcagcaagtcatgtatattttgatcgacttgaaacgcgctaagctcggggttcgtcagctcgtcactgcgattgaaaataccgttgtcgaaacgttagctcattttggcgttgaatcttatgcccgggctgatgcgccgggggtatatgtcaatggtagtaaaatttgttcattgggattgcgtatccgcaaagggtgctcttttcatgggctggcattaaatattgcaatggatttacagccatttttgcgcattaatccatgtggatatgcaggtatgcaaatgacccagctcagtgacctcgttaccgggatcacagttgaagatgtacagcccgttctggcacaaaaattctgccagatcttgggattccaactcaccgatgaaagatgatataattttttaacatttttcaaaaaaatttgaatagtcttattgccccgataaacctgacgctgaatttattttattaatcagcaaaatagcaatcaggcaataaattacaatctgaagaatataactggaaccagcacgattatgagtaaaccaattcagatggaacgtggtgtcaaataccgcgacgcagataagatggctttaatccctgtgaaaacagtggttacagaacgtgaagcactcttgcgtaaacctgagtggatgaaaatcaaacttcctgcggattccagccgcattctttagaggacgtgcaaa

SEQ ID NO: 65 - DNA, 11162 bp, Xenorhabdus sp.
ctaaaggaatcttactctcgaagactggaagaaaggctttaatggtagccagataagtggaaaagtgaacctgatcacgcagggtgaattcggcaagggcaatgtggttctttccatgcaaccgacaaaggtaagcctaacaaatacacatattcctctccaactgacagggcaaatgaatagcgggaaaatgatcatgacgatgtcattgccgacagtcataacaggctcattagttgatccgaagataacattcaagtccggttctctgttccgtgtctggggaaaaatcagcgaaaattttactatcaaagaagccagattacctttggcaggaacctacctgacccgtaatggttttacgggccgtttacaggcaatagtaactgcaaaagagcactattggggaactttcagactccattttgatggaatggccaaaaattttattcccgaccatggaaactggaactggcgttactggggaaacggtgatttaccaccgttgcaggctaaatgggatatatcaggtaaaggaagctggaatcagtcacagatagcggtaaatgcactcaatacagggtttgatactatcaattatggccttgtaaaaatgaaagcccctcgtttgcaactgataaaaccgctgatatgggatcgttccataacccagccagaattagcgggagaactgcaactttctgccttgcgaactgattttcgctccggaggctttttaccgccggttaatttcagggcaacagtaaccggtcagtcacctgataattttatgttgaacggtaaattgcaggctaagggaatagggccgattccaatttatggtcgttgggatggagtcaggctaagaggagaggctcgttggccaaggcagtcattgctggcgttccagactctcattcctgctgatttggggattaccgtgcgtagcgggaatatctatgcgcaggcagcattttctgccgcaaaagggcaaggtttacgtgctggtgggcactggatagtcaaaaatgccggcatctggctgaaagatggaagtattgacggactggattttgtattaccgtggcgtttacaggaacagacctggcaattaggcgttacatcgcctgttcagttacgggttaaaacaatcaatagcctattcgagatgaataatgtttctgccgatttgcaaggtttttatcccccgactgagattcagccattaactttatccaatgtgaatattgatatgctggatggtgctctcaaattagataaattacagctcccacaaaaacagcctgcggtactgagttttaatcatctgaatgtgagtaaattattttatgtattgaaagtgaagcaacttgctatgtcaggaagaatcagtggtgaattaccgctgttattaaatgataaacagtggcttattaagcaaggctggatcgctaacgatggcggcctgacattaaggcttgataaagatacggttgattcaataggaaaaaatgatttaacggctggtgtagcaatggattggctacgttatttggaaatcagccactctaaagcgaatgtaacactggataatctgggtattttggtcatgcactcagagataaacggtgttaatccagtcgtggataaaaagcgtgaagtcaggctgagctaccggcatgaagagaatatttttcagctatggcgcagtctgcgatttggcagcagtttggaagaatggttagagaaaaatattgcgttaccggaatgaacattcacagattaaaaaaacggtcattgagaattcaatgaccggatacaattaagaaccatcatctatttctattaaccattaactgctcaaccagctgttctttccctacgatagagataaccttcccccgacgcagagcaacctgagctgttttcatttcctgttctccgataatcagaatatttgggatcttcaattgatggaatcgcctgattttatgagcaacagaactattactatgatcagctaatacaggcaaatccgcagaattgagtgaacaaaccagtgcgttggcataatcaatagctgcttcactcactgttgcgattgcaaccggtaatggatgtatccattctggcagggcgccctgagtgctttccagtaacacaccgatccagcgctctattgagccatatatgacctgatgtaaaatcaccgggcgttctttctcgccggacgaatttgtataagcaatatcaaagcgttccgggaggttaaaatccagctgtattgttccgcactgccactcacgccctatattatccttaagagcaagttcgattttgggaccataaaatgcgccttcaccgatttgtatttcgaaatcaacagattgttcctggcatacatcaattaatatttgttcagctttctgccataaaagtttatcgccgagagcagactctggccgagtagaaattctgaccaaaagttgatgataaccatactggctgtacacaagcttagctctattcagaaaattaattacctctacctgaatttgtgaccacgcacaaaagacatgggcatcgtcctgagtaaattggcgcaatctcaggcagccattcaaagcgccagagggttcattacgatggactaaaccaaattcgaacagttttatggggagttctttgtaactatgtacaccacgtttaaacagtaaaatatgcgccgggcaggacattggttttaaagcataatccgatatgccgtcctgaccaccaccgaaaaacatatcttcttcgtacatagcaagatgaccggaagtctgccataactcctttttcaaaaactgaggtgtacggacttcctgaaagccatgctgttggtaaattttccgcatatgctgttgaatattttgaaatagccgccagccgttcggatgccagaaaatcattcccggcccttgaggttctgaatgaaataaatcaagttgttgtgcaatctcacgatgagttttcatagtttctcctgttatgaaactctgagcgaaacgcgtaaggcaggtatgaaaaaaccctctggctagtcgctcagagggttttttaaaattctgtcgagactaccccccgaacaacctagtggtttcggtggtggtagtttgttgagctggcatggccagaatgaagattgatttaattttcataatgtttaagtttttagcaatctgcatagaaaaaagcaagtggaaattataggtaaaaagttctatatccaatgagtttcgaattccctaagagattactgtgttttaatactttgctctgtaccgtagaattatcgctgaactggaatagtttggtgtttttaaccgggagtaataataaatgataacaaagcgtgggttcagattaacgatggtcattggtggcatggcgttaatctgcgtaggtttggttgggtgtatcaggctggaagttgcaacaccggataagcccataaatattaatatgaatgtgaaaattgaacatgaaattcatattaaagtcgatcggcagattgaagatatgctcaaaaataactctgacttattctaaggagtgagaatatgaaaaaaacaggagtgatactttggttaagcctgctgtttagctcttttgcaatgagtatgacgctggatgaagcaaaacaacaaggtctggtaggtgaaacattcagcggatatctggctccagtcaggaatactgaggatgcactttccgtagttaagcaaatcaatagtgaacgggaaaaaaggtatgcggagattgcggcgcaaaataatataactaccgatcaagtggcgagaatagccggtgaaaagctggttagtcgtgcaggagcaggggaatatgtgcgtggtattaatggtaactggttgaagaaataaagcgtgccatttttaggctggcacgcaccgttagtaacaacagaatcaggctgcaatttcttcagattgttcctgctttattttttctataatttcaattattgcattgtgagagttttggtgtgcctgatgtgccagttctttgcctaacgcaatcccttctgcaaagacgaatttaacatcagtaataccaataaactccaagaaaatctgtaagtgcggagtgatcaaatcttttggtgtttgctgataaattccaccacgggtggttagcacaataacacgttttcctttcaacaagccttctgggcctgattcagtatagcagaaagtaataccagcacgagcaatcaaatcaaagtagttttttaattgggtaggaatagagaagttgtacattggtgctgtgattacaataacatcatgagcctttaattcggcgatcaattcatcagatagtgccatcgccgttttttgacgctctgtcagttccgcaccgcttggacgcatagcacctaatagttccccatccagcaccggaactggtccttcagctaaattacggatggtgatgtgactatctgcatggctggtggaccattgctcaataaaattatccgccattttattgctttgtgagttttgcgccataatgctggatttcagaaccagtaagttactcatttttaattccttaatttgttactgtaactaatacattgtcaacggtttctataggtcaggcattttaatgggatagtcattcagtaaatagcgcaatatttcgaggtttgtattcaaaattattgaacatcagtttgagtcatcggttttaacctgaaagatgagggaaataaatgcgtttatatgcagtacattgaaatactcaagatatgttacacttctgatagcccagtactaaaaccctatcctataactcaatttactagaataccttgatagtaaaagaaattttgacaataaagtgcgtttcagaaaaacagcactactcaattaagaacgtcacaaggatttatcacagtggaattacctttaacagcgacgattgctgaattatacgctgaacttgagtacacgccgttacgtgaccagttccgtttaagaaaacgtttgcagggagctgcaaaaataaaaaatcaggcttccttgcaggctgtagcacaatctattgctgcggatattactaccgcaaaacaaaaagttattaatcgtcaaacggcatgccctacgattaaataccctgaaaacctacccgttagccagaagaaagatgatatctataaagcgatcagggataaccaggttgttattattgctggtgaaacaggatctggtaaaacaacccagatccctaaaatatgtcttgaacttggcaggggtgttaaagggcttatcgggcatacccaaccccgccgtttagcggctcgttcagtagccagccgtattgccgatgaactggaaacatcactgggttcagccgtcggttataaggttcgttttaatgatcaggtgagtgagaatacactggtcaaattaatgactgacggtattttgctggcggaattgcagcaggatagattgttattacaatacgatacactgattatcgatgaagcccatgaacgtagcctgaacatcgattttattatgggatatctgcgtcagttattgccgaagcgtcccgatctgaaagtgattattacctcggcaaccattgatcctgaacggttttcccgtcatttcagtaatgcgcctattattgaagtctcaggccgtacttatccggtggaagttcgttatcggccaatagcaggagacgataatgacaacgatagggatcagttagaagctatcattgatgcagtagaagaactaggccgcgaaagtgccggtgatattctggtatttatgagcggagagcgtgaaatccgtgataccgctgatgcccttagtaaacagaattttaagcacaccgaaattttgcctctgtttgcgcgtctctccaataacgagcaaaaccggatcttccagtcgcacgtcgggcggcgaattattctagccactaacgtcgctgaaacttcattgactgtaccgggcattaaatatgttatcgatactggctatgcgcgtatcagccgatatagttatcgaaccaaagttcagcgtttgccgatagagcctatttctcaggcatcagccaatcaacgaaaaggtcgttgtggccgtgtttctgacgggatatgtattcgactctattctgaagatgattatttatcccgtccggaatttactgaccctgaaattctgcgtaccaatctggcatccgttattttgcagatgacttcgattggattgggggatgtcagtgcgttcccatttgttgaagcgccggataaacgtaacattcaggatggtgtccgactattggaagagctgggtgctatcgatacagagtcttcaaccgatggcacttaccagctgacgcaaatggggcggcagttggcgcagttaccgatcgatccccgtttggcccgtatggtgctggaagcccgaacacatggttgtgtgcgtgaagtcatggtgattactgcagcattatccattcaggatcctcgggaaaggccgctggaaaaacagcaggcttcggatgaaaaacatcgccgttttgctgataaagattcggattttatcgctttcctgaaattgtgggattttctgacagaacagcaaaaagaactatccagttctcagttccgcaaactttgtcgtcaggattatctgaattatctgcgtgtcagagaatggcaggatgtatacacgcaattgcggcaggtagtcaaagaaattggtattccggttaacagccaggaagcggattaccgcagtatccatattgcgttactgaccgggcttttatcccatatcggtcagaaagatgtcgagaagcaggagtataccggtgcccgtaacgcccgtttttccatctttccagggtcgggattatttaaaaaaccgcctaaatggggaatggtggcggagctggtggaaaccagccgcctctggggacgcattgctgcccgcattgaaccagaatggatagagcctctggcatcgcatctgatcaagcgtcattacagtgaaccacactggcaaaaatctcagggtgcggtaatggcatcagagaaagtcaccttatatggattgccgatagtgatggggcgtctggtcaattacagtcagattgacccgatgctgtgccgcgaattatttatccgccatgcgctggtggaaggggactggcaaacccgccattcattcttccgggctaatctcaaattacgtgaagaagtcgaagagctggaacacaaatcccgccgtcgggatattttggtggatgatgagacattattcagcttctatgatcagcggattggcaaggacgtagtttcatcccgccattttgaccgctggtggaaaacagtaagcaaagatcaaccggaattgctcaattttgaaaagagcatgttgattaaaggggatgctaataaagtcagtgcgctggattaccccaattactggtatcaggataatttaaaatttcgtttaacttaccagtttgaaccggggacagatgctgatggagtcacggtgcatattccattgccagtattaaatcaggtcagagatgaggggtttgactggcaaattccgggaattcgtcatgaattggtcgtggcattaattaaatcgttaccgaagccgcttcgccgtaatttcgtaccggcacctaactacgcagaggcatttctggagcgggtaactcagccacaggcaacattgctggaaagtcttgaaaaagaatttcgtcgcatgacaggagtgacattgtcacgtgatgactggcaattagagcaggttccggatcatttgaaaatgactttccgtattattggagagaaaaacaaaacgctggcggaagggaaagatctttcggcactgaagctgaaactgaaagataaagtacaggaaacactttcagccgtagcggatgatggtattgaacaaagcgggctgcatatctggagttttggcgaattacctgaacgctatgagcagaaacgaggtggctattcggttaaagcattcccggcgctggtggatgaaaaagacagtatcggtattaaattgttcgaaactgaatccgaacagcttaatgcaatgtgggaaggaacgcgtcggttactgttgctgaatattccatcaccgattaaatacctgcatgaaaaactgccgaataaatccaagttgggactatatttcaatccatatggaaaagttctggatttgattgatgattgtatttcctgcggtgtggacaaattaattgcagaaaatggcggcccggcatggaatgaacaggcattttcagatttgcaggataaagtccgggctgatttgaatgatgcagtggtcgacattgccaaacaggtcgagcagatcctgacaacggtattcgccattaataagcgtctgaaagggcgggtagatatttctctggcattggcactatctgatatcaaagcgcaaatctccggtctggtctttagaggtttcgtcaccgcccacggttggaaacgtctggcagatgtattgcgttacctgaatggtattgaacgccggttggaaaaactggctattgatataaacagggataggacgcatatgagtcggattgaatatattcagcaacaatggcaacaatggttagcgaaactttctgttcagcaaaaacagttaccggaagtaaaagaaatccgctggatgattgaagaactgcgtatcagcctgtttgcccaacagctgggtaccgcatatccaatatctgataaacgcattttgcaggctatggagaatatcgcagcgtaataattcggggcctatagtgtataattattaatacactataggcccctatattatggctttagccagtttaagtcgcgttagcgtcttaaacataaaaccacccgctttgcgggtggagttcaaaggttataccaagaaaaacacctttccgttacgatatagatgtacaagctaatattcgtaactcaaataaggaaaggtgtttatgggcattaaagcacaaagctcagcgcatacaaagtggctgtgtaaataccatatcgtcttttcgccgaaatatagacggaaagtgatttttaataatattcgttcaagtgtgggagagatcctcagagacctttgtaagtataaaggtgtggaaataatcgaaggtcatctcatgccagatcatgttcatatgttggtgagtattccaccaaagctaagcgtttcaagctttatgggatatttgaagggtaaaagttcgttgatgatctttgatagacacgccaatttaaaatataaatttggcaacagaaagttttgggcggaagggttctatgtcagtacggtagggctaaatgaagcgacaattcaaaagtatatcagagagcaagaaaagtcggatttaatctcggataaattgagtagtaaagagcatgtagaccccttcaaggggtaggccaaagcagcaaagacacttagcttgaacgaagagaaagcagcgtcatttaggcgcagtcggtaacaagcccttatagggcaagagcaaaccacccgttatacgggtggttatgattttatgagataaaacaacttatctcacctgtattgacatctattgtgcaactatcgccagatgtttttgcataagtttgcattgaagccagaatagcagaacctgccaacaagcaaagaagaagatattttttcatttcactatccataacgttattatcagaaaattgataaggctaataaccttatctctacctaataataagtgaacgattttaacgaacagttaacacataaaactaaagtcaatatttatttacccattctttgatgagataacgggctcaaagaataatctgtcctctattcaggggattatcggcagatcgtttccaatccgcataatgttcgatcacttgattacctttactttccagttatctaaaaaataaaatcctacattttctcgtaatactgtttgagtgcagtctatgatagaaatttgtgattagttgagagcataaagccctagtatcgagttatatgttatttaacctcaaggctatacttgaatcatttgagtcatgataggtggtgacagatgttaaagacaattgccgttgcattactgctgtttccgggttacttgctggcagataccggagtttataccattgctgatggtaagctcgatatccgtgatggtaattattcctgttacttgtacccggcatacatattcagggagcccaaaaaccacaaaaaatttcctcccgggtattttcctaaagtcatgatgaaggtgagggtggaaggaaacggaaaatacataggtgttagcctttatcctaatatgccatcgagagtaagacctgagggagcatggggttattttggtactaaggtggggcttggttcaagaaacaataaagaggttatttatgattccgttaaggacaatataaatttttcctatctggtaggcactaaacaatcgggagtggtagctactttgagtagtaatgatccttttagcccggtgaatgctgtattaggaagatgtaagagagtcggttattaaataattactattatatcgtttgaaaggtgaaggctctaaaggtgggacattatgatgaatctggacgatgaccgaaaaaacaaaatactctacatccggcgtgctgatattcctgatatcgatattcttaccggaatcgatccagttgttctgtatgataatcgccggttagatcaaattaaaaattgggtcaagagtcaattttgctatttggtagagttagatagtgaagtgattgcgtatggcgtactgcattataatttttttgattatgcttttattgagatgctggtggttggagaaagaaacagaagggagggcgctggattacaacttatcaactacctaaaatcaatttgttcttgtccaaaattattcacgtctacgaaccaatctaataaaccgatgcgatcattattaaacaaggcgggctttaggaaaagtggttatatagaaaaccttgatgaagatgatcccgagttagctttagagca

SEQ ID NO: 66 - DNA, 9655 bp, Xenorhabdus sp.
gtgctctaaagtaattcgctccaggcatcttggctcaaagacgggagtttttgctgctgaatgaatccacttacataccgacaccacattgccagatcatcttcctcatgaaatggcatatcaggttcgaattcactgtataaagcactgcttgccaattccggctcaatagtatgcaattcgtcaagactgaaccgatctcctacaaggatcaggcgcaaatctaatggtattgagggaactggcagaggcagagaatggttttcattgtgtggtaaccagtcaaaacgtcgttgaatgatcatctgtttgagccgaacccacattaatggctgggatagcagcgtgcgtaggggtaagattaaaacaccaccattaacttggtggataagccctggctggagttgaagcacattctggtgtgtgtagatgttgccaaataattgttcaggttcaatccactcacgataagcaattctttgatttggcgagaaagggccttcaccggaggaatgccatgtaatggtttggtgttctatctgataataaccaccaacattaggatagctttctggtaataatgtagaaactgtatcggataaaagggccaggcaagcatcactttcttctgcttttaacagcataaaagattggcgtaaattggcctgacaaaaaagtgttagcccattgtgcagcctgggttgaatgacttccaggggggcggaaggtgattcagaaacagaattgaaaagtgattgataaggtacactatttggctgtaatgattgccagtctaattttatattcgtcaaagtgatagctacatgtagtgaaaaagaaacatttattatacaagattaggctgtgaaccaacatgccataatccttgaaaggcatgatatttgtactatcccattgatagtttaagaaatgcacgataatccggtgttgctatgacaaattaagataaatcattgctatgcttaatttaagttacgctgtcactgagagatgaaatgaaatctcaacaattggaaaatctggaatgtggctggaaatgggcttaattattgaaaaaacattcggaaggtgaagaaatcactaaatatcttgaaaaaagtgcagctcaggatgcaattaatgcattgttaaaattagagcgggaacctgtcaaggttttgcaatggatttcgctgcatatgaatcaagctctatccaaccgcatgaagcaaactatccgagcacggcgtaagcgccattttaatgcagagcatcagcactcgcgtaaaaagtctattgacctggattttcatgtctggcagcgtctttcaaatctctcccgacgccgtggtaatactttatcagaaacaattgtgcaattattggaagatgccgaacataaagagaaatatgctcaccaaattctaaatttaaagcaggatttagctgcaattttagataaatagtctttgaaaaacggtgaaataaataaaaaccccatgcttacacatgaggtttttattttatgaataatgtagataaatcaaagggcaacttttgccggaacagttacttcctgagtaccctgaatattgataacaacacggcgatctggtgacaaacacgagatcaatgtagagcgcgctttgatattgtcacatgttgagccggtaaccggatcttctttaccgcgaccctcagcctgaatactgtttgcaggaatgccttttgcaatcagatagtcaacaacggattgagcccgtttctgggacagaggtaagttatagttttggctaccgattcggtcagtgtaaccaagaactacaacatgcccctgatttgggtcaattttacttaattggttatagagtgaatcgagttcctgtttaccttcagccttcaatgttgatttgttgaagtcaaacaggacatcagaacgcagggtaaagcttttgttttcaacaacaggcatcggagcagggatcacaggaggaggcgtagcttcatcatcctgtccaaaacggtaagaaacaccgaggcttagcagaccgttatttggtttaggccctaaataagagctgcgatcctgcgtatatgcatctgaactgccttttccgctctgaccaacttttggtgcccactggtattccagacgagttgcaacatttttcgtcaatgcatattcagcaccgagagcgattagcggtgaaataccggtactattatttttcacatagtcttttgttttatctgagtggctgtaatttgctgaagcgtttgaatgccacactatgccccccagacgtgtataagcatctaaagagtctgtcagcggggcgctcaatttcattgcaagctgaataccctggcttttgaaactggcgtcattaatcttagatttataggtcattttccccagccaatcataacctaattcgaaacctatgtatggtgttgcctgataaccaacataagctccggcacccagagcatctttcttgtcagcattacctgttgctattttagcagcatcgatatctttaaatcctgttctactgtagtcggaccaacctaccttagtacctgcataccaagtatgctcttttggagctgcttgagccacagttgcaaaagttgctactgccacggccactgcgatagctgtcttcttcattgtacgcctcgttatcatccaaataataagtagttggccttaaagtcttattgttggccattggttgaaacaatctgttaggtatatgcgcttaatatcaatagataattcctgaaatgttagttaaatcagcatcaacccaactttgtagagtctacaacgaactttaaaacttacaagtacatggtgatttgtgatacatattttttaaattaatacctgtaagaaattaaatattattaatgcatagcttatgaaggcagattatttaattatttgatttttataataaataaaaaagttttattactcatagcatgtttattttaaaaaatactgagaataatcttaaattaattcaatgatagtaaatagaatgaaactttatcctgctttctacaggattatactgttcgggtgaggcctgaggacgcataatcaggcctagtgttgtgcctttctgtgcagctaatctcagtttttttactccatattcagacagttctggcagccatcctaatacgatgcagtagctaccacttgccaaggctttctccatggcatagggtgatgcaataggggtaatttggtttaattgaacgctcttgtctaaaggcaaacccgaatcgactaaccactggcggtttaatcttttattaggcgttatccagagtaaccacctgttttcatttctggattgatgtagcaaaggaagtaggatgtgattaaccacaggccattgttcacaatagcttaactcatggattgtaccgtttactgcttgtaaggcgttttgatcagcctgactaaaaggttgtaattttgtagatgtagtgcctgttacattagtgatttcgtgtttgtgagttgtactgttctcagcttcaattttactctcaatgagatactccagagtgggttgaatacgcataatgttcctcaccatgatgcctgtatatatatacagtaattggttatttggctaaaagcaagaccatttttttcaaggcgcttcgcaaaaattcatctaaaacagtttttttctaatttaatgattggcagccagaaatagattgcgtatggttttaattacttgttcttgttatttattttattaataacaggcaagggaacagagtataaaatatttagtcaggatataattcatggagtgataaaaatgtttttatctggggctcgttttgatcaattgaaacacggcatatcttcattggggaaacttaaaaagaaatcccagtttggtggaattggattatcaattgatggagtcttgttcgccctgagttatgaaggtgagctttatttacgagggaatagttatgcagagacgttatttaaagccaaaggcatggagacgtttatctattcaaaaagaggaattccggtggctttgcgttattaccgagtcagcgaatcactttggcgggatcaaaaacaattattcgaatatgttaatttagcctatcaagatacactgacagatatcattaataaacaaagaacacctctcagattaaaagatcttcctaatcttgggatggctttggagcgccagttatggaaagcaggaatatcaaaagtagaagaattgcgtgtgttaggagcaaaagtaacttatcttaaattacaacaaaatggaaagaagataagtgttaatatcttactggcattagccggagcaatagaaggctgccatgttgctgtgttgccagaaaaactacgccatgatttacttgtatggtatcaagaattggaacatggtaattagtattattcgattgcatattgatttaagacgacagatgataattgattttacatacggcaaatataagtaataaaaataacaaatccgccttcatagaaggcggggtttatttaattagatttctgattgtttatttgtttttttaaattaactatttccggtaataattcaactagcaaccctacttgctgtaatacaagttgaactttgctgttatcagaagttaattgattacttttttgtatcaaatgctctgaaatttgatgcaggaactcatcattcactctgtcttgttgcaaagcagattcgacatggcggattgcttcagtcagtagctccagaatgacaggttcattaagtctgtcacgatgtgcgcctaaggcggaaatataactcaacatggtatgatttaggcaaagtaaacgaaatgcttcttcctgagaaatacgatgatgcttgggctctgatgacatgttcgagacaaccgatgccagttcggcatcgtaattatgagcgttacggcgagcaacccgatattccagacaattactttttccttgatgatattgcaacaaaatagcattgagataatggcaattggcattcattgtacgggtgataacttgtggaaattggcgaaaattccaatcaggccagataaaactgactgccaataaggcaataccacaaccgatcagggtatcgactattctgggcaacgctacttcaaagccttcacccaatagattaaagcttaataataccaataatgtaataaatagagtggcatgtgcatactggctactacggaaggcgaaaaataatacacctgaaatgacaatcagcaataattgcccttcaatagaaggtacaagatagagaataggcaggccaatcaaaatacccgccaaagttccgataacccgaagagccagacggcggcgagttgcgctgtagttaggctgacagacaaacaggctggtcagcaggatccaataacctctttgcatatcaaatagctgaataatggcataaccagtacaaagcaaagcagacatacggatagcgtgccggaatagtgctgatttaggtgtcagattgctgagaagccgaaatgaaatatcacgccatcccgttaaggcctcatcggataattgcgtctcttcttgtttatcgttgtactgtttgtcatggctctgcctgtcatcgctttgcttattatattgagcagtttcctgaaggatcagatattgctcagaactgagtccggctagttgtgcatcaattgcccgcaaatttttcagtaaattactaaaagcaacgagcttagtatcaactagttgttggttttttaatttctctaaagagatttcaagataggtgaaagcattctcaaaccgtgagctatgctgatattgtttacgcaggataatggattgtgaaacctgctcacaggcgtgtgcctgcatggacaacaatcgctggaaacggaatagaagatcgctgtggcgcaatgtttctcgtagcttttgatactgaatgtgagacgaactggcacgttcatgaatatcctgaacaacaaaataatagtgtagcgtccttcgggttccctgctgcccacggtctcctttcaaacgacttaataaagttattttagtttgattgagtgttgacactaatgtgctgttagccatagctatatcaaacacagcctgctcgtattcctctgcttcagcatctgggtcaaacaaatttgttttggcgtgtaaatacacagaaagctgatgataacagagcgccagattttcttgtaacgggcggataggaaatagtccatgccctgctagtgtcagcaagttataccaaattgcaccagtgagtaataataaaggttgctgataccagacagggaatatcgatgtacccagcatagtatatattgcaatcaataaagcgccgaaagcgatggtggcataacgctgccctaaagcaccaagtagtatgaaactacaggtagaaatcgcaagcccaagagcgaagaaccaagtgtatggaaaaagtaaagtaatagaaacagaagcaatacagaaagagactaaggtgatgaccagattgcgcaaacgacccgctaaacgatcatctaagtctgttaatgcggcggcgacaacacctaacgtcaaagggattgtaatcttgggttcttctttcaatagccagggaaccagtgtagttcctgttagcgcaataaatatacgaatataatagaaaacgtgattgttatacaaaaaatggcgggagctggaaaaaacagttagcacaaaaaactcctaacaacatttaagtgagcagatagctcaacaattttcaggtacggtgctattacaatggaactaaaatcaacacaaattggtcaacgacttgctcggcatccttataatcgagtgcgtttactgagtgctggcattgaagtcagtggtgacaaacatcagtacctaattccatttaatcaattaatcgatattcagtgtaagcgagggcttgtctggggggaactggaatttgagttaccggaagggaaagtcgttcgtttacatggcactgaatggcagcaaacacagcgtttttaccattatttattcaaggaatggcaggcatggagctctgatatgagcggcatcagctccggtgttctgtctgctcaggtaaataaaattgataaaatccgccagcaagactattggatgaaggcggaagatttaattctattacagcaaaaaatccatgaaacatttcaatctattcccttgccattacaaagactcaaggactttgcaaactgtcgggataattaccagacgtgcctgatctggctcaatgaaggagaagaacagcgaaaactcataaaccagcaatgggctgaacggattcagaaacggtatggtgaattgttccaaatctcagaaaacgtatcattcaatccattacaatatcaggctgttattaatggtgaaaaatccatattagtttcgggaagtgcgggaagtggaaagacatcggttttaattgctcggacagaatggttattattacgccagcaggcgcttcctgagcagattttattactgtcatccgggcagaaattggttgaggaaataaataaacgtcttcagttgcgctcgggaacaaaaacgataaaagcgagaacattccatgaactggctctttgtatcatccgacaggcaaatagcaatacaccaaaaattagtgaattagagactaatactcaaaagagccatgattttcttattcgggaatggcaaagacagtgtaatgaaaaaaaagcacaggccaaaggctggcgcgaatggttgaatgaagagttaggctggcagttacccgatggagcatattggaatgacaggcaggtacaatcccgtttatccagccatttggattattggctggaattaatgagaatgcatggtggtagtcaaaaagagatgctggaacgggcttcgtctgaatattcagatatattcccaaaacgtatccgcctgatggcacctttgttgaaagcctggaaatcggcattaaaagaagaaggagcgctggacttttatgggttgattcatcaggcagtaaatactctgcaaaaaggacgtttcattagcccgtggaagcatatcctgttagataatctggagaatatttctcctctaagtattaagttattaactacacttcaagcgcaaaatagacaaagccatatattcgcagtaggagataactggcagggagtttgtcggtttaatagtcttgaatggccttcaataaagactttttctgcttattttggtgaaagtgacgagtgcattttagataccacttatcgttttaatgagcgcattagtaaaataattaatggaattgcccgtctttttcacagccaagtgagtgattcattgtgtaggcttaccaatcatagttcaataaaaggaaataaaaaatcagtcatgattttgcccgaagaacaattggaagccttgttaaaccggatgagtggctatgtcaccagtcaggaaaccatcttcttattggcccgttaccattttcataagcctggtttattgaagaaagcagcaacccgttggccgaatttaaatattaactttatgaccattcatgaatctttggggcaacaggctgattacattattatcttagggttacgaaaaggaaaagagggttttccggcatcagaaaaagaaacagtgctggagcaggttttactgccgaagcctgaaatattttctgatacacaagagcagcgcctgttatatattgcattaacgagagcaaaaaagcagctctggctgatgcaggaaccgaaaaatccatcggtatttattcaccaattatctaaattaggtgtcccagagcaccgcaagccttaggtttcggggagagaatctggttttctttgctggtggccgtgcttattttagcctttcatcaagatatccctgataatcaggtacgtaaatatcgactttttcggtaaaaagcgaagatttgataagaaaatcagcagttgttcgattggttgctacagggatattccagactgtggccagacgtaacagtgccttgacatcggggtcgtgaggaacggcattcagaggatcccaaaaaaagattagaacatcaatttttccttcagaaatcaatgcaccaatctgttgatcacctcccatcggcccacttaataggctggtaatcggtaagcccgtttgttgttgaagcaagtttccggtcgtacctgtggcatagagcctgttttgttctaatacacgtttatgttcattgacccaagacagaagagattgtttacagtgatcatgtgcaatcagagcaatacttttggattcagtcagtgtacgggttgttaattccatattaataccttcgtgaaaatgcaccatttaccaattattttaatgacaacataatagaaataaaggtgattgtcataaacactgtggtaaatgaaacgtataattattgcagcataatcataagatagggggttttatgagagatcaatatctgatagatatcctgaaaaaagtcagaacaatcgcttggtgggagcgagtgaaaaaccagatagacctagtagtctagagcacact

SEQ ID NO: 67 - DNA, 7557 bp, Xenorhabdus sp.
  unsure (1)..(7557): unsure at all n locations
gtgctctaaagatcttttattctccttacataaacaataggttggcgatatatcccacgccgatagcaacagtaaaaatggttaatacaaaaatactaactaagcgagggcgaaaaatagtgttaagcaaagttacctctggaatgcttgcaccagcaccagcaataatcagcgctgcaaccgcacctatgctcattccctgagcctgcaaggccatccctataggaatcagggtttcggcacgaatgtatagcggtacaccgatggctgctgctaccggaacggcaaatggattgtcggcaccagctacattggcaatccactcgcctggtaccacaccgtaaattaacgagccaataccggcaccaatcaacaaatatggcaaggatgttttgaacaaactgaaggctgaatgacctgcacggaacaaacgtgatttgaagtctgtcgacttcaatatgtctgcctcaccgaccactcgcacttttttaatgtctttttctaatccgaaaaactgccaaaccacaccgaccacaaccgctaggataaaagtcgatattgcatagaacaacgtgaatttccatccgaataatgtgaccagcaaacccagaatgacagggttcagaatcggtgatgaaatcaaaaatgacatggtagcgccaaatggtgcccctgcgttaagcaagccgactgtaaccggaatggttgaacaggaacaaaatggtgttaccgtccctagccccgcaccaacaatattgccacgtaaaccacggccagttaacaaacgttggacagtactggctggaacatactcctgcatcatcgctactataaagctgacgattaaaaataacacgatcagctctccgctaatgatggcaaagaacttcatagtctcagtgaaggtatttaggttcataagcattcccgttcaatgcatagatgatctatgtataagctcaaaaaaaatcacttttggcgagtgatatgtgcagtcacttccagccatgcctcgactgctacagcaaaggcctcattgcctttttccgtcagtgtatagaccttacgcccacgacccgcaaccgtttcagtatgtactgtgacgtagttaccttgctcgaattcacgcaagactggatatattgttccttcggtcggcgcacagcaacctttggtagaacattccacttcgcgcgcgatttcataaccgtgcattgggcgattccgtaatacactcaagatgaagaatttggacaaactcatcttaataatgccgttccaatacaaacggtcggtataatcaaccggtacacgtttcacagcctgaggggaagtagttgatctagtcatgacaggaattctacacctcgaccaccaatgtatcaagtccaatctcaactttcatgtatgtgtaaattgctggaagttgcggcatataatagcagtaccttcgtatcgtccaatttcttagtacaacaatcgtaagtttctgcaaaccaactgaggcagttgataatccataagttaagaaaccatacagtttcgatctttttatgactaattccttaccacgccgtaggagcctgggaataaaatcgtattaaatagcaatgatggccatgatttcaattaaaagattaataatcaagtagttagacttggttggcctaataacgaatgacgaatagattagattttttgcactatggatattgacggtgttaatcagtgacaccatcgccagtgccatctgtgccgagtagttctcacgtgccaatgtccccaaatcaattaacgtcacatccacttccggccacggagtgccgggctggttgaacagttctccttcaaagccctgcgtaaacatcgacatggccccggccatttcatcggcccgtgcccgacggtgtgccgtgattatactccgttcgacttcccagaactatcaaagtccgccaatgagccggttgtactcggcccggcaggcgagacattcgacttcatccgcaccggcaagcagacttgcggcaagtacctctttgccaaacttgttgtgccggcgcatgtcgggccgccaccgcatgttcatcactggacggacgaatggttctatgcacccaatggcggtttcgtgatttttatgggacaaaaccgctaccccgacctgcaacgggcgccaggagaaggtgcgccgaaggacacgttgcacatcgtgaagatgcgaccgaaggaactcttttacggcgagcgctacatcgtgcatggcttcgccaacgtcaccgatgagccgcaggaactgtacctggtgtggacgcccgacacgccggatgtttcgatccttccctatttcctgaatgccggcaccattcgcaatccaagcaagcccgatcagaagccggacttgatgtccagtatccggcttgtctcgatggcgccgaagtacggcatcaatcaaagctccagtttctggcagtacgtcgagaaagttgtcgaaatcgaccatggccacgacatgccggacaaccgggagaaattgctcgaactgctcgccagcaagaatgattgccggactgatggcgggccaacaaaatgaagcgcgttgccgtcatcggttgtgggctgggcggagcggccacgactttgattctacagaagatgggctttcaggtaatcgcctctgcatttatcgcttatgtcggtgatggaaagcaattcaataacggcaggcaactggcggcttggctagggttggttccccgacaagcaagtagtagtgggaaagctcaattaacctcagttttgtttaagcatcccaattccagaatcatgtaaacctaaactcggctttttgggttggaatgtataagcaataagtcccgatacaacctccagtaaaaagccgactatgctccggtgtcttgaatgttctatctgagaaatatttttcaattagtcattcactgtctctatcaaaaaccactttcttaacataacactgtcccaaagtgataaaaatttggctttcatattacgacgaacatgggtgatcagtgtgatcccctcagttttcatctcatcgcataatgcttgcgataaataccctttgtcaccatagagatgcccggttaagccttttactaacgccttaacgtgacaacttctgcttcaaattcatcacataaatcctgggataaataccccttgattactgtagagtgttgttcaacaagtaagcttcatgatatcaatgacagcattcatagcggtctggtatcagcaccagaggcatatctaagatccgcagccatcttatagctgctaccgagttgagttagctagttgcatacaacgaacgatcaaaaattaatcgacgcagcccgcatttttatcgttacgcgtaaatatttcagttaatctttaattttttcagaatattgggatattattagacctaattgtgtacatcgtagagtcaggccatgatacgttgccatctcgctcgcctgatgggagagcgaaaaatgaaaatttccgacgtcttgcgtgaaaccggtcttagcaggaatactgtaacgctgatgtacaaagaatctgcgcaaaagatcgacattgaggctttggataaactttgccgcttatttgaatgtgaggtggctgatatgctggagttcacggatgtgcaaggctaagccccatacactggtcagctggattggggggaacgacctcaaagccaccggcagcaccggagctgatggtcaggtgcttgggccgattgcggcgactcttacagcacaagcgtttgatgccgtagaactactttacaactacccggaagatcaggtgaggtcctatctggcttggttgcaggagctagttaccatgcctatctgtgctcacgccatttcgctatcttcacctgttaacttcggtgaaatctatgtccaggccaatcagcagctatctaagcttaccgtagagggctgcgagttatccatcttgttaagcccaggaacaccggccatgcaggctgtgtggatcttattgggtaaaacccattatccctgtcagttttaccaatcatcactagagcagggtgtccaacaagtggatatcccctttgaggtttcagcggaatacctgcccgccgctaaaagcattgacagcgcaaagattagccagctggcagaggccagtgcccctatcaatgcagccttcgacaacattgtcacccgtaacccccgcatgcagtctctaaaagcgcaggcgcaaatactggcagaacgtgaagtgccagtgttgctctatggggagagcggtacaggtaaagagctctttgcacgtgctattcataatgccagtcatagaaccaacaagccgtttgtgccggttaactgcggtgctattccgaccgagctggtcgattcagtcctctttggtcataagaaaggtgccttcaccggtgctctagccgacaaggcaggtttattcgagcaagctaatggtggaactctatttctggatgaatttggcgaactggaacccagcatacaagtgcgtttattacgcatattacaggaggggacgttcaaccctgtaggcggcaccaaagagcaaaaggttgatgtccgcttgattacggcgacccaccgcaacctgatagaagcggtttccaatggtagctttagggaggatttgttctatcgagtggctgttggagtactacatctaccgcctctgagggagcgtgatggagatctatcattactggcagatagcttggtcaaagcgatgagtatccatgactcgatgcttaggcataagaaaatttctcctgatgcaaaaaatcttatccttcaatgcccttggcgaggaaatgtgcgtgaattgcagtccacattgctgcgagcagctctatggtgccaaggtgacgatattaccgtcgctgatatccgtcaggcgctgttccatatgccagagccggaaacagggttgatgaatatggatatatctcaaagcattgatatacaatatataattggcagcgttgctgcgacttatatacgtaaggcgttggatcatagtggccaaaacaagacccgagcagcacagctgctggggctgaaaaactaccagacactgaacaattggatggaaaaatacggtatttcctagtgattaaataaaattggcacgtcctttgctcaaactctctgtacatagagacgatgcaggtatggacagaatatatggacaaaataattttgatgaaatcagcgaacttcgaattcttgcgacctgaaaatgatttgcttgccaaccttggtagttacgccgaggcagtactgcatattgatccgggtagtgccctgacccgcctgcgcagctttgctgaagtactgaccaaggccatttataaggaagaactgctgccgcacatgccgcaatccaacttctatgagctgatcaaaaacccggtttttgaagactgcgtcagcaagtcactgattcaccagatcaactttttgcgtattcaaggtaacgataccgcccatggtgcagaaggcgaattgcgtaatgctcaaatggcattgggcacggcacatcagttggccatgtatatgggtattaaatactacaacaaaaagaaggatcagatcccctcttttgtcgatataaaagaccctacggcaactttgaaccaactgcaaaaatccgtttcaagctacgaaaaagaattacaaaagcagcaggaagagctcgaaagggtgatcgagcagctggagcgtgagcgcacccgaaatatcgacaagcttgagccacccaccaagtctgaccgacaaaaacgccggcagcagagccagctagtggccgacagccttcaatggaacgaagccaaaacccgtgcactattgatcgacgccatgctgttgcaagctggctgggatatccagaaccccgatcaggttagccaggaatttgaagtgatctttcccaataatccctcaggtaagggttatgtggattatgtgctatggggtgataacggtcatccgcttgctgttatcgaagcgaaaaaatccggcaataccaaccttcaagcaggtcgtgagcaggctcgcctctatgccgatgcctttgaacacatgggctaccagcgcccggtgattttctattccaacggttacgaaaccttcatttgggatgatcatcagtacaacacctatcgtccggtgtatggcttctacagaaaggacagcctggattatctgatctaccagcgccattaccgtgccgctgagctggaaaaattcaacccagagctcagcattgctgaccgtccttatcagatcgaagccatcaaaacagtcgcggcacactttcaaagtcagcgccgcaaggcgctgattattcaggcgaccggtacaggaaaaacccgtgttgccattgcattggctgaattactgcttcgtactggctgggccaagcgcgctctgtttttgtgtgatcgcaaagaactgcgggtacaggccgacgatgcttttaagcaaaatctaccctctgagncgcgttgtgtgattggtgaaaccaacaagattgataaaagtgcgcgtatctatattgncacttaccccggtatgatgaacccgtttctctcaattggatgtaggcttcttcgatctgatcattgccgatgaatcccatcgcagtatctacaacaaataccgcgatctgttcgattacttcgatgcccttcaagtgggcttaaccgcgaccccggtgaaatttatcagtcgcaatacgttcgatatgttcgactgcgaaaccactgactcaacatttgagttcgggctggatgcagcgattaacaacgaaccaccgtatttggtaccgtttcgggttaaagatcttaccactgatttcctgcgtgatggtattcactacaataacctcaccgaagagcagaagcgccaactcgaagaagacttgggcgaggaagaggcccgtaataccactattgcaggtaaagacattggccgtaagatcttcagtgaagatactgaccgcattattctggaaaacctgataaacaatggcatcaaagatgaaactggctccctggtcggtaaaactatcatctttgcccaacgccaggatcacgctgagcatctggaagaactgttctgcaagctgtacccgcagtacggtactaaggtatgcaaggtcatccataattccattccccatgtggaaagcctgatcaaagagttcaaaaaggctgacaacgagtttcgcatcgctatttcggtcgacatgcttgatacaggcatcgacgtgcctgaggtggttaatctcgttttcgccaagcctgtgaaaagttgggtgaaattctggcagatgattggccgaggtacgcgcctacggcacaatcttttcgggcctggcaaacacaaaaccgaattcctgatttttgaccattacgctaacttcgctttctttgaagaggaatatcaggagccagaagacactggcggcaaatctttgctgcaaactacc

SEQ ID NO: 68 - DNA, 10872 bp, Xenorhabdus sp.
gtgctctaaagcattggtacggcatcttccatttatgttgcttctgcactggcgttaaaactgggtatgaagcgtgagcatatgattgtacagaaagtggagaaagaaggggcataccagccgaccattcttccttaattatgtttctgtatgcaattgcatagcttttaataacataagcagtctaatttaaacaccctgtgagtgctcacttacagggtgtttttcattatcacttcagggtaaactgtcttcctgttcggttaactgtcaggaaacaatatgcattgcccattttgcgcagccgttgatacaaaagttattgattcccgtctggtaggggatggctcacaagtgcgccgccgccgtcagtgtctcgaatgtcatgaacgattcaccacgtttgaaattgcagaactggtcatgcccagagtgattaaaagtgatgatgttcgggagcctttcgacgaagagaaattgcgtcgtggtatgcagaaagcactggaaaagcgccctgtcagctccgatgatgtggaaacagcaattagccacattaaatctcaggttagagcaacgggagaacgtgaaatcccctctaaaatgattggaaattttgtgatggatgcactgaaaaagctcgataaagtagcttatatccgttttgcatctgtctaccgtagttttgaagatatccgggaatttggcgaagagatcgccagactacaagactagaggctgctatatgactcttgatgaaacatatatgtcccgtgcgctggaattggcgtatcaggggcgttttaccacatccccgaatccgaatgtaggttgtgtgatcgttaaagatgatcagatagtcggggaaggttttcatttacgtgcgggtgagccccatgccgaagttcatgcgcttcgtatggccggtgaaaaagcaaaaggtgcaaccgcttatgtgacgcttgagccatgcagccaccacggtaaaacccctccttgttctgatgccctgatagcagcaggtatcagccgcgttgtagtggcaatgcaggacccgaatccacaggtagcgggacgcggtttatataaattgcagcaggcaggtatttcggttgagcatggcgtgatgatggaacagaccgaaatgctgaataaagggttcctcaagcgtatgcgcaccgggtttccttatctgcaactgaagctgggagcatcactggatgggcgtaccgcactggcatcaggtgaaagtaagtggatcacttcaccagccgcccggcaggatgtgcagaaactgcgagcacaatgcagtgctatcctgagttccagtgcaacggtactggcagacgatccgtcactgaccgtccgctggaatgaactggatgcagaaacacaggccgtctatccgcaggaagctttacgtcagccagttcgtatcattgtcgatagtaaaaatcgaatcacaccgcagcatcaggtagttcaacaaaccggtcaatgttggttagcacacactgacctggatggttcagatagtgcaaatagtgctgataaaaatgaacagcaatggcctgataatatagaaaaaatattactgccggtacacggtacaggtgttgatttagtgctgttgatgatgcagcttggtaaacgtcaggtaaactctgtctgggcggaatgtggtccaacgctggctggtgcattactgtctctggggctggtggatgagcttatcctctatatcgctcccaaagtattaggaaatagtgcccgtgggctgtttgccatccctgaactgcaaaagttatcggatgcgcctgaattcacgctgatagatgtacaacagattgggcctgatgtccgtcttcgtttaaaaccgctctgatttaagtttgaacataaatcaagacgcagagaaaaagaatgtgataagatccgcgcccctgcggatatgaataagatatgaggaaggctatgaacgtaatcaaaggtgttgttgcaactcctgaagcccgcatcgctattgtgatcgcccgctttaacaacttcattaatgacagcctgttggaaggggccgtggatgcgctggaacgcattggtcaggtttcttcggacaatatcaccgtagtatgggttccgggggcttatgaattgccgttgaccgttaaggcactggctgagtccaaaaaatatgatgcggtgatcgctttgggtactgttatccgtggcggtacggcccactttgaatatgttgccggcgagtgtagttctggcctgtccagcgtggcaatgtccagtaatattcctgttacatttggtgttctgacaaccgaaaatattgaacaggcaattgaacgcgcgggtactaaagcgggcaacaagggtgctgaagctgccttgaccgcattggaaatgatcaatgtaattaaagccattaaggcttaagttttagttttaattaaggggaattttgtgaaacctgctgctcgtcgtcgtgctcgtgagtgtgctgttcaggcaatttattcatggcaattatctaaaaacagcatcgcggatgttgaattgcagtttctgtcagagcaggacgtaaacggtgttgatgtcacctatttccgtgaattgctgtccggggtagcggtcaatgcgacaaaattggatgccttgatggctccttatctttcccgccagctcgaagagttgggtcaggtggaaaaggctatcttgcgcgttgcgatgtttgaactaagctttcgtgatgatgtcccctacaaagtggctatcaatgaaggtatcgaactggcgaaaaccttcggtgctgaagacagccataaattcgtgaacggggtattggacaaagctggcccggtagcacgtaaaaaaaagtgattgcctgccaatagcccctattataactcgatgattttaaacatgaggccggtttcccggcctcatgttcttatcgtcagtcactttttggaattctattatggcatgtggtgaatttgacctcattgcacgttatttcaatcgccatgttatccgccgacgtgatgtgaatctacggattggtgatgattgggcgctgatgaccgttgcagaaaaacaagaactggcagtgacaacagatacattagtttctggtgttcattttctgcctaatattgctccagaagatttggcgtataaagcactggctgtcaatatcagtgatttagctgctgtaggggcagaccccgcttgggcatcgctggccctaaccttgccttctgtcgatgaggagtggttaaagcggtttagtgatagtctgtttgaacaactgaactattacggaatgcagttaattggtggtgacacaaccaaaggcccgatgagcctgactctgactgtacatggtctggttcctgctggtagagcattgcgccgtactggtgctaaaaacggtgactggatttatgtcaccggaactttgggtgatagtgcggcaggactggctttgttgcaggatcgtctgaaaatcgaagaagtatcgatccataattggttggttaaacgccatcttcgtccgcaaccacgagtcttgcaagggcaggcactgcgcgatttggcctcatcagcgattgatctgtctgatgggctgatttctgatttgaatcatatcctgaccgccagccagtgtggcgcacgtattaatcttgatgctctgccttattctgaagcagtgcagaaatatgcaacgccagaacaggccttaaactgggctttgagtgggggcgaagattatgaattgtgttttactgtaccggaactgaatcgtggtgcattaaatatggcattggcacatacaggcgcgagtttttgttgtatcgggcaaatccggccagaatcagaaggcatccgctactttaacaataacgaagaagttgagctggatctgaaagggtttgaccatttcagaacggacaaaaagccgcaggaagctcactatccatcagaacatgcagaggatgaccagacggagggaacgcatggatgacgcaaaacgccacctgaagatgagcaatccgtggcatttgctggctaccggattcggtagcggattatcgccgataatgccgggcacaatgggctcagtggcggctattccattctggttactgttggtacagttaccgcaatgggggatctggctggctattctgttgggcacaataatcggttgtgtgatttgtcagaaagcagccgatgccatgaaagtagatgacccgggctgtgtggtttgggatgagtttatcggaatgtggattaccttaatggcgatccctgtcctcaactggcaatgggttttagtcgcttttgtggtattccgtatttttgatatgtggaaaccttggccaatccgctggtttgaccgctatgttaaaggcggtgttggtatcatgctggatgatattatcgctgcaatttttgcggtaattgttatttggttgcttaatttttaccagttgttacctttctgaatatcttactattacccgcattactgactgattagccgctgtttacagtggctaatttatttttccatataaaaggttaaaaccaccgactttagtcggtcagctttagctgcgatactgtgttacacgagaggtgcaatatggattacagatatggcagccacacggtatttcagattgagtatcattttgtgtgggtaacaaaatacaggcacaaagtgctaacaggtgaagttggtttacgggtgagagagttagttcgtcagacctgtgaagcgttcgaaatcaggatagtagaaggggtcgtgagcaaagaccatgtacatatactggtgagttgtcctccgagcttagcgccctcagaaatcatgaggcgaataaagggaaggacagcaagtaagttgtttgaagagtttgctcacttgaaaaagcgttactggggtcagcatttttggggcagaggctatttttgtgcgacggtaggtcagttaacggaagagatgataaaggcctatctggcgcatcattttgaaccgaacccgaatgatcacttcaggctggataattgacgcatcgttcagtcgatgcgtatccggactttcagtccgttaatcactaacccaccgactttagtcggtggttgttgagttcaggcatttttatcagttcaggcatttttatcagtatcttgattcgattctcaatcagcccttctatagctgaatcaaaataattagacatatttcacatgcgtcataaacagttcatcaattgaacacctttctcgtcttcttatcgctttgacttcagcccatttcggttcgatagggttcaaatccggactgtaaggaggtaaccattccaacaggcaaccgtggtctgctatcgcttttagtgtgtcatgccgtttatggaagggggcattatccatcacaatcacggctccgctggggagcaaatcttgtgtcatccaggcatgaaagacatccgcattaatgtttcccgaaaataaacttaaggtcacgaaggtctttttgaggatcgcgccaatgacattaatgcggtctttggcctgccaatcgtgtgtgccgaagcagcgtaaccctttcgccgaataaccgtgtgtgcgaggcatcgactgcgaaaaaccgctttcatccagataaacaatcggtttcatcgcctgttcgtagtggccgatgcggtcgacaaacgcctgacgcgcctgagcgtcagcgttggggtgtcttagcgttttttttgactgtcattttcagccgtttcaaggcgtaatggatagcagactgcgcgacacccaagcgttttgccctttcccattgatagtcatcgggggtaattttggacatcagtgagaagcgcttcatcactgattttcgtgggcggcttattacgggtcacacagggttctattttgtgactccaccgaaataaggtccgcatagaaacctcaaaatgggtacacgtttgttcgaaggtcaacgaatgcttgtctttatatgccagtactcgctttcgaaaatccagactgtagcccatctcactttatcctttgtcatatgaatccagctattatgtcatattaatatgattctgctatatatacttgagtactgcaatatcgcctcaccaataacttgctaccaaatgcgttacttttttaataaatggaaaagattttctgtataaaatctattctgacatttactcttacaattcatactttgtttttagtactaaggattgcaatcaattatagaggtgtcatattaatgaaggctgatgcattaaggtaggttggggtgcaatttgataagaaataggtatgtaagaagagcccgtgagagaaaaaatctggctcataaaaattatgcagtaagatatatcgcagggcagcctgtagagagggtttttcctacttccacgcgattacttgaagaagcactcttgccatgtggagagccattttttgctgataataatgtgttttctgttgctatttggaatatccataaacagcaacgcccacgatggcaaagtgttttatcttccttaattgaaaaaagcgatcttattttactgcaagaagcacaaacaactcctgacttactgaaatttatcacagccagtggcttggttgcagatcaagtacctgcatttgctattcctcaacatccatcgggtgtgatgacattagcctcttcttcacctatctattgttgtccgttaagggaaaaagagccgatattaaggctttctaaatcatctcttattactatgtaccctttagccgatgaacaacagctaatggtagtgaatgtacacgccattaacttcagtcttggcgttgacgtttatagtcgtcagttggataacattggtatctatattaagttacatgatgggccagtgatatttgccggtgattttaatgcgtggagtcgtcggagattcagagtgctggagcattttgcgcagcgtatggggctaaaagaagtctattttaacgatgatcatagaacaattgtatttggtaaacccttagactttgttttttatcgtgaattaacagtccagagtgcaaccgttttaacaaccattgcttctgatcataatccgcttcttgtccgattttcgttataagttacgaagattttcaattaataagagtggtgaaaggtaaaaaagagcaaaacgccggaaattgctccggcgtttttagagaccaattttattggctagcacgatgagatgtggcaagttttttctttatgctgaaaaaataggcaatggttaggataatcacccagccagcgccaatgtatatagcatccctcgtttgctcaaaatatccgagtagcaggataattgcacccataaaagcaatcgtaattatgggagcaatgggccacattggtaccggaaatttcaaggttctgatctcttctgcactcattttacgacgcatagccacatgagaaagcagaatcatcaaccacacccagacagtggcaaatgtggcgacagatgcaataagaataaaaatattgccgggaagcagccaattgagcatgacaccgagcagcagaaccacaatcatgaccagaacagtcatccatggaaccccatttcgggtcagttttttaaacgcctcaggtgcttgtccttcctgagccatgccatacatcattcgtccggcaccaaaaatatcgctattgatggctgaaatggcagcagtaataacaacaacattcagaacatgcgcagctgcactgattttaagatcagaaaaaatctgtacaaatgggcttccattctgaccaatttgatcccacggatagatacacatcaggatacataaagtcaggacatagaagattaaaatacggaagggaacagcattaatcgctttaggtattgtttttgccggatctttcgcttcactggcagtgataccaatgacttctattccaccgaaagcaaacatcacaatcgccattgaagcaaccactccgctgatgccattcggcataaagccgccatgttcccataaattagcgatccctgtggcatgctctgttgtctgaccaaaaccaaagatcataattgcaagaccgccaatgatcatggcaataatggcagtgaccttaacgatagaaagccagaactccatttcaccgaaaatcttcacatggcatagattcagcgcaccaataaaacagacgatactcagaacccaaatccattggtcaacatcggggaaccaaaatttcatatacaagccgaatgcagtgatatcagcgaggcaaacaaacagcatttcaagaacatagagccaacctgtcaggaagccggctaatgggcccagataatggctggcatactgcgaaaaagaaccggaaacaggatggtggacagccatttcgccgagtgctctcatcaccataaatacggcagcaccgccaattagatatgccagcaataccgccggtcctgcttgttgtattgcagctgctgagccataaaacagccctgtgcctattgcagagcctaaagccatgaagcggatatgcctcacactcagaccctgtttaagctgattttcattgtcttgcattcgttaatcccatctatctttcatgccagagagtattttcaggcatacaatgctatttcaggcatatgctatttcaggtatacaatgccctgtctggtgtcagataccagcaaaagcaacctcgtacgataccataaagatggatgtccgcgggatagatatctgtaataataacgggcagtttattaaaaccagagtttttttatgatttacccaataaatgagatgtttcagactttgcagggagaaggtgtgtttaccggtgttcctgctgttttcatacgattgcagggatgtccgatagggtgcagctggtgtgataccaagcatacttgggaaaaagaagctgataagcagcagtcgatggagaacatactggtaaaatcgcaggatagcgatacctggggcgctgccacaccagagcaaatcattaatttgttcactcgtcagggatataccgcccgtcatatcgtaattacgggtggagagccgtgtttgtatgatttacgtcccctgacggaagcactggaaaatgcaggctatcagtgccagatagaaacgagtggtacacacgcgatccactgtactgacaaaacttgggtaaccgtttcaccgaaagtgaaaatgcggggcggatacaaagtcttgcctgaagcgatgaatcgcgcaaatgaaattaagcaccctgtcgggcgtgaacgcgatattgaatcattagatgatctattgactatgcttgatgaaaataacagaccggttattgccttacagcctatcagtcagaaagaagaagcaacccgcttgtgtattgaaacctgcattgcccgtaactggcgtttctcgatgcagacacacaaatacttaaatatcgcctgatgtgcgtttggcgcttttattgtgcattcagcaccaaaatttggtgctgaatgtcttactctccacgatagatacaaccggcactacaggtttctttaaccataacggcgctgagttgtggcaaagcaggttgtaactctctccaaatccattgagccagtacttcgctggttgggttttccagaccggggatctcattgagataatggtggtccagccgttcccaaattggcttgaagatagctttcacatcggcaaagtccatgagccatccgctatgaggatcaatctcaccggtgatttccagacgaaccataaatgaatgcccatgcaagcgaccacatttatgtccttcaggaacatgtggcaggcgatgcgccgcttcaaattgaaaatctttaaagatggtagtgctcataatactttttcctgaattcaaaaggccggctattctacctgaactttcgcgcctaacgtgatttttctgtagaaataaaatccagcgtttaacaactttatcgatatattaaatctgtaaataaagttaggtaatttagttattagatattgctaacctttctttaagtccgaagcctgttctgggataaccttatgattactccatgtttgtgactgttaatcatgggtattggctatagcaaagggcactggataatgactgcaaaaccaccttcaactgcattactacctgtatctcaggaacaattgtcacgcctgcaatcagaggttagtgatttttctgggcaccaactggcttggttatcaggctatttttggggcatgttgaattctcaaccgcaaaccaacacggtagcatcagtgtcaggcatacctgaaactgaacaggaaaccgtaacactgatttcggcttctcagacgggtaatgcaaggcgtctggcagaacagctcagagacgctttactggcgcagaatttgagtgtgaatttagttaatgctggtgattataaattcaaacagatcgcaaaagagcgcgtattgattattatttcttcaacgcagggtgaaggtgaacctgccgaagaagctgtagcactacataaatatctgcattccaaaaaagccgctttgatgaaagagacggcttacgctgtatttggcttaggagatacctcctatgaacacttttgccagtcaggtaaagattttgaccgccgcctgagtgaattaagtgctcaacgattactggatcgcgttgatgctgatgtggaatatcaagatattgctacgcaatggtgtcaacaactgaccgatattctgaaacaacgcttaccatctcaggcaaatacagcaatagccacaaca

SEQ ID NO: 69 - DNA, 4623 bp, Xenorhabdus sp.
actgcctggtggttaaagtgcgtcaggataaccgagttatcaataaatcggtcttcatcgcgttaggcattaataccgaaggtcacaaggaattgctgggcttatggctggccgagaatgaaggggcgaagttctggcttggcgtactgacagacctccataatcggggactgaaagatatttttatcgcgtgtgtggacggattaaaagggtttccagaggcgattaacaccgtttacccgcagacacgggtgcagatgtgtattgtccacatgatacgtaataacctgcgctatgtatcctggaaagaggccaaagcggttgttaaagatctcaagcagatttatcaagccccgacagaagaaatggctttgcaggctttggacgcttttgctgaacaatgggatgagcgttatcctcaaatcagccggagctggcaagaaaactggggcaatctgtccacgttctttgcctatcccgctgaaattcggaaagtgatttacacgacaaatgcgatagaatcgctcaacagcgtcattcggcatgcgatcaagaaacgcaaaatattcccgtcggatgattcggtgaaaaaggtgatctggttagcgattcaagcagcgtctaaaaaatggactatgcctatccaagattggcgtcttgcgatgagtcgttttatgattgaatttggtgaccgtttagacggtcatgtttaattggaaatggcgattacacaaaatcttaaacaaggtcataaattttgtaaatgctgagtttgtacactacatctgtatgaacttttcaaaatctactaactttaacctctgtgaaattttattttggacatctcttaaagtttcacatccattaaatacattttcaactcctaacttttcacttacatgatttgctactttttttacccaatatgggctgaacatagcctctatttttccatcgatttcttctgccatatcactaatacggctaccctctccgataacatcaacaataaccatagtgctaacattatgtcttataccaccaatatcatctatccttctaaatctggacactttatctaaactgatttcagtatttcctctgccaataaatccaatatccaccctgattatttttcgattaaacagaacggtcgcatcagactctctgtcatcacttcttaacgataaagtaaaacatttattgtcgagattttcttctaaattttttgtatactcaaagcctaatattgtaaaaagagaaccaagtattagcttttcgaaatatttaccatgtagagacttttcagatcctctgatagtaagtgtttgtgaacccaacgaaagaagcatgtaacagaaatcttctaaaggaacatctatatcatttattttaatattattaatagtttcactatattcttttattgtttccattatctgttcttgtgtgcgttctgttaaacggccgaaaccatcatcatgtgcatctctaagaacattttgagtctgcttgtttgtcatcattacaagccattctaaagccggcttgtatttatttttatattctttctcgatcaatgcattctttgccgacatgtataagcttttaggataatttcctttttccatttcctttatatagaaagataacaatgaaagattactttccaaaagtctagtcctcgttaacccctcagtaaattccctcacattcttaccagttaagacatcataaactaccttttgaaatacttcagaaccaaacttgtcaaaaacatcattcttagaaattttagccaattggatcaacttattagggaaagcattatcttcattaaaattcatttttaaaaacccatggacacataacaaaagtcttggtatgctactaaaaagacgttaataggtacagttatgaacatgaccgattttgataccatctatgcgaaacggaaatatctagttatttccgttgaaaatgcaaagtccatagcaagaaattatttaaattcaaacgagttaagtcaaaaattttcatttgggcttcctgaggtggatgaccgctatcatgtttggcgcgttcctctgacacttgataatataagagttggtgaaattgtaatcaatgctaaaacagcaactattgatttggaaaaaagttctaatattgactttttatttcgtaaatcaaccgaagttatcaaaagagaacccaaaaagagaaatagaacgaagaaaattgaattatctccgttagaaaatactattttggcaggtaatagtgtaaatacaatgaaacacttaccagatgagtccataaatttagtatttacctcaccgccatattataatgctaaacctgaatattctgaatatcatacttatgaagaatatttagaactaatgagaaaagtaataaaggaatcccatcgtattttaagtgaaggacgtttttttgttattaatgtatctcctgttctaattagaagagcctcaagaaatgaagcatcgaaaagaatagctgttccctttgatctgcatgctatatttacaagtgaaggtttcgagtttatagatgatattcattgggtaaaaccagaaggagctggatgggcttttggtcgaggccgccgctttgcggcagatcgtaatcctttgcaatataaaccagtaccattaacagaatatttgctggtttatcggaaaaaaagtgataagttaatcgattggaatattaggagtcatccaaataaacaggatgtcatcgattcaaaaattgacgatgattacgaacgtactaatttatggaaaataaatccatcccgatataaaaaacatccagcaacattcccttttgaacttgcagaaaaagtagttaaatattattcatttaagaatgatgtcgtacttgatccttttgcaggttctggaactacagccaaagctgcaatatctctcaatcgaagatttgttatgtgtgaaatttctgataagtatgtagagttaattagagaagaaacgctacttgctggaaaagtcaatattgtaaaagaataaaattgcatagccccgaatattattgttcggggctatgcgtatcatttaaaaattgatcccgtatccatcttcatcactttaattataaatatctctatcttcgaccttttctataaatagatcttgtaaacttccttgtatttcttcatcttcatatactaatgtgaaatcaccatcaatatttggaggaaaatgagaaccatcaatagtcccaaatatagttgatgcggtatcagacattattaccttaaagaaattaaaaatagctgcttgatcgtcattatctaattttgataatgctcgcttagctcttgaatatactccttcgctattactatctgatgattttgttaaattatccttgtaattcaaaaaaatatcgtcaaacaactcactaaaaatagattctactaccttttcatcatttttcatttaattcccttatcaacacatttaaatctaacttctgggtacatcctcttattcatatcaataagatctttaagtaccttattcggtatttcaggataaacccgccttaattctctgatatcacgagcaatcaactccctagcattagtaaatttctctcctgtttttgagtttttagtgcttcttgatacaacgcctaaatcccctttagatattgtatgtccggattttggcaccaaaatagctggtccagtacttggatcatagccttttacaagatctttcattattgctttttgaccagcatggtgagcatcaaggcctaaatttttacctttgactaaatccctcaattttccatattcatcaacggcccaatcttttaccccagaaccaggacaagaagttaaccctaatggatcgatccaacttgttggatttgatacataagcataaggattcttcccacctactagtcccaatggatcgggcgtgaggtacatgcttgcaacaggcgagtaataccggaaccgattgtagaccagcccgctctcttcatcccgccactggccggcaaagggccatcagctctgaggcagtcatacccgtagagcagcgtcagcccgcgcagggcaaggctttcagcaggacacgtttcacccattttaccccgatcacttttttgaccccgacgtacagtttgggattgtttttcacttctggcaacgggcgaacgctgcccggcttgccgggcggcgggcgcacgttctgcgggagcgggcggcatagagcccgcaagcggcgccctgcgacgctctggggcattgaggctcagaatttggctcggtttgttgatggcgctttgttcaagggaagccccctgcgggggctgcacggggcggcgatggcgagcacggcaacgagcaaggagcgcagcgactgcgagccgggcgcagccagggcagcggggttggggcgggggaggtaaacgcggaggccgcaggccgacctgccttcagggggtgtttgcccaggtaacgcaaggcagctaaagaggaagaaaagggggtttagctgaacgtgggcacggtgtttcggtctggcgcaggtttttggcaggcatcggcttaaa

SEQ ID NO: 70 - DNA, 7967 bp, Xenorhabdus sp.
ggaaaaagttttcatcttagaaatgatctggcaacttcattttctcctgaaaaatatatagctggacttgatatagaagataataattccatcccaatttggaatttcatttatcatcgattgcattatgatgatctaattcgtgataaagagtatgactctggaatatttaatttatattattttgatttttctgattatgttatctattttggacagttcctgatttttatcttattcattatccacattttatttttaatccctcaggaccttatcataatcgatcgtgaaagacagatcatattttctccatccttaaaacttagcgctgctcgttatcagcaagctggtatttcctatcaattcaccccattgcctcagagcaaaccagatggattaatactctattttataaacaataaaaatacgttatgttctactaattttcggttacatattactaaatgtctttggggaaagaaaagacattccatacatactgaaattcaggcttttattattaactacataataaaaggtaaaaaatcagtcagtgagactgattttaaacgtagtagttcgttgttttggcgaacaggaagtctatcatttgattttgatgaaaaaatagagcatatcttagcagaattagataagcgaaatcacgaaatccaggaaaagaaaacgagtaatatcggaaatactctgccatgaagtggctacagaaattgaaaactcacaaaaatgggtcactcatccaacccgttggtagttgtgtataattccccttttttcggagaaattaaatggtgacggttgaagtgaaatgtcgattttgtcagcaaactggattcgttaaaaagtggggtaaaggcgatgcgaggcatcaacgctatcgctgtttttcctgtaaacaaacctttcaacttgaatacgcctatcgagcgtgccaatccgatataaaagaacaatttgttgagctggctatgaacaacgccggtattagtgatactgcccgcgcattacatatcagcatcaatgccgttgttcgcactttaaaaacttcaatcccgatgcgtaacaactctttcgctggataaagtagaagttcagcttatctgtgaagttgacgggatgtgatcattcgttggaaataaaaagtgccaacgttggttatggtatgcttgggagcctcgtctgaaacggatcattgctcatacgtttggaaaaagaagcaaaaaaacacttaggaaactgctcaaaaagcttgcctcgtttaatgttgtattctggtgtaccgataatttcaaggcatacaatctgttaccagaaaaccaacatcttgtcggaaagagttttaccctacgtattgaatgagaaaatttaactttacgcacccgaattaagcaactcaatcgtaagacactcggttattctaaatcatccgaactgcacgataaaattattggcacattcattgaatgtcattactatatttgatacccatcaacaaattgaatacatctccaaatactattccagtaattcgattcatcaaataaaagattgaacttctaaaaatcccactaatgtttttatgaccagatatctctgcaatgcattgataactttcacatactgaaaggatggaatgaaattactcacatgtaatcctgatcgaatattgtagttggtacgctcacaatttacatctgtgggatagttgaccaaagccaattaggacacactgatatataaaggaatataaaaaataattccaaatttggacattattggaatgctttaccatacttaagtataggccctttttcctttgatggaattggctggttccagattttccacaatatatcctattacattttttaataaattatatttaataaaaaataccgatagatttaaatattaaacttactatcatggtgatacatttttcatttaaggtttttatatgaaaataaattaaatttatatataataacactatccatattatttccctgtcttagtagaggctatgcaaataacttaacaaaccattctttcattccaaattacgagaatagaaattcaaaaaaaaatccaaacattttttcatcaagatataaattaacctttaaaaacagtagtaaatatggtgagttaaaaattcgcgttattaatgatagctgcatgaaaaatcatggatctgaatatatcaatttgaaaagtggacaaagttatagtgaaaacatcgtagattacaatacaataggtagctgccatagtgaaaataaattcgtggaatggactgcaactacctatcataactttcaactatataaaacatgtgatttacaattattaatatattcagaatcactttttggaccatggcttagttcggttaatacaataggctattgtaatcttgaaatcagcgctacttgcaaaaaagactatgactgtttaaatcatgggattttggttgaggatggctatagtatgaatatagatatcaaggatgattatgttttcacaccaccaaaaattacttccactgatccgcaagagcaagcccaaaataattatatcactattatgggacagggtcttatgaaagatgaatcgttaccttatcttgtcactaattttgaccaaaataaatataaagttgagcttatagaaggaaaaaggactcaatggcgggcaaaagtctggataaactgcgaactaattcccagaaaaattagtattgaaggtattgaaaattcaggaattattattaaaggaccaccatgtggtgcaaccataacgtcaatgaaggattctcaaattatacccgatggaaaatatgacatatccggtttaattcatactaaaattctaaatgatgctaaaaaaattaaagtgtcaatttctagttttgatgatcctgattacactcatacttctgaaccaacgaaagaatatacacctgatgttgatcttaattccggcacatggagcattaaaggtttaaccgcaaaatgttttaattactataaagcatctgtgatttttaaccagaataggaaatatgacaataatctccccggaaaaaaagaaattaaatttggtgtcgcacgttgtccggtaaaaatcacaaaacctgttatgcatgaatttattacttcaacagacgacaatcctaaacagattgtaattgaagggaaagtaacggaaaaaacaccgctcgatgtcattgcaaactactattcaaatggtgaacattctctcccaattctttctcgcattggaaatagctggcaaactaaaattagtaatgctcctgccggttttataaaaatcaaaactaaaaatacaggaacaccaaatgttcccattaaaaatagcaatgacgaagtcactatactgaaatcaaaagatttctctgtaaaatatgaaatcatcgatgatgtatttatccacatttatggaacttccttacctaataatgataaaaaaatcagtgaattcaaagaaactcttcaccctaaaataataatattttctgacggtgtaaaatcggaagaaatcattcctgatgaaaaaggaaattggtgttcagacaatgaatattatgctaaacgaggggtgtatctttttactattcatgaaacatctgataatgaaaattatccagcaaggaaagataaaacactggaatgtactggaggtaatgaccatatgacttgtattgaaaaaaataattaatctcccattcaggaggctgttatgatgatatttaaagtatttttcaccctctcattattatcttacagtataaatgtattctcagatactgtattgaaccctcacccaatagaaacaattgcgggaggagaagaaagctgtattgatagtaaaaatagtaaatgcaaaccttgggttgtaattatccttaagcaaaatagacaaggaataaaaatgggttcatgtagtggttcgttgatctctccaagctatgttttaacagcagcacattgccagggtgacggtaaaatcattaaaacatattcgattgtaaattataaacaaaaagtaattggcactgcagaatataaaaaattttttccatactatgagagaaaaggtgcgatcgcagagtttgcaataataaaattagataatcctactaatgatgtagataattatggccatgttcgtcgtttctttgactatgatgaagctaatgaaaaaatagacaaaaattattataatgcttctgtctatggctatggtaatttgggaattgatccaataacaggaaatcaggtaagaaatactgaaaaaaaacagcggagagctgatgttaatattgtcactaatgctgtagatcgtgaaataaatcatgggcttcttataaaagaaaataaagatttaaagccaggaattatacaacctggagactctggcggcccggttatttggcatgatacaatcatcggtgttgcatccacaggattaaatactcttaaagatagcaataaacctcgtccattttttttcgcttcagatgttacaggaaaatatcttgataacaattttattggcaaaagaaacctaggaggttggttttctaaaaaaatgaaaagaatatggatctccaatccggattggggtgaaaaattaagtaaaaggagaaaaagcatacctgtagagggatttggccgtccatctgctgagatcaatcttcgttactccattgatcacaaagaggaaaaaagcactaaatgtaaggtaggcgaagatagtaaatggaaatgtaatatcccatatgattcttattttactgatataattcatgaagatcatgaatatgaaattactattacagccgaagagttaaatggaaatgataaaccatgggagagtgataccataacagcaacaataccaaatgcagagcaagaaattagtattatttacccatcagataaatcaatagttctaaccaaaaactttaccatacgtggatacgccgaccctggttctgaaataatattgacattaagcgctaaccctaagtatggtaaagaagattatacacaggataaattatgcgccgggttaaataataacgaattgataaaaacaggtgagaatggactatggtcatgcagtataaatactaatattaatcttaaaaatttaggtaaagatgataactattatataaatgcagtacaaaaatacaaaaaaccaaaaaaatccaaaaaatccaaaaaatccaaaaaatccaaacataaagaaataaaagataaagttagcattagtttacatccagaagattattccattttaaatattgagccaaacaagaataaaaaaggaagcatatataggaaaatattagaatataacgcaacctatgctaacaatgcaaaactagtttgcatttttaacggttattatgcaaattgtaaaaataatcctcgaggtgaagataattttcatttaagaaattcatttgcatcaaaagaagattttaattcaggcaaaaaacagtttttatatatcagtgcaatacaaaaactggagaacgttgacccgattgatccaaagttatggtatcttcagtttttcgaatctgaaggcggatatcttatgccttcttttaataaagaatataagatggaatcaccaacagaaatcgtatctactgatatccaaaatgaaaaattcgatggtcttggtggtgataatcaacgttatactctctcaaatgatgatatacttttaccttcagaatattctatctgcatgaaaaaaagcaatcattcaccttcaaatacccctcaatgtaatagcgatgataatgataagaatatctacgtaaaaatcccattgaaagagggtaaatatttttccgaaataccaatacaatatagtgaatttggaaaaaggcatgattttccaaaatggagtttatcgcttcctcctgaattgaaaaacggggtttattatattgaggtagtggacaggtttctccctcaaggactcaagattgaacctcatattttttcagattccttatcaaaagcatattttcaaatcatagcccctgacgttaactttacaagcccggaaaacatctcagataccgttacgacggtatcaggaactgccagtattcccggtgaaacagttaacgtcagaaaacgtaaactcaccctttctcggggggcatcagggggagatacgtcagacatcttcccggacacaatttgtgaggatgctgtcgtcagtgataatggtgactggggatgttggacacccgtcactttcaccgaaggcacgtatgaactgaccgccgaattaatgaaaggcaacaaagtagttgcgactaatacggaagtggtgactgtggaagaaaaagagccggatgaggacaaacctgaaattgataatcccgccaattctccaccgattgatccagacggcgggttaataagcctgttcggtatattcagtgcggcggcaggagctgcagcagggctggccaccgggctggcaggagctgcttctggtgctgttatcggtgccgtttctaccatcgcaggccttgctattcctcattggggattaaacattgacacaagcaaattacgcggaggagaagcctatacattagtgatacaggaaaccaaggatgggaataaaattggtgcacctatcgaatggcactttactatgccaatacggattactgagccgcaaaaaaacgctcattaccggataaatagcgctatatcaattcaaggagaaggtactcccggccaacagatccttatcgccagttcaaaattgtttctaccgccaaaagaaaccgtcctgccgactgcatctgatacactgatttgtcagaccaaagtggatgccaacggtaaatgggtatgcccaaataatccagtcatgacggcaaaacaggaaggaatattctccctttatgcagcccaatatcaagaaatccactcagaagatctgaccatacaccattataaaagaacttcggaagttacacgccaatatgagatcacccaaaaccgaatcagtatcacagcgcctaagcagaatgctaaattccaccggaaacctttcgacattaccgggataggcgaacccggcgcccaaatacatataggcaaaaaaggtaataataaagcgtgtgataccaccgtgatcgcatccggcaaatggtcctgcgggccttacctattcgggaagggaaaattcacggtatcggtggaacagtttatcaactatgaactgcattctacagcacaggtatcctatgaaatccagccagcgaatggcgcctcttcagtaatctacttacattttaaccaccattctaaatattaggccttctatctaaagaaatttgagcaaaatgaactacagcatagcgcctcctgatagggggcgtgtttttaacctcagactaagaaaaaatgtgaaattctggagctagaattacaatagggaacctctaaaaactctcaatacaaaaaataagatcaattttgaactcaccaataactgaccttattgtgtatgactttttcttgcttgttcaggggaaaaaaacaaacgcatcactttttcatcacatctcgaaattaaaaagcatgaatacccgattttccgaaataaaccaaacgttgcaaatcatagcaggttgccttcatcgtcatcgcaaaattggctcgcagctggcctatcgtccgaataattttttcacccatctgagagagtgagccaaagatatgttctacgcgtgcccgagttttcgctattttcttatttcggcctttttggcagtgtgataagggcttattacgtgccgcttttctctgaatatgcacacgatagccctgctccttcagcacacgttcacgcttctggctagcataccc

SEQ ID NO: 71 - DNA, 11844 bp, Xenorhabdus sp.
ctaaagtagcgcgacaggttatatcgcaaagtacatttccaaaaatattgatggttatactctggaagatgaaatcgatcatgaaacgggaggatcactgcgcgatatggctaaatcagtaacagcttgggcgagtcgttggcgaattcgacaatttcaacaaattggtggtgctccggtttctgtctggcgagaactacgtcgacttaaagaagttcatttacctgataataaaatgaatgacgttttacaggctgcggataagggaaactgggcggcttatattcaggctcagggagggccatgggttgcccgtcgtgatttggttatcaggctctcttataagcgtatcccttttggtagtccttatggtgaagatattcactccattcagggagtgacatcgtcgttgttcagtcaggaaaaatatatctgtacacggatccatcaatggacagttgtcccgaaatctgatgcgccagctacatcagatcagagcggattgtctataaacgacacaaaaaatggccctcttggagttctgtcaataactgtacggatagacagggaagacgagattgtgatatagatgtgaaatggttttgataaatgttattttttagataaaagtttctatgaaagaaataaataatagttattaactatcaatttttatctttaagaaaggaaaaaactactttaaattttcactaattaggtgtactgtatgcatatacagttatagagtggaggcggacatatcagtggactctcttatggaatcattggtagcacaacgtattaattttattgccagaatggcaacaagttgtgaatgcaatcaggcagaagacaaagaattggcactggtctggatagcagagttatctgcaccttatgaaaaaagtctcagtggttataacaattttttaaaaaacaaatcattagataatgaatgattgaaaaacttcgggttcggtaaaagaataggttttagcgggagaaaatgatgcgagttgaaatacttttcgataagcgagctaatgtttctgaatcagtcatgtctgcacttgaaagcgagttaaagaagaaaatactgccacagtatcctgatactaattttagaattgccctcagcagcaacacgtccgtaaaagtgacagggagtaaaaacagtagtgaccatgatcaaatcatggaactgatccaaagtgtctgggaggacgatagttggttattggattaggcctgatgggttgaaccctccaataaacggataataagcaatttaaatagtataagggcagggattatcccctgcccttatactttcctgaacagtgaaaataaatcccatctggcaaaattgcccttcatttgtgctatttccccaacaatgccatttcattgaggcatttcgctgattattcgatcataactctccgatttaccgattattttctgcaaataaaaggagagtatatgcaaattattgcacaacaaaacgaaacggtagacgctttgtgctggcgtcattatggccggactttaggtatgacggagcgtgtattgcaggcaaatccggggctggctgattttggcgcgacattgcctcatggaacaaaagttgaaatgccggattttgtgcccgttgccagtaagcctatgattcagctttgggattgaggggcatgaatggataaatatagccatgccacttatgcctgtgccagcacaaccgccattttttccggtctttctttatatgagctgagttttctgttgggagtattagccagcatttctctcggtattctgacttatcgtcttaatcgacgtgagcagatgaaacgcactttgatcttaaaagatattctggaaaatctggaggtagagcctgcatctaaatcagccagaatcgtcagcgagctgatacataacgcaccaaaagagctgtgatatgcaggatctcaaaaccagactcagccggttgctcattggcctgattatcggtggcgccagttcttcggtcattctttcccagtttcttgatgagaaagagggcaatcggcttgttgcttatcaggatgccggtggtatctggacgatatgccggggtgtgacgcgtattaatggaaaggcggtatataaagggatgcaactgacttctgagcaatgtgaagcgctgaatcgggttgaagctgacaaagcgattgattgggtgaaaaagaacgttcatgttccgctgaccgagccacaaattgcgggaattgccagtttttgcccgtataacatcggtccctcaaaatgtttctcctcaaccttttatcgcaaactcaatgccggagataaaaaaggcgcctgtcaggagattaaacgctggatttacgatggcgggcgagattgccgggcaaccaaaggacagccgaatggctgttatgggcaggtattccgacgtgaacaggaatctgagttggtttgttggggattggaggaatgaagaaaatatcgttaattgctatttttgtcattggaggatgtactggctggtgggggcatcgttcactgttccttggtgaggttgcgaaccttaaacaacagcatagtgctcaggttgttgccattcatcagaaagcgaatcaggaaacattgtcagctattcaaaagatgaaagatgctcagagtaaagccgcccaattagatgaatactattccggaaaactagcccatgttactgaagaaaacaccgctttgcgtgctgatattgccgctggtcatcgccgggtgcaaatcgccgccgccaaccttgctacctgtcagctcacccaaaagcgagataccggcccccgcagcatgggcgatggaacccaagtcgaactcactgcaaaagctggacgcgatatttacgatatccgagcagggatcatcagtgaccagtccaaattagattatctgcaacagtatgtccgtgaagtggtcaggcaatgtaaatcgtagtcactttgaacaactgagcatgacttcccacagagccaataaaagcctttttatcttggaataaaaaggcttttattatttatggctttagccagtttaagtcgcgttagcgtcttaaacataaaaccacccgctttgcgggtggagttcaaaggttataccaagaaaaacacctttccgttacgatatagatgtacaagctaatattcgtaactcaaataaggaaaggtgtttatgggcattaaagcacaaagctcagcgcatacaaagtggctgtgtaaataccatatcgtcttttcgtcgaaatatagacggaaagtgatttttaataatattcgttcaagtgtgggagagatcctcagagacctttgtaagtataaaggtgtggaaataatcgaaggtcatctcatgccagatcatgttcatatgttggtgagtattccaccaaagctaagcgtttcaagctttatgggatatttgaagggtaaaagttcgttgatgatctttgatagacacgccaatttaaaatataaatttggcaacagaaagttttgggcggaagggttctatgtcagtacggtagggctaaatgaagcgacaattcaaaagtatatcagagagcaagaaaagtcggattttaatctcggataaattgagtagtaaagagcatgtagaccccttcaaggggtaggccaaagcagcaaagacacttagcttgaacgaagagaaagcagcgtcatttaggcgcagtcggtaacaagcccttatagggcaagagcaaaccacccgttatacgggtggttatgattaaaagttacagctcgtttcttagaacttataagaaaccgtcgctttataagctcggcctttctcttcctgacctttataggtgttcagatagtaagactgttcgttgtaacgcttgtcgaagatattatcgataccaaacaggagttctgcgtttttaaatacgcctgaggttggtgcccaggaaatatgcatatcactaacgccaaagcccgctttatgaatatttacaactttgccattatctgtcccattcgcatttgttgagcggacaaatcgggaattccagccaagttcaatatctgttttatcaaataggtagcttccgccaacagtgaaagaatcaccaatggacggtgtaaactctaatcttgagtcaaacaacgcgctaccctgaacgattttgttatttgctttagcgtaagtcgctcttaaagaccagttatccagtttatatttagtcgctagttcaaacccttccagtctggatttagggatattattaagcgagctttttgctaacgtggtagccagatttttgaaattggtctggaatactttaccagtgacagtaaatgagtcattttcagcaaaaacagacggataaataccaccaacacccgtttccagattgtaacccgttgtcgcttttaagttagcattgtggttactcgggcccatgccgatttctttacccaacggacctctgaagagttcagtataattagcaaacaacgttgttgatgcgcccagttcgtatttcagacccaacgcttttgagaaatgagcataggttctttcaaaaggctcattctttttattaatagtattgtatttataatgatcccatcggacgccgggaatgaaatgaaaatcagcaaactgaatatcatcctctaaataaacagaagatgattttcctgtttctaccactttgttatatgtatttcttgctgcctctgtatacgccattctggtatcgaaatactcatagccataagtgaaagcatgggctagctgataagtatcaaaactagaaacgttacgcgctctgataccctgagtttcggtaatcgtgtcaaagcctttgcccggaccaccgacttccttcatatgattgaaattttgttctgtgtgataagcagagatcttcagatcaatgaggtcattaccaaccggtacatatcggtaagcgatattataagcatcacgctctaaagcgtatttccctttccttcctttgtttacatccgggccgaaattcaatctgaaattagtatctgcatcattctgataatgctcttttgagacattgatatactgctcatcagtcagattgaacttagcttttaataaatagttgatcagtttcccatcggtaggaatggattcttgcccggctttatctctgcctgttttcgcatcactcatattgcgatggttaaaatagcccaataaatctacagcaccaattcttccataagctgccaaagacttctggaattcagagccattactgacatagcttaattttccttttgcaccaaataagcgacccggttctaataaatcgccagcatcgacagtttcaaattttaatgaaccaactaatgctccggtatcataggtaatactgttcgtacccacattgatatcaatttgcttcagcatttcaggatcaataccgtagctccctgcatggtgaaagtgatagccttcctgtcttgcaccatcaatcgtcacattgataaattggtcatccatgccacggattttaaagcgctgccctaaagcgctagggtgcccggcttgtacgcccggcacattctttaatacttcaccgacactttgtgcctgtttaactttaatttcgttgcgactgacttttccactgtcctgttctgaactgttacccgcaataacaacaagtgtatcgcctgttgaggctgattttctggttgattcttcggtatgtgccactgcgttagtcgaaatagcgatggtcaacatagatgctgacatcaaaggaacacacaaaccacttttagccatgcttgcgtaaattttggtagttttagacatttactttttagttcaaatattattgagaaacattattatttacattcacaaaagaaatgtaaatagcattaagtgattatcgttagattttactatctgggttaggtggtgaggtgccatccaatacagcgatactaagaagaggctgattccacaaaagcagattgactagaggggtataaatttagagtcaatttatacccatttgatttttcaaataatcaggctattcaatgttcgccagaatgctttctgcatcctgataatcaccttcctgagcacggaatgtgattttccctgagcgatgtgcatttatctgtacttccattttcatggcttccatgatagcaatcacatctccttcattgacttgctctccctcctgtactagccacgaatgcaggataccggatatgggtgtttttacctgatgaggatcttccggtatttgttggactaccggcgaagaagattgtggctcaccagcaggcactaaaggcgttaatcctgccaataaatccgctggcaatcccatttcatgccgacgaccatcaatctcaataaatgtacggatgatgcctttgctttcagccagatcctgacggagtaaagctgccagttgattggcaaattctgtctcaatccaacgggtatggacgttgaaagtatcctctgatacaaaatcaggatgttcaatcaccgcctgatgaaaaggtaaaactgatgctactccactgattttaaattctcgtaaggcccgacgcgcacggacaagagcctgttcacgcgttgctcctgtgacaatcagttttgccatcaacgaatcaaaggttgtcggaatgacagagccattgattacgcctgaatctaaacgaataccggggccagaaggtgggataaattcggtaagagcgccagatgcgggcaaaaagccttttccggcatcttccgcattgatgcggaactcaaacgaatgcccgcgagaaataggggtttcctgaatgcttaatgggtagccttctgcaattctcaactgctcaataactaaatcaattccggttgtttcttccgtcacaggatgctcaacctgtaaacgggtattcacttccagaaaggagagtgttccatcaacactcagcaaaaattcaaccgttcctgctccgacataattagcctctgcacaaatcgcttttgccgactgatgaatgcgctcccgttgttgctgagtcaaaaaaggggccggggcttcttctaccagtttctgattccgacgctgtaaggagcagtcacgggtgcctaaaacaaccacatttccgtgtttatctgcaattatctgtgcctcaatatgacggggcttatccagaaactgctcaataaaacattcgccacggccaaatgcagctgtcgcctcacgcaccgcagagtgatacaactcctcaacttcatcatgccgccatgctacttttaacccacggcccccgccgccaaatgccgctttaatcgctatcggtaaaccatgcttttcagcaaaagtgataacttcctgcgcatttttaaccggctctgccgttcccatgactaacggtgctccaactttctgagcaatttggcgggctttaactttattccccaattcatcaatcgtatcggattccgggccaatccaaattaaaccggcttcaataacagcgcgggcaaattcagcccgttcagataaaaaaccatagccgggatgtaccatcgtagcctgcgcttgcttggcaatatccaacaaacgaggaatattaagataggtttctgccgggctatttcctgccagtgaataggcttcatccgccagttgcacatgcaacgcgttgacatctgtatcagcataaacagcaatagtctgtatgccataatcacgacaggcacgaataatacgaacggcaatctccccacgattcgcgattaagactttttttgtggttttatttttctttgtggttttattaatgcggtgcacagtggtattcattgcagctcttcactcccctgaatgtcatgaaactgattgatgggattaaatctaagtttggcattgatcggaatctggccagcaagatcaagatgatagccagctcaactgaaagccaactaacggggtatccacccgtcacgggatgatccgccagaaagagaacgggttgtccgctagtggggatttgtatcgcaccaaaacaggttctttcgcttggcagctcttcatccttaattcgagacaacgggcaatcgccctttaatctcaaaccaatccggttcgattgtggcgtaacctgccagatttgatttcgtaataactcgatagattcctgagtgaaccagtcagttctgggaccgaaaaatatatccagtacaacaatctcatctttattgggcatcacgaattctggggtttctaaaacagacaccgctgggcaatgcgaagtctcacctatcgctaaattatcacccgcctttaacggagcagggccaatattagacaaggtgtcaaatgaacagctggatagtacctccggaacaataaaaccacctctggctgccaagtaagaacgcattccttcatgtggaacacccaatataatttcatcaccatcatttaaatcaatgggttgataagcgcttacattaagccgctttccttgtggggttttgatttgaatcgggcataaagcaccggttactgaaatgactgtttgcccacgggcaatggcgtgaagtcctccctgcgtaatttccagacaagctttatcagaagggttacccactatgcgatttgcactgcgtaaagcacttttatccatcgcacctgatgcagatattcccagtcctgatttacccaaacgccctaaatcctgaaatagcgcctgtaatcctgcggactgaatttctaaaatactggcgctatcaaccggaacaagcgaatcaacaacgggagttgcaggtaaactgactgttactgtggagtgttctacgttacggaatcggatacgataacctggctgcaataacgcaggctcaatccgggataaatcccatattcgttcagatgtcgtaccaatgagttgccatcctccggggcttgcctgtgggtaaataccactaaattctcccgccagagcaactgaacctaccggaatacgggttctgggcgttttacgacgagggatattccaggcgatggtttcagagatcatgtaggcaaatccgggcgcaaacccggtaaatgcaacgatatattcattatccgcatgttgttggataacatcctgtaccgatattccgagtatctccgcaacttcctctaaatcttctccattgtagcgcatcggaatttcaatctgttttccttgtatatgcgaagatttttgcagatcccgccgttgaatttctgccaccagttgctgggctgaaatcatcagagggtgaaagcgaatcatcaccgttctcgctgctgggattatctcttcaattcctgagattgattcagcattcagagaatcaaataacgccagagtttcaggcaagtcgctaagctcaaccatgatggtatgaaaattaacaggtaaaaaacgcacagttatctcctgacaatatcgaccattctgattaagaatgaataaatgagcggacagtaattcctgcctgctgcaaaatggcttttacctgtttagccatttccagcgcaccgaaactatctccatgcacacaaatagaatccgcctgaatgggggtaaatttgccatcaatggattccactccaccttctgtcacaagctgcaacatacgctgtgcaacaagagcggcatcatgcaatacagagccggcttcacggcgcgaaaccagttctccttttgctgtataagcacgatcagcaaaggcttccgcaatggttctcagacctttttcctgcgctagcctcagaatatttgagccagccagccccactaaggcaaggccggaatctacggccaaaataccgtcaatgactgcaagtgcctgacgttcatcattagctatcgtgttatagagtgcgccatgtggctttacataattaactgccgttcctatagaagcagcaagcccttgcagggcaccgatctgataaattacatccgcggtgagttcgtgactggcgagatccatattacgtcggccaaaaccaactaaatctggataagagacatgagcgccaataataacctgattttccctagctaatttcagagttttcaggatcccagccggatctccggcgtgaaagccacaggcaacattggcactactaacaatacccaatatggcttcatcgttacccatcttccactgaccaaagctctcaccaagatcgctatttaaatcgattgttttcatcatagttgttaaaccataattataaaattgttgaacaatcgataatttctgatgagtaaataatcaactaaattcgcttattattgtgcaaaaatacaacagcgatcactctattcaaattaacgggaaaattatcagttcaaaatagcgctaatttttatctcaaaattgcagaagataagcagggaaatagcctcggcttgctggttatccgggaatatgtgaagattaagttttgaacacagaagacacttttctcagcgatagcccaacggatgactatgaaaatagagagctctccccaaattttgagtaaaaaaattgcagaagtaataagaaataagctggtgatcggagaattattacccggacaacgcttatctgaagcagctctcagtgaacaactccaaatttcccgcaacaccttacgggaagtgttccgtactcttacgcaagaaggtttactaaaacaccagcctaatcggggggtgtttgtagcaataccagatattgcatccattattgatatttatcgggttcgcaggctgattgaatgtcaggctcttgcacaagcatatcccatgcaccctagcgtaaataaaatgcaagaagccgtcatcagtgccggtcaatacagaaataagcaggagtgggttggtgtaggcacggccaatatgcgttttcacgccgcgattgtagaattggccgacagtgaaagattaatgaccttctaccggaatatttcagccgaactccgtttagcgtttgggcttttaaatgacccggaactgttgtatgcgccttatgtcgataagaataaacatattctggagctattaaattcaggccaaacagaattagcagcacaaaaaatggaagattatttaaatctatcagaacgaactgtattagccgcttattctcgtataaataacgatcaataaataaaaaaaacgcaaaaaagccatccggttaaggatggcttctctgtcaaagtgatgtctggcagtgtcctactctcacatggggagaccccacactaccatcggcgctacggcgtttcactgctgagttcggcatggggtcaggtgggaccaccgcgctattgccgccagacaaatcctgttttcaatcccgaacaagctgtgtcaccggccactttctgttttccggtcactcttcatctgaaacttcgtctatgctctcaatccccgcaaaacaccttcggtgttgtcaggttaagccgcacggttcattagtactggttagctcaacgtctcgcaacgcttacacacccagcctatctacgtcctcgtctcgaacgttccttcaggatcctctaggaatcagggaagactcatctcaaggcaagtttcccgcttagatgctttcagcggttatctcttccgcacttagctaccgggcagtgccattggcatgacaacccgaacaccagtggtgcgtccactccggtcctctcgtactaggagcagcccctttcaatcttccaacgcccacggcagataaggaccgaactgtctcacg

SEQ ID NO: 72 - DNA, 11295 bp, Xenorhabdus sp.
gtgctctaaagacttattatttgcatatcagaaatagactgatgtatatcatgcaagatactccatgcatgttcgccttcatggcttaacaatttcagccccatcagggtatttcctatatctgcctcttcttctggcaagatttcaactcttgtcccgacaaaaccagatgaccaccgataactttgcggcagtctgtgtactaccgaaagttgaatattattcacgtattattcctatcagaaacaacattaatacatctaaccaccagctgttggctaccgacctctcaaagccgagtaaccacccaacaaaaaagtaaataaaaagttaaaacaaaaattataacatcacacttttttcgtcttttatttagaaaaaaatgagatcaaactcgcactttgtatatatttatactgttttggtaaaaaattcaacttatttttatgtaagacagcaactttttattcaagatttgtttacaaaccgatattttttctaacgataaaacacgatggcactttcataatatcctttcattacatatggttagtaaagaacaaaatgtttaccatatagagtcatatatttaacatttttagattaacaaaaaacaaacaaaatagagcgatttggcatcataaaattaacgcccagccatatttgactatcttttcattcgatagctctgcttatctaataaataaaaattaacatatagccagattcttggaatatttttgcttctgagtgaagaactatctgctttagaacgaaaaactcagatactgatataacagctcgatttcatgaacagaccatgaaaatgtgatttaagaaacagtagatacagttatatacacaacggatttcaaggtgcgtcgcgacgacaaaagagagacaatttcgtcaggaacgaatttatccagctaaaagcaagactctcagtaatctccgggaatatagataaccgtatattgataaaaacagtgactgaggtgaacgagcacagccaacaaagaagcaacttgaaaggtgaaatctatggaaataagaaaccaccttgtacaaccggtggtttctattaattatgtgattattttattgctttgctcgcatagacaatcaatgccattgctaatatcacgcataaagccattgagccaaccatcggccaagcacttttttcaggagcagaagataaaattgctccaaccaaagcagcaatactaaaacgtaaagtacctgataatgatgcgaccgttccggccatatggggatagccatccaaaacaaccgccattgagttagatgtaatcaaagaaatacaactaatataaattgcaacacccaataccaaagaaataaagcccaaatccagcatcgtgctgaataacaaccataaccccataagaaattgcacgaacacgccaaatttcagcatattcaatgcaccatatttacggacaaattggctattgatagttgtcataacaaacataaaaataatgttcaacccgaaataatagccaaaatgctgcacagggacaccattcagttgaatataaacaaatgagccagctctgagaaaagaaaacatcccggcaaaagaaaaaccacttgccaaaatatagcacaagacctgacgctgcctaaacagcatcacaaactgccctagagtaacttttaagttaaaacgcagccttctctctttaggtaatgtttccctgataaaaaccgctactagcaatgccgctatgacagccgcaattgcaatggaccagaaaatagcatgccagttaaaccacaccatcattattccacccagcataggagccagtagcggagcaatgatcataaccagcgtcacaaatgacatactgcgagaaaattcatctttggtgaatatgtcacgcattaaagcattgatcacaacgctggcagcggcggctgcaaaaccgtgcaaaaaccgcatggaaataaaagtgtcaatattttgagccagagcacatgcggcagaagatattgcaaaaacagtcactccacccaaaataacaggcttacgccccaaactgtcagacattggcccataaactatctgaccaatagcaaaccctaaaatatagctgttcagggtcatttgtactttgccatcactgacgccgaaatcagaggctattgttggcatactcggcaaatacatatcaattgccagtggcatcagcatagaaattagcccaagaataaggactaaccctaaataagataatcgttgttgttgcacgctttttttcccaaaacaacttgataaaatagacaaaatttaagctgttggcatgtttatgctcttgatttcattctctgtcagcatcctgtattcaccgggctctaaatcaggatccagataaatatcaccgatgcgctcacgatggagttcaacgacatggtttccaacagcagcaaacattctttttacctgatgataccgcccttcgctgatagtcagacgtacaagctgaggctcgataatctctaatttggcgggcttcgtcagcgttttttccccattcaacagaatacctgagagaaatttttcttcagtatcccctgaaatcgggttctccaatgtcacaagataagttttttcacaatgatgtttaggtgacgtgatgcgatgtgaccactgcccatcgtcagtcaataaaactaagcctgttgtatcaatatccaaccgtcctgctgagtgtaatttatgggcaacaggctcatcaataaaatataaaattgtcggattggcgggatcatcagtcgagcacacatatccctgtggcttattcagcataaaataacgtgggccatctaattgctccagtaccgttccttcataagcaacagtttgctcaggtttcagtttatatgcccctgttttaataatttcattattgacagtaacccgtccagctcgtaattcacgcccaacatcgttacggctgatacctaattgttgtgataaaaatttatccaatcgcatgtatagctatacctaacaaaaaataatctaaaaaaatcgcaaaaatgactttaagcctactactgaatgacaagattaaacagataatttatgacgtaattgtaaaatcaataaatagaacagacaaaagtgctattctctctgtcaacgatttttacccgatatccgtggcagtaataaacaatggcttttaccttacgcccttatcagcaagaagcggtagatgcgaccatccgccatttccgccaacataaagaacccgcagtgattgtcttacctactggagcaggtaagagtcttgttattgctgagctggcaaagctggctcatggtcgggttttggttctggcacatgttaaagaacttgttgcacaaaaccatagtaaatattgttcatataacctaacggctgatattttttctgccggactgcaccaaaaacagagcgaaaggaaagttgtttttggtagtattcagtctattgcccgtaacttagatcgttttaaccatcaattttcactgctaatcatcgatgaatgtcatcggatcagcgatgacgaaaatagccaatatcaacaaattatccaacaactccaaaaaaataatccaaggctgcgcattctgggtttaaccgccactccttaccgtttaggtactggctggatatatcagtatcactaccacggtatgatccgcggcgatgaaaattgcttctttcgtgactgtatttatgagcttccgttgcgctatatgataaagcatcattttctcgttcctccggaaagactggatatgcccgtgatgcagtatgatttcagtcaggtacgcaccagccagcagggtattttcaatacagctgaattgaatcgggaaattaagcgacaaaaacgcatcactccacatattgtcaggcaaattattaagtatgcagaagatcggaaaggcgtcatgattttcgcagccacagttgagcatgctaaagaaatatccctattactcccggcagaacaagctgcattagtcagtgccgatacaccaggccatgagcgagatctcttgatcaacgcattcaaaaagcaacagttacgttatatggtcaatgttgctgttctgacaacgggatttgacgccccccatgttgatctcattgcgatattacgcccgacggagtccgtgagtctttatcaacaaatcgttgggcgggggctgcgtttattccctgataaaaaagagtgtttaatcctagattatgcaggcaatcctcatgacctctatacaccagaagtcggaagccataagcccgactcacaaaatcagccggtgcaggtattctgccctctctgccaatttgccaataccttctggggaaaatgtaccgcagaaggtgacataattgagcactttggacgccgctgtcagggatgggaagaagacgagaatggaaaacggcatcaatgtgattttcgctttcgttttaaatcgtgtccgcattgcggcacagaaaatgacatagcagcccgacgttgtcatcactgtcaggaagtactggtggatcctgatgatatgctaaaagcggcacttaaactcaaagatgctctggtactgcgttgcgggggtatgcagctgacgcccggtaatgacaacaaaggcgaatggctcaagattacttattatgatgaagacggcgcaaatgtctctgagctatttcgtttaaccactccagcccagaaaaaagtgtttgagcttcaatttatacgccaccatcagcgtgctccgggtattcctttcgtctggaaaactgcgggcgatatcgcacaacagcttcctttactgcgacatcctgactttgttgtagcccggaaaaaaggacaattctggcagattagggaaaaaatatttgattatcagggccgcttccgccgggcagatgatctgtattaaatgacacaattactgacagcagagtactttatatttgctgtcatacctgtttttcgttaaaatgccgcccgcttagcgtaatacataatgttaagccaaatatcgaacctgctgctgggtcgcctgtagcaggatttattttcttcttttatagagaaaaaatgatgttaactattaatgcagaagtacgtaaagagcagggtaagggtgcgagccgccgcctgcgcagagctaacaagtttccagcaatcatttatggtggtaaccaagagccagtttctatcgaactggatcacgatgcagttatcaaccacgaaagcaagccagaattctacgaaattctgactctggtcgttgatggtaaagaaactaaagttaaagtgcaggcagtacagcgtcatccgtttaaacctaaactgacgcacattgatttcctgcgtgcttaattagccagaatcgagcttttatcgggacgccgagtaaataacgccgcatttgcggcgttatttatttctgtcttttacgaaaactttaaccttaaaaccgacaacattagtgattattactgccacggcgttgcaactgatcccgcagatttggtggcgttcccttaatcgtcaatgtatccgtcgccggatcccagaaaattctttctccaagcaacatggcatcaaagttaatcgttaacccgccaccactaccggcaaatttagtcaattggcgcaatgtactgcgatctgccgggaagctctcttccaagtcgtagttttgatcttgggaaaactgctgaaagctctgttcacctaatggtggtaattcctgcgataattcttgcagtttaatctcttcgcccgcctgtaactgctcattgcagtaactgtaaacttgttggcgataagcctgtcgctcatttttatcaagctgagcagattcgcaataatcatccactgcctgcaataatcctttattctgcaccttagcattcatcccttcactggcggccagaaaatccatgaaaaagtcagataccttgcgccctacccgacctttcaggaaagtcagatagcggcaggattcaggattagtttcccattccgtcaaatcaattctggcaacgatatcggcatgtgggatatcaagatattgtgtcgtattgacatccagagcctcatcgactgaagtactactacagctattcagcactgcgattaacaaatactccacagccaaatatcgatattggcaaaataataccgtgccaccttctgcaaacgggtattttatcagttcatctttcagacgaacggtcgccgcccggctgaaacctaaaaaatcttcatttcccttgcgctgatggcgaagtgattcagccagctcacttttatcactgaacacaccataagccttgcttttagcgctatacacgcgatgtaattcagccatcatctcttcgactacctgattggtatccagcagagaatcccgcaaaatcacttccagtgtttgttcgtcacgtttaatcaactgatgtaacgcgatctgggtaatttccagactcattatttctactccttttacagcattgaccttctgggtattgcagttagcggcgtattcaaacactgttccttctctgctgcaaccaaaaaacccaatgatggaaaagtgttcacaatttaattattcgcgttccccatatcacaggctaaaatgaggcagcagacacaagaatggcaacaatttgtacaataaggaaattaaattgtcataaaaaagcagaaaataacccctctatacggtaatatattgggctttgtacattcaggatatttgagtcatgccacagtcatctcgctacagcgatgaaaaagttgaacatttattagctgaactagtaagtgttttcgaaaaaaaccacgtgccaaccgatctttcattgatggttttaggcaacatggtcacgaatttgatcaacacgagtattgcaccagcccaacgcaaacatatcgcaaactcgtttgcacacgcgttacaatcttcaattaacgaagataaagcgcattaatttttccatttaaaaattaacgtaagaaaatatggtgactaaccgccagcactatcgcgaaaaagtttctcaaatgatcagttgggggcactggttcgctctgttcaatatcgtgttcagtcttgtgctgggcagtcgctatttattcgcatctgactggccgggttcactgtttggtcgcatttatgcgctggtcagttggctcggtcattttagctttattgtttttgccgcttatttactggtgttatttccgctgacatttattgtgatgtcacagcgtttactgcgatttctttccgcagctctggcaacagcagggttaacattactgatatttgactcttccatttatgtgcgttttcacctgcacctgacaccattggtatgggatttggttactaatcccgagcagggtgaacgggcaagagaatggcaattgatgttcatctgcattccgcttatttttctggtgcagatgctatacggaacctggagctggcaaaaattacgcagcctgaatcggcaaaaactcggtaaacctgtggcggctatttttatcacggcttttgtggcctcccatatgatgtatatatgggcagatgctaatttctatcgccctatcaccatgcaacgctcaaacctaccgctttcatacccgatgacagcgcgtaaatttcttgaaaaacatggtttgctggataagaacgaatatcaacgccgtataagtcaacagggaaaccctgctgcactgaccattgagtatccattgaataatctgtcttaccgcgatagcggccgcggttataatttattattgctggttgtggatagtctggataatggtgacattacagcaaataaaatgccatttcttgagcgcttcacaaagagtaacattcagtttactcagcattttagtaccggtatgaaaaacgacactgcactgttcggtttattctacggtatatcatcaagctatctggatagtattcttaatagccgaaaaccctcagcacttattgatgccttaactcaccaaaagtatcagtttggtctgtattcatcagatggattccagacacctctttataggcaggctattttaaccgattactcgcttccctacgaagctaacccaaatgacaacctgactgtagagcaatggcagcaatggctaaattcgcgtaataatactactccgtggttctcatttttaaaccttaatggtatttctccttcgtcaattcaggttgataagaaaacactggatactgaaatcaatcacgttttagatacgctgaaaaataaagatattctggacaacactattgttgttattactgctaagcatggcagcaccatcacaaacagcgatccaaggtggtttatcggtgataaatttaatcgtaagcaaatgcacgttccattgatcattcactggccgggaacacctgcacaagttatcaacaaactgaccggtcatcaggatgttatgactacattgatgcaacgtttattgcacgtaagcaactcacctgatgattactctcagggagaagacctgttcagaggtcaaagaaatattccgtggctcattaccggtgagaacggttcactgatcgtgacaacgactgaaaacacaatttatctttccaaagatggggattaccatctgtacgactcagatgacaatgaaatccagaacgcaaaaccgaaccttacccaactattacaaatactgactgaaatcaaacgatttttagcaaactaattgccgaaaaatcaatcactcactaaagaagggacttgctttgcgaataaaaaaaggtactataagcaaagtcatcggcatgtagcgcagcctggtagcgcaccgtcatggggtgtcgggggtcgtaggttcaaatcctatcatgccgaccaaatttccctagaaaaaccaacctgttagggttggtttttttatgggtagaatttcgaggggaataatgggggaaaaactagggaataacccttaataaaaaaagcctcttttttgaaatgaaggcaatcatattttgattatctcctcactcaaatttccccacctatctattccctaacttttgtgctttacaattgcgatgaatggtcatcagtttaatttttctattgctttacctcactccggctgttcaggccagacgatatcgggggcagtggaacaatccacccggttgagcaggacacggtattttttccagacaaggagtgcggctttctcttccttcgtcgccatgtcgaggtcaacggcgtcctgtaagggcgcaatcctgtctcgggattcattcatcagcgtctgtttatattctgtggcctgtcggatataccactgcttcgcctctgcttcatcggcgacccactcgtctccattccattgatgcgctggcgttgggggctgttcaaccgctatcggataaccatttttatccgcgacaatcgttttccctttggattgctcctcacctaattgcgcatatatagcagaatcatattaatatgacataatagctggattcatatgacaaaggataaagtgagatgggctatagtctggattttcgaaagcgagtactggcatataaagacaagcattcgttgaccttcgaacaaacgtgtacccattttgagatttctatgcggaccttatttcggtggcgtcacaaaatagaaccctgtgtgacacggaataagccgcccacgaaaatcagtgatgaagcgcttctcactgatgtcaaaaattaccccgatgactatcaatgggaaagggcaaaacgcttgggtgtcgcgcaatctgctatccattacgccttgaaacggctgaaaataaccgtcaaaaaaaacgctaagacaccccaacgctgacgctcaggctcgtcaggcgtttgtcgaacgcatcagccactacgaacaggcgatgaaaccgattgtttatctggatgaaagcggtttttcgcagtctatgccccgcacacagggttattcggcgaaagggttacgctggcttcggcacacacgattggcaggccaaaggccgcattaatgtcattggcgcgatcctcaaaaagaccttcgtgaccttaagtttattttcgggaaacattaatgcggatgtctttcatgcctggatgacacaagatttgctgcccaagctccccagcggagccgtgattgtgatggataatgccccattccataaacggcatgacacaataaaagcgatagcagaccacggttgcctgttggaatggttacctccttacagcccggatttgaaccccatcgaaccgaaatgggctgaagtcaaagcgataagaagacgagaaaggtgttcaattgatgaactgtttatgacgcatgtgaaatatgtctaattattttgattcagctatatctgccgccgtaattggtgtcttggtcgtatagagtttggcaaacgccaccttactgtaggtatcgacaaacgtctgctggtaaatccgacctacgcctttcaacgtccccacatagaacgtatcttgagaccccagatagccaggatggacagtatcgatttcaccgcagacttcatcatccagtttctttctctccagagccaccacttgggcttctgtcaggataaacccggtctcagccacgtgcttttcgagcgcccgtaagcgctttttaaagttttcaagatcgtgcctgagccaaatagaacgcaccccgctgggtgaaacaaatatcccgactttacgcagttcgttactggttctcacttgtccgtatgctgggtaatcaatcgcatatttgaccaccgcttgctctgtttttggatcgaccctgtttttgaggttgggtgttcttctactctggttaataagtgcatcaataccaccggcttcaaccaattcttgataacggtaaaacgtgtctcgtgatacgcccatgactttgcaggcttgggaaacattgcccagctccctagcaagattgagaagacctgctttgtgtttaatgatgggattgctagtatgtagcatgagagtgacctcttagtttctttgatttaagattcagcacctttaatcaaagcgggtaactctcttcttttcaaatcgaagtgtcagatctcatctgaactaatacacataattgaatttataaaagacattgtttttttatagtgaaaaattatattggtaaggaatgaagttattgatgttgattagtc

SEQ ID NO: 73 - DNA, 11815 bp, Xenorhabdus sp.
taaatggctacaaaaaaactggacataaaatgttggggtaaatgcaccggatcaacttgaacgttggcgaaaacatattctgcctggattgtccttgccccggaaatgggcaaaagcacatcaggtgtagatgcagatcgtcaactcagtgaaaagctttatgaatattctcaacaggggggtgccaagattgtgtgggtaccctcaacagaatcactgactgatgcaccctcaaatgcgttgttaaaaacactggaagagccgcccggcaatacctattttctattaagatgtcagcgtccggccagcttactggcaacactgcgaagccgctgtttttactatcatctgccggttcctgaaaccaagaccggtttgcattggctgcaaaaaaagctcccgacaatatcatcacaggatatccagacagcactgaaactgtctcagggagcacctctggcggcaaaacagttactccagactgaaaaatggcaacagagaaatgtattttgtcaggctatcacgcaggcactacataaatgtgataccttgtcacttttgccatcgttgaatcgtgatgatgtacaacagtctttgtactggctaatcagcctgttgtctgatgcggtaaaatggcgtcagaaggcgcaaaattactgtatcaatcaggatcagcagatgttgattcaccatctggcctccagccaaagtgtggaaaaattgttaaatacagttgatgattggatacgctgtcgtcatcaattaatatccgtagcgggcatcaatcgggaattgttattaactgaacaattactcaattgggaaaggcagctttgctccactcggtaatacatttaaatatgggcatattatgtttttagttgattcacattgtcatctcgattgtttagattatgaaacactgcataaaagtgtggatgatgtagtggcgaaggccgcagaaagggatgtgaagtatatgctggcagttgcgaccacattacccggcttcctgcaaatgaaaaacctgattggcaaacgtaacaacgttgcgtattcctgcggtattcatccgttaaatctggatgaaggatatgattttgatgagcttgcccgtttagctgcagatagtgatgttatcgcaatgggtgaaacagggctggattattattatcagaaagataacgcagaattacagagaacttcatttcgccagcatatccgcattggtcgcgaattaaataagccggtgattgttcatacccgtgatgcaaaagatgacaccctgatggtactgcgggaagaaaaagtgcaggattgtggcggagttttgcattgttttactgaagataaagagacagccagagatttactggatcttggcttttatatttcgttttcgggtattgtgacattccgcaatgccgaacaaattcgtgaggctgcgaggtttgttcccctcgatcgtattctggtagagactgattcgccttatctggcgccggttcctcatcgcggtaagcaaaatcagcctgcttatgtacgtgatgttgctgagtatatggcagtattgaaaggcgtcagtcttgaggaattagccgaagtgacaacaaggaacttttgtgatttgtttcatatcgacatttaagaacattaaatgataataaaggagaaatgagatggcagaagaaactatttttagcaaaatcatccgtcgtgaaatcccatctgatatcgtatatcaagatgagttagtcactgcattcagagatattacacctcaggcaccaactcacattctgattattcctaatgtgctgatcccaacggttaatgatgttatgccggagcatgaggctgcattaggccgtttattcacggttgctgcaaaaatcgcaaaacaggaagggattgctgaagacggctaccgtctcatcatgaactgtaaccgtcattcagggcaagttgtttttcatatccatatgcatctggttggtgggcatccattaggcccgttactggcagaataacattactcactgccgttttttaatgcggtcacttgtaagacgaaagatatcctgacagctgtaaccggagtagattaatgaaaagaattttcttggttgtattatcagcactgttgctggcgagttgtacattgacatccacacaaccgcctgctcctgttacacctgctgaaccagagcaaaaaacggaacccactgaaccgccgttacagaaagtaccccagccaccgaagatccagtcaattaactggaataatatcgttcagccattagttgaccagatggctaaagcacatggtgtagaagcggggaaaatactgctcgttgatagtgtcaaaaataatacgagtggttcactgagaacacttaaggcaactgacgcaattaccgatgtggtcagtaagatacatgtttttcaggtcgtgccgaaaaatcaggtttattacgcccggcaggctctggggctgtcatcagaagatagtctggcatcacgcagcaaatctatcggtttggctcgttatttgaatgccgattatgtcatctattccgtggcttctggtgatacccaacaccgtaagataaacatgcagcttatgctggttaagacgggtgaaatactctggtctggtagcagtgatattaactaagtgatattaactaatagtgaagctctatctggaatgttgagtcagaagtggcctgacattccagcagaaaactgggaaatcaggccattaacagggctgactcagggaagccactatatcacggatggtgtacgtcagatggtagggcgtaaacatacagggcacagtggcgctctgggtgtcaatcgtcaaagggaacagcggatattacgtaaattatctttgactggcatcgcacctgatgtaatcgcaatgcacgatgactggctgttactggagtggctgaaaggcacaaagatcacagcagaagaattcggtttacccacatttcaacagtcattggcgaataccatcgccattctccataaccaaacaccattggggtatgccttccaactcaaacaacaattagcttctcaatggcaggatattgataatttaaggctttctcctgactggttacggctgcataaattctttatatcagcgaaaatgcctgtgcctctgaaaatagcccctgctcacatggatattcaccccgataatctgattatgacatcggaaggtttgaaactgattgactgggaatatgcggcggatgttgatattggtttttcattagcggggctgtttgaagggaatcaatggaatgagatgcagcagaaattttttttgaattattattgtactgacgcatcagggtatagtgatatcgttttattgcagcaaaaaattaggcaatggaaaccgtgggtcagatatatgatgctgatgtggtatgaagttcgctggcagcagacaaaagatccgcaatttttggctctggcttatcctttgcgtctgggctttaagctgacgttttaacacgaaggtcggcaattaataaaatggcaaccaatatacacaatggatttcaagatgcgtcgcggcggcaagggagttcatctccgggagcatagatgactatgtgactggagtgagcgagcgtagccaacaaagaggcaacttgaaagacgaagtgtataaataggtaactaataagaagtgaggaatattatgggtccggtaatgttagatgttgttggtcatgagctggatagtgaagagcgtgaaattctgcaacatccattagtgggcggtttgatcctgttcacccgcaatttccatgatactcagcagttgcgtgatttggtgcgtcaaatccgtgaagcctcccgtcatcgtttagtcattgcagttgatcaggaaggaggacgggtacagcgttttcatgaaggatttacacgattacctgcggctcagtcttttgcctgtttgcatgacgaactgatgggtgggcatttggccgaagaatcgggctggctgatggcatcagagatgatttcaatggatattgatatcagttttgcccctgtactggatttgggccataaatgtaccgcgattggtgaacgctcatttcatgaagagcctgaatctgcgatggtgatggctgagcgatttatcaggggaatgcattcggctggcatgaaatcgacgggtaaacactttcccggccatggtgcagtcatagcggattcccacaaagaaacgccagtggataatcgcccaatggatgcaattagctgtcacgatatgctgattttccgcgattttatccagcgtaacttacttgatgcaattatgcctgcacatgttatctattctcagattgatgatcgtccggcaagcgcttccccttactggctaaaaaacgtcttacgccaacaattggggtttaatggtgttattttttcagatgacttatctatggaaggcgctgctgttatggggggctatgctgaccgggcaaaagcctcactggaagcgggctgcgatatgattctggtgtgtaataaccgtcagggtgcgactaacgtactagataatttaccgatagttaattcagataaggtggcacggctatatcatcagggaaggtcgttcagtctggaagaactgaaaaaatcagaacgctggcagcgggcaaatttgcaattaaataatttatgtgaacactggctaagctgtggctaatcattactgatttatcgcgatcaaacgaaaggcaggattgttacattatgatcctgtcttttggtattctctttttatttattactttttgctgtctattttggggcaacattcttcctgtatttcaataaataaccctgctaatcacataatgttaacaatgtaaattataagtattaataaactggatttaagtctgattaattagagttgagtacgtaaattttgtgattggtgtctaattaatcaaaagaatttagcaggggtcatttttggtatgacctactgactagccgtgatattctggcaatattttcagtatgaaatttatcatgagtgatgtcatttaagaacgttattcaaaaaatcgtttagcgctttacataacattagttgtattttcagtggggtagtcatgacaacgccaaagacaagaattgtcatcattggtgggggtgctggcggtttagaactggcaacacgtttgggacataaattagggcgtaagcaaaaagccgaaataactttggtggatcgcaacaacagccatttatggaaaccgttattacatgaagtagcaacaggttctctggatgatggtgttgatgcactgagttatcttgctcatgcaagtaaccattatttcaacttccaattaggtacactcacaaatatcaatcgtgaagaaaagaaaatcacactggctgcaattcgtgatgaaagtagtgatttgttagtaccagagcgtgagttgacttacgacattcttgttatggcattaggcagccaatcgaatgattttggtacagccggtgtaagagaaaactgtattttccttgataatccgcaacaggcacatcgtttccataatgaaatgctgaacctgttcctgaaatattcagcgaatcaatgcccggaagagaaagttaatatagcgattgttggtggtggagcaaccggtgttgagctttccgctgagctatacaatgcagttaaacagctaaatagttacggttttgaaagcttgaatacagatgccctgaatgtgactttggtcgaggctggcgaacgtattttgccagcgttgccaccacgtatttctggtgctgcacatcaagagctgactaaactgggtgttaaagtcttaactaagacaatggtaaccagtgcagatgaaaatggtctgaataccaaagatggcgagcagatcaaagcttctttgatggtctgggctgccggaattaaagcaccagattttatgaaagagattggcgggctggaaacaaaccgtatcaatcagctggtggtgaagcctactttgcagacaacactggatgagactatttttgctatcggtgactgtgcatcctgtccgaaaaaagagggcggttttgttcctccacgtgctcagtctgctcaccaaatggcgagccgctgctatgacaacattctggctttactgaatgaaaaaccgctgaaagaatatgaatataaagatcatggttctttggtttctttatctaaattcagcaccgttggtagcctgatgggtaacctgatgcgtggttcaatgatggtggaaggccgtatcgcacgtatcgtttatatctctttataccgtatgcatcaggtagcattgcatgggtatattaaaacaggtctaatgatgttggttggtggaataaatcgtgtgatccgtccacgattgaaattgcactaatttaagcagagtggttcatctggatttgattaatgatatattcaataaatttcagatgaaccactaaattttcattatttttattcaatactacgctattttttcattctatttatcacaactcgttttcttcccattttttaatcaggctaatccttgtaataaaactaattttagctaggtaaccatgacataaaaatgtatgtttttctgttaggattgaaaaaaattcaggaatgataaaaatatttaatgtaataaaaacatgaaattaatttaaaatctaaatttgattagttttaaattcccataaatacagtgagttaaaattttttaatcacgagtaaagtatgtttttgattcccgaaaatagctaagggatatgtttaagtaaggagtgtggcaaattataaatataataacgtgttatgtaagtaagctaaaggcaaggcagtgcaggatctactctctgattgttattattactgttggtatcgctataatatttttttctaaaaaaccacagcctaaatatgctcaggtactttcttcagaacctataataacaataggttatgcacaaaaatattattgtaatggggcattggtgccatttattaaagtatttggtaatactgaaagcaaccgcttatctgtatgtaaaaatagtctattttctttcatcgaaagattaaacataacaagagaatcttatgcactgagctattatgaattaaaacattgcattgcatttaagatccgggaaccgcgtattattgggtatgatgtcatttatactattgataataagccgggaaaggtaagagtgatacataaaccacataaatcgatcccattgaatggaaaggggaagctgatccttgcaccgtatttgtagaggtgttccagaaatgaaatatctccggtcacatagttattatattcccggagataagtatataagctgaaattttttgatattttaacgatatttaaaagcaacagtattgatgctatacctgatgttgctcaaatgcctccaataatgactgaataaacgataagcgtgcagttctttcagttaactcgttaataaatttcagtttagaaggcccatccagtcgatagatattaggctgagtctgcaataagttgatcagatagtggggatccactttattactttgactaaattcaataaagccgcctttttcatgggcttcaatacgttttattcctagtttctgagccgtaaggcggatagaagcagattgtaataaatgcctgcccggatcaggtaacataccgaacctgtcaatgagctcaacttttaattctgtcagttcattgtcattctgagcgctggcaatacgcttgtagaaagacagacgcatatttacatccgggatataatcatcgggtaaaagcaccggaatacgtagttctatctcggtttgattgttagttaaatcctcaagtgaaggttcccgcccgtttttgagtgcatcaactgcactttccagcagctccatatagagtgtgaaaccgatactggccatttgaccactttgatcttcacccagaagttcaccagctcctcggatttccaaatcatgagttgccagagcaaaccctgctcccagatcttcaagtgaggcaatcgcttccagccgcttttgcgcatctgtggtcatagctttcgggtgcggagttaacaaatacgcatatgcctggtggtgagagcgaccgacacgcccgcgtaattgatgtaactgagccagaccgaagtgatcagcccgttcaataataatggtattcgctgtcggaatatcgatcccggtttcaataattgtagtgcatatcaacacattaaagcgctgatgatggaaatccgtcatgacacgttccaagtcacgttcacgcatttgcccgtgaccgataaccattctggcttcaggcactaattcttccagccggctttttgctttttcgatattttcgacatcgttatagagataataaacctgaccgccacgtaagatttcacgcagaatagattcacgaacgactaagctgtcatattcccgtacaaaggtttttactgccagccgacgggctgggggagttgcaataatcgacagatcgcgcattccgctcattgccatattaagcgtccggggaataggggttgctgtcatggtcaggacatcaacatcggcacggatagctttgatacgctctttatgacggacaccgaaacggtgttcttcatcaacaactaataaacccaaatccttccagcgcagatcactttgcaacagtttatgcgtaccgatgatgatatcgactttcccttctgctgccatatctataacttgctgctgctctttggcactgcggaaccgtgacatcacctcaatgtgtacaggccagttcgcaaaacgatcgcggaaattatcgtagtgttgttgggctaacagagtcgttgggactaaaacagcgacttgcttattattgttgatagcagtaaaagcggcccgcattgcgacttccgtcttaccaaagccgacatcaccacataccagcctgtccatcgcaattggctggcacatatcgctcagtaccgcattaatggcctgttcctgatcgggtgttgtatcgaatgggaagttctggcagaacaattgatattgttcccggtcgtgcttaaacgcaaaacccggtttaatggctcgctgggcgtagatatccagtaattcagcggcaacatcacggactttttctgccgctttctgacgcgctttattccatgcttcgccgcccagtttgtgcagcggtgcgctttcctctgcgcctccggcgtagcggctgattaaatgcagagatgaaaccggcacgtacagtttgtcttcgccggcataagtcagaatgagatattcagccttaatgcctccggcctcgagtgttgttagcccctgatagcgtccgacaccatgttcaaggtgtacgacgggctgcccgggacggagttcggcgaggttacggatcagggtatcggtattaattgtgcgtcggttatcctgacggcggcggctgacacgctcaccaagcatgtcactttcacaaatgaaggcgagttttttctcctcatctataaaaccctgttctgcgctgcccaccattaaaaagcatccagcctctttagcatcttccagctgatgtattgtggtcggatgaatttttatgcgagacagtaactcattgactgattcccgacgtccttcactttccactgaaaaaatgaccttgccactgaactgctcgataaagcggcgtactttatctaaaggcgctttatgatgagcggcaacggagatatcaggtaaaggctgataagccagattgatatttccggctttcttgggcaactcttcatttctgatttggatgcggggccattttttcagttcggcgaacagcttgtcgacgggaagccaaatttggtcgggaggaagtaatggccgcatcgggtcaactttacggctctcaaaacgctgctcggtatcctgccagaaacgttctgccgtgttcatcaaatcctgcacaataatcagtgtatttttaggcagataatcaaatagtgtagataaaggctgttcaaagaataatggctgccagtactcaatgcctgcgggtaacatttttttactgacctgctgataaatgtgttcagcatcccgccggacatcaaacttttcacgccactggctgcggaataattcaatggcttctttatctgtcgggaactcatgggccggtagtaagctgattttttccacttcctccagcgttcgctgactatccacatcaaaagtacgcaggctatcgatttcatcatcaaaaaaatcgatgcggtaagggtgctcacttcccataggaaacagatcaaataaagcaccgcgtgtggcaaattcaccatgttcaagcacctgctcaacgctgcgatagccggcctgctccagatttgcccgtaatttatcacgcgaaatacgctgccctttatgcatgatcaaagcatgcccctgaaggtattcgtgagggcaaacacgctgcatcaatgtattcacaggcagaataagtgccccttctgtcataaaaggtagctgatacagggtagataaacgatttgaaatgatttcctgatgaggggaaaaactatcgtaaggcagcgtttcccagtctgacaacatgtttattgaagtacgggtaaattgtggaatttcatcacgcagccgtaaggtgttttgcatatcttttgtgactaatagcacagggccagagtgacgttcaatgatttcagcacattcaatggcacaagcagcaccgatcagatggcctaactggcggatatcaccgcgacgttcaggaagttgataacgatattttgcggacataagcgtttgatgtgttctctaagattcagtccattcccaacacatatttaacccagtagcctttacaataaatacgctggcaggttgagagaagtaaaaacagaaccggaatgtgaatggctccatcatatagtacagctgctctttattatccctgaacacattgctttggcaacagctgagtgacagatttgctgtctggcctgaggtggtatattagctcgtgttaacaacagggcttttttatcttcaatttcgaaggtgctaatcaaaacttaattaaacagtgataatatgtaataagtgaacgatatagattgaattttttacaaaatacatatgcaaaaacagagataaaatatgatctttttcattaatttaatgcattcaaataaccccctttgatacggcggatcctatgtttcagtctgtttcattatttatcggattgcgctatatgcgcgggcgggcggttgataaatttggccgctttgtttcctggctttcagccattggtattacattaggggtggctgcattaattaccgtattgtcagtcatgaacggctttgaacgttcactggaggccagtattctgggctttatgccccatgtcattattacttcagaaaatggttcaattaatccagccgagcatccgaaaagtcagctctctggtttaaaagatgtcacccgtattgagccggttgttcagggagatgttgtactgcaaagtgcccataatgtgggtgtcggcgttatgttgggtattaagccggatgaatatacgccgttggcggaatataccgtcaatgttgatcagagccaattgcagcccggtcgctattttgtgatttaggtgaaaaactggcaacaagactgggcgtc

SEQ ID NO: 74 - DNA, 11841 bp, Xenorhabdus sp.
  unsure (1)..(11841): unsure at all n locations
cattttgcagcataaagctaagccgttccgccggataagccggatcgaggggaacataagccccaccggctttcagtgtggcaatcagaccgatgaccatctccgggctgcgttcagcataaagggcaacccgatcatccggatgtactcccagcgccagtaaatgatgagccagctgatttgctcgctggttcagttcgtgataactcagcgtctggttttcataaaccacggcaatagcatcagggcactgcgatacctgagtttcaaacagctggtggataagtgcatctggtgtgaagccgggctgtggtgaatcactccggatggcattgaaatctaccagtaattgatgccgctccgatgcgggtagcataggcagagtggcaatacattgcgtatcatcagtgaccattgctgtgagcacattgactaaatagccagtcatgcgctcaatggttgcggaatcgaacaaatctgcggcataagtcagttcacctgtcagaccgttttcgttttcggtcagagacagggttaaatcaaaatgcgcgctgggggggggctgttctattagcgtacagcggatatcgggcaggtttaatgcctgagcaggggtgttgtttaaagccagcatcacctgaaatatcgggctgtaactgagatcacgttccggctgtaacgcttccaccacctgttcaaaaggcagatcctgattggcatagtcatccagcatctgttcacggatttgaaccagcaggtcagcaacgctgtcggaatcgcttattctggtatgcagggctaatgtattgacaaaaaagccgattaatccttccagtgtatggtgaggccggttggcaaccggtgtaccgatgacaatatcatcctgcccactcagccaggcgaggacaatactccatgccgccagtagggtcataaacagggtattgttatggcgctgccccagtttcttcagtgaagccagtagttcggcatcaaaataaacaggaacccgaccgccgacgaacgactgcaccgtcgggcggggtctgtcagtcggcagagttaataaagccggagcatctttaagccgggaagaccagaaatcacgttgtgcagtcagagccgattcctgcaaccagccacgttgccagacggcataatcggcatactgaataggtaatggcagtaacgggttggcctgattttcaagagccgcatgatagagaacgctcagctcacgcattagcacaccgacagaccagccatcggaaatcatatggtgttgggtgagcagaaagatatgttcttcatcagccagttgcagcaagtgaccacgaaccagtggcccctgtgtgaaatcaaatggcgtccgggtttcaagagcggtcagttcagtaatacggtcagttcgttcttcaggcgctaacgggcgcaggtcatggtaagacagcgcgaaaccgatatcagcctgatcaatgtattggcagggataacctgctacagagataaagcaggtgcgcaggctttcttgtcgagccaccagattattcagtgcctgactcagtgcgtggtgactaagttgcccgctgagatgtaatgcaacgggaatatgataggccagactggcggcctgatcgatttgtgccagaaaccataaccgttgttgtgcaaaagagagtggcagtggctggtttctgtcagcaacagggatcccgatttggctggtagttgtagtttcagtgagcagttgtgccaactcagccagaactggctgatcaaagagttgttttaatgacagtttttttgccagttcctgacgaacgtatgcgacaaactgaactgccagtagggaatgtcctcccagttcaaagaaatggtcataacgcccgacctgctgtacgccgagtaatttttgccaaatctgagccagtgcggtttccgtttcactgatcggtgcttcataaccacgtgtcactattgctgtcagatcaggtaccggaagcgcctgacgatccagtttaccattggatgtcagcgggaaagtttccagcatgacaaaagcgctgggcagcatatagtcagcaaggtgttgtgagagttgatgacgtagttcagcgggtattaacgataggccattgtgtggctgtaaataagcgaccaactgtttttgctttgattcgtcttcacgggcaatcacgacagcttcacgcacaccgtcacactgcatcagttgtgcttcaatttcccccagttcaatgcggaagccacggatcttgacctgaaaatcgttgcgtccgaggtattcgatattaccatcagccagccagcgccccagatcccctgttttatacatgcgcgcatcaggctctgaggaaaaaggacactcaagaaaacgttcagtagtcagctcaggtagatttaaataaccacgggcaacaccggctccggcaatataaatttctccggcaacaccaacaggaacaggcatccctttgggatcaagaatatagatttgcgtattggttaatgggcggccgataggaatagaacgagtgatatcaatgggggatgttattacataggtggctgcaaacgtggtggtttccgtcgggccatagccgttaatcagataggcaggctgagattcagacgagaatacctgccggatcttaacggggtcgagaacatcaccaccgaccagcaggtaacgtagctgcctgaacagcggcataagaatatcaaggtaagcattgaacagaccgacagtcagccagagtgcggtcactttcccttcgatgagtgcatgactgaaacgcaccggatccagcaatacagcctgtggaatgatatgtaagcatccgccattcagcaggactgaccagatttcccatgttgaggcatcaaacgcgatattggcacaatgagcaacacggtcatcagggccgatattcgcaaagctgttattgataataaggtggagcacactacgatgctcaaccatgactcctttgggttgtccggttgagccggaggtgtaaatcacataggccagattttttgatgtcaggtggatcgtgggattatcgacctgttgtgtgggcaggccggtttcctgttcatccaataatacggtcggaatgtggttttccgacaatttatccgcatgagcggtatgagtcagtatggctacgggggcagcatccctaagcatatactgcaatctttccgtcggataagccggatcaaggggtaaatatgcgcctccggccttaagaatggcgagcaagccaattatcagcagagggctgcgctcaacgcaaatcgcgacacgatcatcggggcgtacaccttgcgcaatcagatgatgcgccagatagttagcacgttgattcagttcgccatagctaaaggaattaccttcaaacactatagcgatggtgtcggggcgatgtgcggcctgctcttcaaataattggtggattaaacccggctgggcaccttctgttggcgataaggttgtttgagctgagttaaaatccaccagtatttgttgtcgctctgtggcgggcaggatggataactcctgaatcagctgctgcggattgcgagccagtgagtcagtcaagccacgaagggcagtttccagataagtggtaatgcgtgccggatcaatgcctgatcccgccagagctgtcagacggaaccctgctcccgtatcatccacggatagggtgattgggtaatttgtccgctcctccgccgtgagaatacgcatacccagctgaggcatctcaaaaatatcagcttcattgagccgggtatggcgataattaagtagagtactaaacagtggcattggttgcgtcacgccgctgcattgctgtgccagtgccagcggtgcctgttcgtgctcgagtaaggtagtcagattgcgataggtagcctgtacggtatccagcacactctggtctgtcagggaaacccgtaccggcagggtattgataaacatacccagtgttcgggctgttcctttgccactctgcaatcggcctaataacactgagccgaatacaacatcattacaactgctggtttgtgccagtacctgtgcccaggcgacatgaaacagtactcccgggctgacgcccagacgacgggcctgatggcggatattctccgccagaaccggatcgaaagtcaccgcgcgcttcagcaacaggttcatcatccgatagggagatcacaccaaaaggtgcggtgggcgtgtcaatatcagcaagttgttcacggaaataggcttcgtgtaccgatgttggtacgtttaacgtctgagcgataaagttacgataaggctgagcagcgggtaatgtttcaggttgttcttgttgtttctgaataagctgtatcagggcaatttcgtcgaaaatcagctccagtgtcatatggtcagcggtcatatgatgaaagtgcagtgccagcagccagttatcctgcaccagatcataagcaatatctaccaaaaatagtggtgcatggtttagcttaagacggtgttcacgcggattattgagcgctctgagctgagcgggaatatcatctgttgtggacggaatgaactcattgatcgtcagccgtgcctgacgccagaccacctgaaccggtttgaccagcccctgccagcaggcggctgtacgcagaatatcgtggcggtcgataacatactgaaaaccggacaggaaatcatcaaggtatgcgcgggtattgaaagcgagcatacaatggagcaaataaatatcaccctgttcctgtatatatgtggtgaaacagaacgccttcctgtaacggtgccagtggatacatatcctgtatattgctggctccgccgggagtgacttcgacaatcgcatcaatttcggcctgtgaaagtgaaaccagcggtagcatatccggtgtaatggctgtgcaatcatccgggataaggttaggcggaacaacaaaagtatcggcatctccctcaatcgcctgagccattatcatcaggacaggcgctgagaacacactgcgaacatccagtttccagccaaatttgtacagtcgttcaatcagactgacaatcatcagcgaatgaccgccgagttcaaagaagtgatcatggcggctgacctgctctaatcccagcagctcttgccagatgtgcgctagtgcggtttctttctcccctatagggagcctgataacctgcgggttatcactgtcaaaacatcaggctcatgcattgcctgactatcaagtttttccgctaggggttaacaggaaggtttccaacacaaataaagcactgggcaatatatatttcagcaaggtgttgagcgagttgctggcgcagttctgcaggggagagttcaacaccctcctgtggacgtaaataggcgatcagccgtttctgttcaccggttttttcctcaatagcctgttgattaaaagtatcctcacgggcgataaccacggcttcactcacaccgtgacactgcatcagctgtgcttcaatttctcccagttcaatgcggaagccgcgaattttgacctgaaaatcattacgtccgaggtattcgatattaccatcaggcagccagcgaccgagatcaccggttttgtacatgcgggcattgggttctgaggagaaaggatcggcggggaaacgttccattgtcagttcaggacgattcagatatccccgcgctacacccgctccggcaatgtggatttcaccgacagtgcctatggggacaagctgagctgatgaatcaaggatataaatccgggtattggcgatcgggcgtccgatgtggttgtgaaaacccgttgtccgctccatacgtgtccacgttgaataaacggtcgtttctgaagggccatacagatcgtatatatgccggatattggtgtgtgcaaataactgtttaactatatgtggtttcagcgcttcaccgcctagattgatggttgcgatatttgcaggtatcgcattggcttcaatcagttgtgggatagccgagggcacggtattgatcaggctgaggttctgttttgcagcgatagaccttgtattgatcagcgatagcacatcagggacaagatgcactgtaccgccagaaagcagaggtgtgaaacattcgtatacagatagatcaaaattcagtgacgtggaaaaaagggggtgtgccagctcttgttggctgaatgttttccgcgcccagttcaggaagttgacggtattgctgtgttcgattgccacacctttcggcagaccggttgaaccggaggtgtagatgacataggccagatggcgtgaagtcagctccagtgactgtgcgtcaaggttgtgatcgggcagttctgccagaggggaggagctgatatcgaatatattgtcgagcagaacaattggtacagagctgtgtagcgtgccagccagtgttgtctgagtcagaatggctgtcggggctgagtcttccagcatataggccagccgttcagcagggtaagccggatcgaaagggacataagctccgcccgctttcaggatagccagtaagcccacaatcatttcggggctgcgttcgatgcaaatggcaattcgatcatccggttttattcccagcttaaccagataatgagccagttggttggcatgacggttaagtgcgtcatagctcagggtttgttgttcgaaaacgacagcgatagcatccggagtttgtgtcacctgttgttcaaacagttcatggattagggcgggttgtgggctgtttatttctgaaaaagtgtcttgtgtggcgttgaaatccaccagcaactgctgccgttctgctgcggacagcataggcaggtgcgtaatggcttgtgtttcatcttctgccattgctgtcagtacattgatgagataacccaccatgcgttcagcggttgcggcatcaaacagatcagcggcatattccagcccgccagtcagacctgtatcactgtcggccagtatcagcattaaatcgaagtgggcactatgacctgcctgctcaagccgggtgatttgcaactcatgtgatgtctgatcctgaaccggcgtattatccagcgccagcatgacctgaaagatagggctatagctgagactacgttcaggctgtaaggcttcaacgacttgttcaaaaggcagatcctgatgagcgtaagcagccagtgcctgctcccgcacctgagccaacaggtcagtgacagagaaatgattattgagcctgatccgaagagccagtgtattaacaaaaaatcccatcaatccttcaagctcagagagtgatcgattggcgatgggggtgccaatgacaacatcatcctgaccactcagccgcgacagcacgatactccagccagccagaagcgtcataaaaagggtggtatcgtggcgttttccgagagcctgaagtgatgccagcaccgtgttatcaagctgaaaaggtacctgactgccgatataggactggattgccggacgtggacgatctgtcgggagtgacaggagtgccggtgcatgctcaagctgtatacgccagaaattttgttgggccgtgaagatattttcctgtaaccattcacgctgccagacagcatagtcggcgtattgaatggataagggtgacaaagatatatcatgaccgttaagcaatgcatgatagataatatccagttcacgcatgaatacaccgatagaccagccatcagtgattatatgatgcaaagtgatcagtaacagatgctcttcatcggtcagttgcagcagatgaccacgaactagtggcccgtggataaaatcaaaggtcgtctgagcttcaagtgctgtaatctcttcaattcgtacagcttgtcgcgccggatctaagttgcgtaactcatggcaggacaaggtaaagccggtatcagcaggatcgatatgctgataaggctggccttcaaccagaataaaccgagtgcgcaggctttcatggcgggcaaccagataattgagtgtactggtcagggtatgatagttgagtagacctgccagacgcagtgccaccggaatatggtaggcgcggctggccgccgaatcgagctggttcaggaaccataagcgctgctgggcaaatgacagcggtagtggctgactgcgatcagccgaggggataatagcctgcgtggataccgctgcttcagtaataacctgagctaactccatcagaacaggtcggctaaaaatctgttgcagagggagttctcgtcccatgatccgacgtatacgggccgccagctggacagccagcagggagtcaccacccaattcaaagaaatggtcatggcgaccaacctgttctaatcctaataaattctgccagatttgcgctaaagccgtttctatccttccttgtggtgtttcatactcatgcgtgactaccgcagagtgttcaggcaacggcaaggcacggcgatccagtttgccattcggtgtgagaggaaaagcggcaagtaccacaaacgcactgggcagcatatattctgtcagatgttctgccagctggcggcgcagaaccgccggaaccagttcaacaccattctgcggcagtaagtaggcgattagacgtttattttctggttcgtcttcacgaaggataaccacggcctcacgtacaccgtggcattgcttaagtctggcttcaatttcccccagctcaatgcggaagccccgtatcttgtactgaaaatcattgcgaccaagatattcaatattgccatcgggcaaccagcgccctacatccccggttttatacatgcgctcatccggattaccggcgaacggatcgggcaggaaacgttcagtagtcagatcaggacggttcagatagccacgggcaacgccagcacctgaaatatagagttcgccagcaacgcctattggaacaggctgaacataggcatcaaggatatagatgcgtaaatcctccagaggctgcccaatcaggctgccatgccgtgcatggatctccgcttccgtcagttcacggtaggtcgcatgtacggtaatttccgtgatgccatacatattcaccagacgggtctgttcagtaggattgcgttcaacccacggggcaagggtgtgcaactctaatgcttcgccgccgaatatgatgcagcgcagtgtgtgctgctcatgcggcatcatctcctgagccgcaatcaactgacggaaggcacttggagtctggttcagaatagtgacctgcttccggcaaagcagctcatagaacatctggggcgagcgggcacattcaagtggaacaacaatgagtttgcccccgtaagccaacgctccccacaattcccacactgaaaaatcgaaagcaaaggagtgaaacagcgtccagacatcgttgttatcaaaccggaaacgcgagtgtgttgccgccagcaggcgagtgatattggtatgttcaaccatcacgcctttgggaagaccggttgaaccagaggtgtagataatataggccagatggtgtggcatcagccctaatgcctgtgcatccggattgtcagccggttgttctgccagaaatgaaggatcggtgtcgagtatattatcgagcagaattattggcacggagctggtcagtttgtcagccagtgttgtccgggtcagtatgatcactggctctgaatcttccagcatataggccagtcgttcggtagggtaagccggatcgagtggcacataggctccgcccgctttcagaatagccagtaaacccacaaccatctccagactgcgctcaatacaaatcgcgactcgtttatctggtcttacaccccgtgcaatcagataatgagccagacgattggcgcggcgattgagttcgtcataactcaatttttgcccgttaaactcgacggcaatgttatcgggggacagctctgcctgggtctcaaaaagctgatgaattaagacatgttgcgtaaagctcttctgagtggcattaaaatccaccaatattttttgctgttcagtcggcgatagcaccggcaagtatcgggtcagggtttccggagcagagatcgcggcttctatcagggtgattaaacgggattgaagtgctgtaacctcagtatggctcaggtaatcgggagagtaattaaactccagtgtcaccggttttcggatatcttcactgttcgttgtaaaggcataatgatggattgcaacaatcagaggaaacgggttaccgcgctgcattttgacacatgtgagtgaagcctccggcagactggcactcatttcgatcttctcatatgacagtatgatatcgaacaactgattctggcctgttttctgacgggtttgtaaatgtcggtttaattctgcaatgggtaagcgttggcgcttataacaacgtcgcaactcggttgctacttttctcataacatcaagaaaagaatcatgtgggtctacgctaatacccacggggatcactgaggtaaacatcccaaccatacgtttttgtttgatgtttttacggttgtgtacggggatgccaaaaacaatttcctcagagctgtcagtgcgtgaaaaatgcgttgtcctgaaaaaataacaggccagaatggcatacataaaatgcagcacggataacccgtttgccgcaaccagctcttcgatccgctgaaaaagcgtccggtcaaattgataaactaaaggttcagggggctggtgttctgtggctttatctgaatttgatggtttgagtaatgcagagggaaaattttcatagcgttccagccagaattgcagatcctgtatatagcgttttgaatccagataggcgatatcttcatctacaaaatcaatataagaggaggcgctttcagtgattgcttcacctctggccaattgactgtaagtgttggctatttcttcggtaatcaaccctaaagtggttccatctccgataagatggtgacagaagaactgccagttccagcgtttattacccagccggaacagctcaaaacggaataactcattatttaaatcgaacgggcgtaaaaaggttgtgtggaaatgctgttcagccaactcttctgggttgtcatgcccggaaaaatcattcactgttacggaaacaggtaaagtattatcaattttttgcaggggtaattcttgcgtatcaatcaatcgtagacggagtgcatcatgacgctcaacaacatttttaaaagcctgaattaacagcgcttcatctaattctccctcaataagaatcactgaaccgatattgtaacaggtattatcagggcgaaggatttgatcaagccagacaacctgttgcggagaactgagcgagaatgtgcaagaggaagattcagaagtattctcatatgaaggctgggcttcgttgttgatatgattgcacgacataggcattacttaactcctgcttgttaggcttattgattagcctaatgattgaatatgatttacttaacccaaaataatgaataaaaattaatgtgttatagttaaacttctttcaatactctctgagcgagggcaattaaactggggctgtagcatggggatgggatgggggatttgagcccaaccagataatctgctgaagcagagttgatcgaaaatttgcaatcagaagaaaggaatacgtaatttacctcatatgcaggctgattttcgttattgagacgagagcacgacatanacattacttaactcctgcttgttagactgataatgagtcaaatatt

SEQ ID NO: 75 - DNA, 6354 bp, Xenorhabdus sp.
taaattatatattcaggttaatttaatgacagataacataaaaaaacagataaataaaaaagaaacaataaccaacataaattaaaaacaatgtaattaaccagaataacaatctaatttgttatcttcattgcaaatttaacgtatttagttgcactaaatttttttcatgaacatcatgatatataaataatttataataaataccctataacgaaaaatgaagataaaagttgcacttattgatgatcatgttgtagttcgttcagggtttgcccaactactgacacttgaagatgatattacaatagtaggacaatacagcaatagtatagaagcatggcctgctctgctgaaaaagaaaattgatattgtcatcatggatatagccatgccacatgaaaatggtttgcagcttcttgcacggctacgtccccaaaagcccaattttcgtactattatgctcagtatttatgatacagctgctcttgtgcaaactgcgcttgattcaggggctcgtggctatctgacaaaatgttgtggagcagaagaactggtgcaagcagtacgtacagtccataatggagacatttacctttgtgccgacgccatgaaagctctacgccaaaagccacaagaattagatgtactacaagtgctcactccacgggaacgagagatttttaatcttttaatacatggaatgaatgcgaaaagtattgcggagcaacttaaattaagtccaaaaactgtacatgtccaccgtgctaatatccttagtaaattacagtgtgactccactattgaactcgtgcattacgcattaaaaaatcagattattgcgggttaatgaatgaattgtaaaatacgctttagcttacaagctctgtttctactgattttttactcatttacctggatctctctatggataatcagtttttatctgagtaaaaatgggcaacaggcggcactatttttaccccaggggctgcgtctggtattaatgattttattatggcgacgttatatcgctattcttattataagtgaaatcagtatattaatgtggttctatcatgagcaacttattacaaacataagtatattactctctccatttatcagcttgactacaatcatcattgtaaaaatgatatggaaaaaccattctctttattggcaacaaatatctatattattgtctggtgtaatagccaatagccaatagccaatagccaatagccttttacaaacccttttcttaagttttttattaccgagtaaagctaacctcatttttcttacatcgctaacaggtggggttcttctatctccttttatttatcttatatatatctatttatacgagcaaaaccttaaaaggcaaaatattactgataactcctcttatccccaattacatacatcattactgatgtggtgtttcctattcagcttacttggtgtaagtggtcaattctttttatcacctaaaattgaaggaattctgtcaattttagtctttattcccaatgtatttatggcctatcgttacggctggcaaggaggagttttctccgctttattaggcagcctgatcgtaacatctgctcgccacttcagtggctctttcagtgaattacaagaacttgaaattttcttaacaacacaagccctgttgggtataggacttggtattgccatcagccgtcaacagcaattagccggtaatcttatccatcaaaagcgattaacagaaaatctcaatcgttatcgcacacaactggaacaggaattagctgcacgacaaattctaatgcaaaaaatagtccatatcgaagaaaacattcgtaaaaatattgccagagaattacatgatgaaattggacaaaatattactgcaattcaaattcaatctaccttagtgaaacgaacgacaaattctccgttaacaataaaagccgctgatcaaattaaatccattgctcagcaaatacaccactctacccgacaacttcttcgcgaattacgccctcctgttttggatgaaatgtcatttgaacaggcaattcgccatctggtaaatgaatctgctttcgaagagaggaatattgcctgtcagttcaattatcaattaccacaggagcctcaagatagcactatcattttgactctatatcgattcattcaagagcttctgaagaatataaataagcactcgggtgctaacataataatcattacattaaaacaaaaaggaaattttattaaacttcgcataagtgacaatggggtcggaatcactgaaggaaagaaaaatgcaggttttggattaaaaggtattgaagagagaattcagataattggtggaaactggttattaaaatcacaaaaaggaacacatattgtgattaacttgcccataaattatcatgagcacattagacaatcagatttattttttacatgtaaaaaacatgtttaataataaacagatttaaaaatgagataattcatttgtcaatacaaaattacttttatggagaaatactattatgctagccgataacaatagctggacctcacaggaatatcgttattggcgagttcatttattactatcaatattgatcggttatgctacatttcaacttacacgcagaagtttaaatgttgttatgccagcaatgcaaatagagctagtgttagataaaaatgatattggctggatcgccagcctattttatcttgcttacggagtttcaaaatttatatccggaattttccatgaccatacaggctatcgctggtttatgggagtaggattattaataaccggagtacttaatgttgtccttgcattttgttcttcattgtcagccatattaattatatggacactgaatggtttttttcagggctggggctggcctccatgtgcacgcttactaacttactggtattctcgtaacgaacggggattctggtggggatgttggaatatttcaattaatataagcgggatcctcctgacgctattatcaacgctactagcgacactatatagttggaaggcagcattgctgcttcccggagtcattagcatattacttggaatttggctatgccaacaattacgtggtactcctcaagagcatggattacccagtattgggagctggcgacaagatcatctggaactgaggcaagaacaactatcccctccaatgccaatgataaaaattttaaaagaaacaattgtgtttaatcgcattatctggttgcttggtatttcctatattctgatctatttcatcagaacagcaatacatgactggggaagtctttggctaacagaaaaacatggttctgatttactcaatacaaatacgatcctctcattatttgaattaggaggattattgggagcactctgctcaggatggggctcagacttactttttcgtagccagcgagctcctatgattttactattttctctgggattatttttttcagttacagcactgtggctagtccccatacaaaatagtgccttactagctacctgtatttttagtattggcttttttgttttcggcccacaaatgttaattgggctggcagcgacagaatattgtcataagaatgctgcgggtactgttacaggctacctcgggttatattcctatctgagtgcagctattgcaggctggccactgagtcaggtgattaatcattatgactggtctggtatgtttgctctaattacgttagcgtctgcattgatgggattattactgatgccactattaatatctaattccagtaaattcaataatccatcttaaaaaaaactttcccattttttaattcaatagaagcattaaatattatttatataaatagaatggctttcttaataaatcacttatccatttggtcttctatctaaaaaatgaaacgataacacaatgaaatataaacactatgttatcgttttatttcattatcaatacaaaaaaacactccatacttatatcgaaattaaaaatatcattctaaaaacaccggtaacttttcatcaactgaacggcataaatgctatatagaacacatttctgaaatttattatcattcttatttacggctatttcccttcatgggaataacacctgccatcatcaatacattgataaaaaaagaaaataaaacaacaacaaaataaaacactacctgataccccatccaacactcgaatatttactatatagcaaaaaatcaaaacattatgtaacttccgttgctctgtattagaaggagaaactatgttaactaaaaaacaaaacggaagtcgctttctacgaacagtagagtggctaggaaatgctttacctcatcctgttattctttttattatccttattgctattttgttagtctcttcagcaatcgggcaatattttgacatcacagttattgatccacgccctgaaggggcaaaaggccgggcggcagatggcgtgatccatattgtcagcttacttgacgcagatggaattcgtaaaattctctctaatttggtgacaaactttactggctttgctccgttaggaacggtgttagttgccatgcttggtgtcggtattgcagaacgctcaggtatgctgtctgctctgatgaggttggtcgtggtgaaagcgccgcccaaattaaccactttagccattgtgtttgccggtattatgtcaaatactgcctccgaactgggttatgtggtactgattccactagccgctatcatcttccactcacttggacgccacccacttgcaggcctggcagcagcatttgccggcgtatccggtggttattctgccaatctattactgggaacggttgatcctctgctttcgggaattacacagcaagcggcacagatcatagatccgtcctataccgttggggctgaagctaactggtatttcatgtttgccagtactttcctgatttctattctgggttatttggtgactgaaaaaattgttgaaccacaattaggcccatatacaaataccctgaatgaagatgaaagtacgtttaaaagttccgctgaaatcactcctcaggaaaagaaagcgcttatcgccgcttcactaacgtttgcggctctcagtgtcattttggcattaaacgttataccggaaaacagtatattacgtaatcaggatacggggctaatcggcaattcacccttcctgaaatctatcgttgtctttatttttatcttctttgctgtaccgggcattgtctacggctatgtcgccagaacaatcaaatccaataaagatgtagtcgatggcatggcacagtccatgagtaatctgggtttatatctggttattattttcttcgcctcccagtttgttgccttctttggctggacaaatatcggtcaaattattgcagtaaaaggggcaaccttccttaatgaaattaacctacacggtggcctgttatttatcttcttcatcctgatttgtgcttttattaatctgatgattggatcagcatctgcacaatgggccgtaaccgcccccatatttgtacctatgctgatgctggcaggttatgctccagaaactattcaggctgcttaccgtattggtgattctgtcaccaatatcatcaccccgatgatgagttattttgggctgattatggcaattaccgtaagatataaaaaagatgccggtatcgggacaatgatcaccatgatgctaccttattccgtggtatttacggtgggttggtcactgttcttctatctctgggtctttgttcttggtttgcctgtcggcccgggttcacccatttactatacacccgctggttaataccggtagattcattattgccctgagcatttacctgtctttcatacacaaatcccccgataaaaaatcgggggattttttgaatctttttccactttaccgatctgagtaataacgatttcattgaggtacggtaaaatgttccaaactcacgcagaacaatgggctgatgaaactttttctcgcgcaaatttgggcgatagtcggcgtacaaaacggcttatcaaattcaccgcctcgttagccaatcatatcgggcaatctattgtgcaatcactcaaaaccccagcggatattgaagccgcttatcggtttacgcgtaatcaggccattaacgcaacctctattgccgaggccggatttgcggcgacggctgaacacgccaaatcctatgactgtttgctggcattggaagatacgacctccctggaatttactcctccggccgggggaa

SEQ ID NO: 76 - DNA, 10150 bp, Xenorhabdus sp.
cagtaaaagatttgaagtagggtggttatttaaccagttattattagccgcttaagataacagtcctataatcagtgccaaggtggtgaaattggtatacacgctcccttgaggtggtagtgcttaaccaacgggcgtacgggttcaagtcccgtcctcggcaccattaatctagaaacttgcgtttttagtattatcagcgtaagatttgccacgttttcgaacgcgggatggagcagcatggtagctcgtcgggctcataacccgaaggtcgtcggttcaaatccggctcccgcaaccacttcttaacaactatgtaccttttcaaacagttataagcttagcgaccatagaggtattaaccctgatttgacaggttgcttcatgaggtatagctttgataggtattacaagaagttggttgagaccactggcagtaaacagggtccagttgcataaagccccgcgtatcggggttttttgttatttgacagcagaactactgggctaatatagccctttttttatgtcttgggggtgggcttgtccacattagagcaaaaattaacagcgatgatttcagcaccagttgaagctttaggttatgaattagtgggcctggagtttattcgcgcacgcgtatcgacactgcgagtctatatcgatagtgaggagggtatcactgttgatgattgtgctgatgttagccatcaggtcagtgcagtactcgacgtcgaagatccgatcccagggctttacaacctggaaatatcttctccggggcttgatcgtccactgtttaaggctgaacactaccagcgtttcatgggggaagaaatcagcctgatgttacgcatggcaatgcaaaatcgtcgtaaatggcaaggtattatcaaagccgttgatggtgaaatgattacggttacggtggatggaaaagacgaagtgttcgcactgagcaacatccagaaagcgaacctggtaccccacttttaaagttcggatgaggcaactaggatgaataaagaaattctggctgttgttgaagcggtttctaatgaaaaatctctccctcgcgaaaaaatcttcgaagcattagagattgcactggcgacagccaccaagaaaaaatatgagcaagaaatcgatgttcgtgtctgcatcgatcgtaaatccggtgattttgataccttccgccgctgggttgcggtagaagaagtcacccagcctacccgtgaaatcacactggaagcggcaaaatttgacgacccggaagttgaactgggtggttatattgaagaccagattgaatcggtaacttttgaccgcatcacaactcagaccgcaaaacaggttatcgtacagaaagtacgtgaagctgagcgtgcaatggtcgttgatcaattccgcgaacagcagggtgagatcgtgaccggtcaggttaaaaaagtaaaccgtgaaaacattacgcttgatctgggtaataacgctgaagcggtgatcttgcgtgaagatatgctgccacgcgaaaacttccgtcccggcgaccgtgtacgtggtgtcttatatgacgtacgtccggaagcacgtggtgcacagctgttcatcacccgttcccgccctgaaatgctggttgaattgttccgtattgaagtgccggaaattggcgaagagatcattgagatcaaagctgctgcccgtgatccgggttcccgcgctaaaatcgcagtgaaaactaacgacaagcgtattgacccggttggtgcctgcgtaggcatgcgcggtgcaagggtacaggcggtttccagcgagctgggcggtgaaagaattgatattgtgttgtgggatgataacccggcgcaatttgtcattaatgcaatggctccggcggatgttgcatctatcgttgttgatgaagataactgcacgatggatgttgccgtggaaaacagtaatcttgctcaggcgattggccgtaatggtcaaaacgtccgtctggcggcacaattgctgaaaaaacatcgtggtgatgacaagtgggaactgaatgtcatgactgcggaagagctgcaagcaaaacatcaggcagaagctcacgcttctattgatacatttaccaagcatctcgacattgatgaagatttcgccaccttattggtcgaagaaggtttctctacactggaagaactggcctatgtaccagttaatgaacttctggctgtagaaggtcttgatgaagaaaccgttgaagttctccgtgagcgtgcgaaagcggctttgacaacgctggaactggctcagaaagagagtcttggtgatcagcagccagcccaagatttactggatttgcctggcatggaacgtgctttagcgtttaatctggctgcccgtggcatctgtactctggaagatcttgccgaacagggtatcgacgacttatctgatatcgaaggactgaatgatgagcaagcaggagaactcattatggcagctcgaaatatctgttggtttggcgatgatgcataaataaactgtagcaggaaggaacagaatgacagaggtaaccgtaaaattactggcagaagagatccagacatcggttgaacgcctgatccagcaattcactgatgctggcattcagaaaaccgcaactgactctgtttcccagaaagaaaaagaagctttgctggcccacctgaaccgcgaacaaggcggtactggtggccagccaggtaaattgacactacagcgtaaaacgcgcagtacactgaacgtccctagcaccggtggcaaaagtaaatcggtagcgattgaagtccgcaaaaaacgcacatatgtgaaccgtgacgcgattgaacaggctaaagcggaagaacaggcgcagcgtgaagcggaagagcaggctcggcgcgaggcagaagagaaagcgcggcttgaaactgaagcgaagaaactcgcggaagagcaagctcaacgtgaagcggaagaacaggcaaaacgcgaagcagaaaagcaagctaaacgtgaagcagaagaaaaagccaaacgtgaagaggctgaaaaggctcagcgtgaggcagcggaaaaagaaaaagtgactactaagcaacataccgaaaccaagtctaaatcagtgcaaactgaggcagcagcgcaaaatgaaaaagcgcgccgtgaagctgaagcagcaaatttaaaacgcaaagctgaagaagagatgcgccgtaaagttgaagcagaagcaaaacgtgtagcagaagaagcacgtcgcatggcagaagagaataaggataaatggtccaacgatgctgatgtaaatgacaacagcaacagtgactaccatgtaacaacttcccgtcatgcccgtgatgcggaagatgagaatgacgccaaagttgaaggcgatcgtcgtacccgcagccgcggtggtaaaaacacccgccagaagaaaaataacaaacattctgaatcgaaagctgatcgtgaagaagcacgtgcagttggccgtactaaaggcaaacagcgtaaaccgagtgctttgcaacagagctttaataaacctgtcgttgccgttaaccgtgatgttgtgattggtgaaaccatcacagttgctgaactggctaacaaaatggcagtaaaaggttctcaggttatcaaaaccatgatgaagatgggcgcgatggcgactatcaatcaggttattgatcaggaaaccgctcagctggttgctgaggaaatgggtcacaaagttatcctgcgtcgtgaaaacgagctggaagaagcgctgatgagtgatcgtgacactggtgaaacacaggctgaaccacgtgcgcctgtcgtaactatcatgggccacgttgaccacggtaaaacctctttgctggactatatccgttcaaccaaagtggcatctggcgaagcgggtggtattactcagcacatcggtgcataccatgtgaaaactgagaaaggtatgatcaccttcctggataccccgggccatgctgcatttacctccatgcgtgctcgtggtgctaaagcgaccgatatcgttgttctggttgttgcggcggatgatggcgtgatgcctcagaccatcgaagctatccagcacgctaaggctgctaatgtgccggttgttgttgcggttaacaaaatcgataagccagaagctgatccggatcgtgtgaaaaacgaattgtcacagtacggcatcattccggaagaatggggcggcgagactcagttcatgcatgtatcagccaaagctggtcttggtattgatgaattgctggaagctatcctgctacaggctgaagtactggaactgaatgcagttcactctggcatggcaaacggtgtagttatcgaatccttcctggataaaggccgtggcccggttgctaccattctggtgcagtccggtacgctgaataaaggtgatatcgttctgtgcggctttgaatatggccgtatccgtgcgatgcgtaacgaacttggtcaggaagtaatgactgcgggtccatccattcctgtggaaatcctgggtctgtccaacgtaccgtctgcgggtgatgaagcgactgttgtacgtgacgagaaaaaagcacgtgaagttgctctgtatcgtcagggtaaatttcgtgaagtgaaactggctcgtcagcagaaatctaaactggaaaacatgtttgcgaacatggaagaaggtaaagtatctgaactgaacatcgttctgaaaactgatgttcagggtacatgcgaagcaatttgtgattcactgctgaaactgtctactgacgaagttaaagtgaagatcattggttctggcgtaggtggtatcactgaaactgacgcaacactggccgcagcttctaatgctatcattctgggcttcaacgtacgtgctgatgcttctgcacgccgtatcattgaaaacgaaagcgttgacctgcgttactactctgttatctatagtttgattgatgaaatcaaacaggcgatgagtggtatgctggcaccagaatacaaacagcaaatcatgggactggcagaagtccgtgatgtcttcaaatctcctaaatttggtgcgattgctggctgtatggtgacagaaggtaacatcaagcgtaataacccaatccgtgtactgcgtgacaacgtggttatctacgaaggtgagctggaatctttgcgtcgctttaaggatgatgtcaacgaagttcgtaatggtatggaatgtggtatcggtgtgaagaactacaatgatgttcgcgttggcgatatgattgaagtcttcgaagtggttgaagtgaaacgctccatcgattaaaaaccacaattgacccgttaaatttcaggttattcctcatcaggcggtaacctgaataaacagggtagagattcattccattcttggggggcttcatgccccccaaaatgtcaggagataaaacaatggcaagagaattcagtcgtactcagcgcgttgctcaggaaatgcaaaaagagattgccatcattttacagcgtgaaatgaaagatccccgcatcggtatggcaactgtttcaggtgttgaggtttcccgcgatctggcttatgccaaagtatttgtaacttttctgaatgcattagtggacggacacgattcagagaaagttaacctaggtatcaaagcattgaatgaagcttccggttttattcgttcactgctgggtaaggcgatgcgtttgcgtgttattcctgaactgacgttttcttacgacagttctttgattgaagggatgcgcatgtcaaatctggtcaccaacgtcgtgaaaagcgacgaacagcgtcgtgcttctacggatcacaacgaggaaaaataatggggcgtcgtcgtaggggtcgtgcgatacacggcgtactgttgctggataagccgcaggatatttcctccaatgatgctttacagaaagtaaggcgggtctttaatgccagtaaagcgggccataccggtgcgctagacccgctggcaacgggaatgctgccaatttgtcttggtgaggcgactaaattttcccagtttttgttggattcagataaacgttatcgggtcattgcccgcctggggcagcgcactgatacttccgattcacacggtaaaattattagtgaacgtaaagttcaggtgacttcctctcagcttgatgcagcactggaaacattccgtggggataccatgcaggttccttccatgtactctgcattgaagcatcagggaaaaccgctgtatgaatatgcccgtcagggtattgaaattgagcgggaagctcgcccgattactgtttatgaattacagttcattcgctgggaaggcgatgagctggagctggaaattcattgttccaaaggaacctatatccgcaccattattgatgatttgggtgaattactgggctgtggtgctcatgttatttatctgcgccgtttgcaggtagctaattaccctaatcaccgcatggtgacactggaacagctctatgcgttaaaagaacaggctgaagaacagcagattgaagcaggagaattgctcgatccattattattaccgatggataccgctgtaatgcattttccggttattcaattgtcatctgttgttgctgcttattttaagcaggggcagcctgttcgcagccaacatagcctgccatctggcgaatgggtgcgggttaatgaaggtgatgaaaataaattcatcggcattgctgttattgatgatgatggcctgatagctccgcgtcggttggttgtagaaaccaccgaagatggtgaaatgcattaaaagtagcatttatggggttatcttgcgcttcatctatttgcagcgtagaataatgcgcctgtatatgggtggctgaattagagatcggcactcatcatttttaaactatatttggagttatactatgtctctaagtactgaagcaaaagcgcagattattgctgattttggccgtggcgctaacgacagtggttccagcgaagttcagattgccctgctgactgcacaaatcaaccatctgcaaggtcactttgcagagcacaaaaaagatcaccacagccgtcgtggtctgctgcgtatggttgcacagcgtcgtaaactgctgaactacctgaagcgtaaagatctggcatcttacaccacgctgatcgagcgtctgggactgcgtcgctaatcgatgagtttcagtggaaaggggcctatctggccccttttcttctagaaaatggagattaagaaatttaagttccatttttaactagttgaacctcttcagttacagtgactcgcgcggctaatgagagtacttaaaaagacatttccgaaagatttcaggttacaccgcaactattaacgctgttacttgaaaggtaaagggctaagtattgtcattagtcgtgagggtgtagcgaagagaacatccattgttgctgatatttaaacgtagcaacacaaacgaaggaatattattttgctgaatccgattgttcgtaaattccagtatggtcagcacactgtgaccatcgaaaccggcatgatggctcgtcaagcgacagccgctgttatggttaatatggatgacaccgcggtatttgttaccgttgttggtcagaaaaaagtgaaaccaggtcaggattttttccccctggctgttaactatccaggacggcattatccggctggccgtattccaggaagttttttccgtcgtgaaggccgtccgggtgaaggcgagactctcgttgcccgtttgatcgaccgtccactgcgtcctctgttcccagaaggcttcctaaacgaagttcaaatcatcgcaaccgttgtttccgtaaacccacaggttaacccggatatcgttgctatgatcggttcttccgcagtattggcactgtctggtatcccgttcaacggcccgattggtgcagcgcgtgttggttatatcaatgaccagtatgtactgaacccaaccagcgatgaactgaaaaacagccgtctggatttggttgttgcaggtacaaataacgctgtactgatggttgaatctgaagcggaactgctgacagaagaacaaatgttgggcgcggttgtattcggtcatgagcaacaacagattgtgattgataacatcaacgcactggttgctgaagcaggtaaagagaagtggaactggtcacctgagccagttaaccagtctctgcatgagcgtgtagctgagctggcagaaagccgtctgggtgatgcttaccgtatcactgagaaacaagatcgttatgctcaggttgatgctatcaaagaagaagtagcagcaatcattctggcagaagccgcagaaaaagatctggagctggaagagtcagaagttcttgacgtactggctgttctggagaaaaacgttgttcgtagccgtgttctgcgtggtgagccacgtattgatggccgtgaaaaagatatggttcgtgcactggatgttcgcactggcgtcttgccacgtactcatggctcatctctgttcacccgtggtgaaactcaggcgctggttgcagcaactctgggtactgagcgtgatgcacaggttatcgacgaactgatgggtgagcgtacagaccgcttcctgttccactacaacttccctccatactctgtaggtgaaactggtatggttggttcaccaaaacgtcgtgaaattggtcacggtcgtttggcgaagcgtggtgttctggcagtaatgcctagcattaatgaattcccgtataccgtgcgtgtcgtttctgaaattactgaatccaatggttcttcttctatggcttccgtctgtggtgcttctctggcactgatggatgcaggcgtgccgattaaagccgcagttgctggtatcgctatgggtctggtgaaagaaggtgaaaactttgtggttctgtctgatattctgggtgatgaagatcatctgggcgacatggactttaaagttgcgggtagccgtgatggtatcagtgcattgcagatggatatcaaaattgaaggtatcacccgtgaaatcatgcagattgctctgaatcaggctaaaggtgcccgtttacacatcctgagcgtgatggaacaggctatccaaagcccacgtaatgatatctctgaatttgcaccacgcattcacaccattaagatcaatccagacaagatcaaagatgtgattggtaaaggcggttcagttatccgtgcactgaccgaagaaaccggtacaaccatcgagatcgaagatgatggtactgtgaagatcgcagcaactgacggcgataaagctcgtcatgctatcagccgtatcgaagagatcactgctgaggttgaagttggccgcatttatgctggtaaagtgactcgtattgttgacttcggtgcattcgttgctatcggtggcggtaaagaaggtctggtacatatttctcagatcgctgacaagcgtgtagagaaagtgactgactatttgcagcttggtcaggaagttccggttaaggtactggaaatcgatcgtcagggtcgtatccgcctgagcatgaaagaagctgtagctaatactgctgctgaagctccacaattaccggaatcatcagtagaataagtttgacgtaatgaacggcgtcctgtaaaaagggcgcggcttaccctgatatatttctgctcacctctggtaggtgggctgaaaaataaaaggtaagccaatttttctggtaggatgccagaaataaacaatgtgggtggagcaacagggcattctgattaatgtctgacttcgggagtaggaaatgaattcttttctgcgctggtgttacgttgcagctatttttctccttgtgggatgtggtggcagcacagggtggcgtaaaaatgaagtttttgctattccacttcaaccgacattgcaacaagaggttattctggcacgcatggaacaaattcttgcgagccgttctctcaaggaagatgagtacgcacagcttttatatgaaagaggtgtcctgtatgatagccttgggctgagggcataaacacagaatcatttttcagtggctttgtctatccgtcctgatattcctgaagtttttaactat

SEQ ID NO: 77 - DNA, 10520 bp, Xenorhabdus sp.
  unsure (1)..(10520): unsure at all n locations
tctaagggtgatcttttcctcaataacatttcacgcaatattatcctctcttactgttattgaggtttttatgtctaccgttttacgtaaatatttaaacttacggcctcaaattggccaaagagtcatgctagaccctacttctattgtgattggagatgtaagattggcagataatgtaagtatctggccgctagttgtcatccgtggtgatgtcaattatgtttctattggagctcgtaccaatatacaggacggttctattctacatgtaactcataaatcatctgataatcctgatggcttcccattaatcataggcgaggaagtcactgtcggtcacaaagcaatgttacatggctgtacgataggaaaccgagtacttgttgggatgagttcaattatacttgatggctctatcattgaagacaatgtcattattggggccggtagtcttgtcccaccaagaaaaatattagaaagtggatatctgtatataggcagcccagtgaaacaagtgcgaaaactcaaacatgaagaattagaagggctgctttattctgctaataactacgcccgctggaaagatgattacctagcagacatatcagacggtaacgaatagcatccaaattgatcatcctgcccacgtaggatgatttcttcaaattcttcctccaaatcccaacgatgctggcgaaatagctcaagcggatgaaagtcattaccataacgtcgagttaattcatcagcactgatcaggcactgcaccaataaaccattgaccatagcaggaaagataactttgttttcctgcccattccattcttcacggtcaggaaagtgaattgcttgattcataaacgtaattcttctcttaaagcagctaaaacaggttctacttttggtaagacaccatgccaaagttcaaaagcatgcgccgcttgtcccactagcatccctaatccatcagccaaaaatgaggctccgctttccttggcaaaactaaggaaaggcgttaatcctttttgataatacatatcataacaagcaccaccattacggaaaattgatggagatatttcaggtacacttccatcaaggccagaagcggtcgcattaataataagatcaaaatatggggtcagaagagacttcatttcaactgcctgaatatgaccaaatgaggagaatatattcactataccctgtgcacgagcaaaagtacggttagtaatagtcaccgtacatccaaagtctagtaaaggagatataactccttttgctgctccaccagccccaataatcaggatatgctgccctttgctaatgaagttaagccgctgcanatctgctaataacccaaccccatcagtgttatcacccagaagctggttattttcaattagcttgaatgtgttgactgcaccacagtgtttagctcgctcactcagttgatgtgcatactcataagctcgttccttaaagggaacggttatattcgcacctaaaccaccttgctcaaaaaattgcttcaatgtttgttcaaaatgttctaacggagcaagtattctcccatattggtgttcaatacccgtttgtttggcaaataattgatgaatataaggagatttactatgtgcgatcggattaccaaaaaccgcgaatttatccattattccttacccttgccgatatagtttacctgtcaaagcatctctgatttctgatggattcttacgtccacccacttccccctccagcacaggaaaatcgttgccgaattgtcgacaaacttcttctgaactccgacatggttccagcccacttaaatttgcactggttgatacaagaggttttccataaagagcacataattctctgaccaaaggatgatcagtaactctgacagccagtgttgagaatcttcccgtcaaccactttggtgtcccagatttggctgggataacccatgtcaccggtcccggccaacaagagaagattgtccttttctgctcattatccaactgattgtcatcaatatagggacataacctctcataactatcagcaataaggattaaccctttttccttgggtctatttttcagcaataataatttattaaccgctttttcactgtcagggtcacaacccaatccaaaaacagcttccgtaggataagcaatgactttttcttcttttaaagccgtaataattaaatcaaatgcaggagatgcttcattactcattttatttctcagtttcaatggattgctgcttattgcacaatttactagcacaaaacagtttaataccctgtgctgttttcttttcgaccaacaagggataatgacaaagctcacattctccttgtaccggtttattattcagtgttaactggcattcgggatatcgattacaagcgtaaaatgttttaccaaatcgtgacttacgctgaaataacttacctttctgacactgagggcaattaactgaagagtcatcaggtttatcaatcaactcaatatgattacattctggataattactacagccaataaaaataccgtaccgtccttgccgtaaaaccaaagttgaaccgcacttagaacaaatttgcccttccagttccttaataacgtgtccatctgatgatatttttaacgaccgaacataactgcatgatggataattggaacaagcataaaatggaccataggccccgttgcggatcactagttcagcaccacattcagcgcaatattctgtttgttttactgcaaagggtacttttttaggcatatcttactcacggaaaactaatcacgatacttattggaaaaccataaagttcaggttaagagaaaattcaatttttcaattcactcgaacataaccaccagcaacaacagccacttttcccattaattcaagctccaataattgagtcatgacttctgtaataggaagagaagagcgctgagcaattatatcaacaggtgtaacttcatcacttacgttaaccagcacctcagcaaatggcaactctgtttgctcaaattgtttttcattgccctcttccagattaatccattgaaaattagcattaatatgttccattatatcaattacactggttgctaaataagctccctgtttgatcaaccagtgattaccatcactcgaaggccttcctagtgggccaggtaatgcaaaaatatcccttccttgttcaagtgcacagcgtgctgtaatcagtgaaccactattttgatgagcttctacaatcaaaatcgctaaacttaatccactaataattctgtttcgtcttggaaaatttttagctttaggtggcgtgtcagggaaaaactcagaaaccagaaccccattttctttaatgcaacaggctaaagttcgatgacgattaggataaatattttcaagtccactccccaatacagcaacggttttcccccctgcatcaatagcagcctgatggcagataccatcaatcccaaccgctaacccactggttattactatcccattctccgctagccctccagcaaatactcttccccacttttcaccataaaaacttgccgaccggctacccactattgcaacttgtttctcagataatgtgcttactttcccagagacaaaaagtatcagtggaggcgaataaatttgtttcaacaaagaagggtattctggatcagaaaaggttaataagtgattttctgattgctccaaccaattaagactggaaagcaaaacagaaggatttgcctttaaaaattgcacacactgtgtaggtgataagccacaatctttcatcacagcatgagtaatatttttaacctgcagtaggtgctcaattatagacactgcttttgctactgaaaggtgagataccattttcattctcaaccatatttccatcatttccattattgtcatcctgactcaatatgttgtcatgctcacatgattaatttgtaggcgatactgtcaatctaatcaggaaatgtctagaataggcgctaattatcactcactttttggatgcagttctaaacatatatgtcagttttacaagtattacattatccagatgagcggctttgcacaattgccaagccagtagaaaaagtcgatgcagaaatccagcgtatcatcgatgatatgttcgaaacgatgtatgcagaagaaggaatcggcttagcagcaactcaggttgatattcatcaacgcattgttgttattgatgtttcagagaatcgtgaccaaagacttgtacttattaacccagagctagtaaccgagtcaggagaaacaggtatcgaagaaggttgtttatcagttcttgaacaacgtgctatttgtgccacgattcgagcaagtcaaaattaaggcactgaattatcacggtcaaccatttgagctggaagccgatggtctgttggcgatttgtattcaacatgagatggatcacttgctcggtaaactcttcgtagattacttgtctccgttaaaacgacagcgtattcgccaaaaagtcgaaaaaattgaccgactaagagccaaggctaagtaaattttatcattacgggaaataacagtgtctgattctttacgtattatttttgccggaacccctgatttcgcggctcaccatttagcggctttattaaaatctcaacatcaaattgtcggcgtactcactcaacctgataaaccggcaggaaggggtaaaaaactgacaccaagtcctgtaaaagtattggctgaagaatatcatctccctgttttccagccaaaaacattacgtacagaagaaagccagcaatgggtcatggaacaacaagccgatatcatggttgtcgttgcatatggtttgatccttccccaagcggtattagatatgccacctttggggtgcctcaatgttcatggttctttattacctcattggcgcggtgctgcaccaattcaacgtgctatctgggctggagataaagaaacgggggtaacaatcatgcaaatggacgcaggccttgatacaggcgatatgctgttaaaagcaacctgcccaattacaaacgaagatactactgcgagcctgtacgacaaacttgccgatatcggctccgatgcattgcttaatacattaagtctaataacatcgggtaatagtcagccggaaagtcagaataatattcttgctacttatgctgaaaaactcagcaaagatgaagccagaatggattggaatttatcagcaattcagctcgaacgttgtgtacgtgcattcaacccttggccaataagctatttctttattgatgaacagcccattaaagtatggaaggctcatgctattggcggtaaatctaaccaaatcccaggaacaattctccacgcggataaaaaaggtattcaggtcgctacaactgatggaatattgaatattactcaattgcagcccccgggaaaaaaagcaatgtcagctgccgatttattaaattctaagcgcgaatggttcactccgggtaacaaaatcaactaacattcattgcctgtatggtgtcagcatacaggcatcttctcgctttactactattattacgctgatgaaactcagcttttgaccatgccatgaaaaaaacatataacctgcgaagcatcgctgcaaaagcgattagccaagtgctggagcaaggacagtcacttagcactgttatacccgaactccaacaaaaagtatccgataaagataaagctctcctacaggaactctgctttggtgtaatgagagttttacctcagctggaatggcttatagcccaattaatggcaaaaccattgaaaggtaagcaacgcattttccactatttgatcatggttggaatgtatcaacttacttatacacgtataccggcacatgcagcgatcgcagaaacagttaatgggacaatcagtttaaagcgtccacaattgaaaggactcattaatggcgttcttcgacaatttcagcgtcagcaagaagagttagtcgaacaatctaatgatgtcggtcactatttacatcccaaatggctattaactcgtattcaaaaagcttatcctcacaattggcaacatattgtcggtgcgaataatcaaaaaccaccaatgtggctacgtgtcaatcagatacatcactctacaaatcaatatctttctttgctacaaaaagccaatatagccgcagaattagacacagatcatcccaacgcaattcgtctattgaacccttgtcctgtcaatatactgcccgggtttgataaaggctgggttactattcaggatcgttctgcacaaggctgtgctgaattattaatgccatgtgatggagaagaaatacttgatctttgcgctgcaccaggcggcaaaacaactcatatacttgagatggcaccaaacgccaaagtacttgccgttgatattgatgaacaaagaattaagcgtgtggaagaaaacttacagcgccttaatttaaatgctgtcattaaaacgggtgatgggcgtttcccacacaaatgggctgacggagaacaatttaatcgcattcttcttgatgcaccatgttcagcaacaggtgtcatacgtcgccatccagatataaaatggttacgaagaaatgaggatatcgatcagttagtgacgcttcaatctgaaatacttgatgctatttggccatacttaaagaaaagtggaactctggtttatgccacatgctcaattttacctgatgaaaatagcgagcaagttaaagcatttttaaaacgcaatccggatgccaagctctctggaacaggtactcaagagaccccaggaatacaaattactcccgagataacaggtggtgatggcttcttttatgctcgattgactaagcaataatagaatagcttttctctcgctctaccgggcgagagaatgtaatgactttgctaaaatagcaaaacaattgcaacttctaacacataaagagaatagctatgaagataattattctgggtgctggtcaggttggtggaacattagctgaaaacttagttgatgaaaacaatgacattactgttgttgataccgatacagatcgtttacgccagttacaagacaaattcgatctgcgggttgtgaatgggcatggttctcatcccagagttttaagagaagccggtgcagaagatgctgatatgttagttgctgttacaaattcagatgaaaccaacatgatcgcatgccagatcgcctattctctatttaatacaccaaataaagtcgcccggatccgttcatcagaatatattagggaatcagaaaagttatttaagcccggtgatattcctatcgattatcttatatctccagagcagttagttatcgactatatctacaaattaatccaatatcccggagccttacaggttgttaacttttctgaaggccgagtcagtattgttgcagtaaaagcttattatggtggttcacttgtagggaatgcattatcttctcttcgcgaacatatgccgcatattgacagcaaagttgccgcaatatttcgacaagaccgtccaatcagaccacaaggctctaccgttattgaggctggcgacgaagtattttttgttgctgcatcacaacatatcagagcagtaatgagcgagttgcagcgtctggaaaaaccatacaaacgtatcatgattgttggcggcggaaacgtcggtgcgggtttagccttacgccttgaaaaagattatagcgttaagcttattgagcataatcaggaaagagcaactgaacttgcagagctattacacgatactatagtgttctatggtgacgcttctgatcaggagctacttgcagaagagcatattgagcaagttgatgttttcattgcattaactaacgatgatgaagctaatatcatgtcagccatgcttgcaaaacgaatgggtgccaaaaaagcaatggtacttatccaacgtagtgcatatgttgatttagttcaaggtggtgtcattgatatcgctatctcacctcaacaagccacagtatctgcattacttgggcatgttcgcaaagccgatatcgttagtgtattttcattaagacgaggtgttgctgaagctattgaagcgattgctcatggtgatgaacatacttccaaagtagttgggagaaaaataggagatataaaacttccctcaggaacaaccattggcgccattgtccgcggagaagaagtcatcatcgctaatgattacagcattattcaacaaggcgaccatgtaatcatgtttattacagataaaaaatttgttcctgaagttgaaaagctattccaaccaagcccattctttctataagtcacttacacagctaccaattcggaaatatttgtactcagaaaattagaaggccaatgataataacttgaaaaaattattatcattggcctcccaaccacttcctttcccatgttttgctttacgattataacttcctttaccttttttatttttttctattcgctgcctgaacaaaggatcatgtaaaagagcttctatagcattatctttgataacgccttttttatgcctatacgttgtcatagtgacctcgaaatatggttatttgaataaatatagcttatcaatagtactcttaatgcacaaagaataaagaaaaatcacttcttcgtagccccttcttctaatatttccaatattgaacaataagtactgatatgtgcgcttccgcaacaagcatcgcttaacatttttaaagaatcgcgcattttttgcatttctaataatttttcttctatttcctgtaatctagtatcaacaattctcttagattcttgacaggtatgatgttcaggatcaacgcggatagacaataactctacaattgtctctaatgtaaaacctaattgttttgcatagcgaataaagcgtagtcgttgtaaatcctgttttgtataaagcctataaccactttctgttctttcttcatgctccatcaatccttgtttctcataaaaacgaacagtatcaggagtaacattcgctaatttcgccaattgaccaatacgatacatggcagcctctcatcaaacagggaaataaaatcaatactaccagaatagattaataaatcatcgccggatgttctgctgtcagctagaaatcaaaaagtaatggggaagataagaagagataatggcgggaagaattaaaaggcgataaaaaaccgggtattatcccggttttttatgcttctacagattactctgcagctgctgcttctgtctgagactcagcggcgcggtcaacaagctcgatgtatgccatcggtgcattgtcacctgcacggaagccacacttcagaatacgagtgtaaccacctgcgcggctcgcaaaacgcgggcccagttcattaaacagttttgccacgatctcgttatcacgagtacgggcgaatgccagacgacgattagctacgttgtcggtcttggcaagagtaatcagcggctcaacgacgcgacgcagttctttcgctttaggcagagtcgtcttgatgatttcatgacgaaccaaagaacctgccatgttacggaacatagcttggcgatggctgctgttgcggttcaattgacgaccactcttacgatggcgcatgaccttatccttctcagtaaaaccttaacctgtgatctagttattcatcagcaatacttgctggtggccagttttccaagcgcatgcccagagaaagtccacgtgaagccagtacgtctttaatctcagtaagagattttttacccagattaggtgttttaagtaactcaacctcagtacgctgtaccagatcaccgatgtagtggatagcttctgccttaaggcagttagcagagcggacagtcaattccagatcgtcaacagggcgcagcagtatcggatcaaattcaggcttctcttctttaacttctggttgacgtacgtcacgtaaatcaacgaaagcctccagttgttcagccagaatagtagctgcacggcgaatcgcctcttcaggatcgattgtaccgttagtctccatctcgataaccagcttatccaagtcagtacgctgttctacacgagctgcttcaacattgtaggcaatacgctctactgggctatagcaagcatctactaacaaacgaccgatagggcgctcatcttcttccgaatgaattcgggcagaagccggcacataaccacgaccgcgctgaactttaatacgcatgctaatggaagcgctttcgtcagtcagatggcagattacgtgctgcggcttgacgatttcgacatcaccatcatggatgatgtcggctgcagtcacagggcccatgccagatttattcaaggtaaggatgacttcattttgccctgaactttcaccgccagcccttttag

SEQ ID NO: 78 - DNA, 14620 bp, Xenorhabdus sp.
gtaaaaaccaggagttggtatctgacgaaatagcaacgcacattgattccgggaaatatgtcaccaaactggcactggactgggaaaagcgaattcagttcatgctgtcagatgatggctcttacaagcgtataaagttcagcgaaacattacgtgaccagaatgacgatattgatcgtgaagatgtcgcccagcgatttgatgccgattttacgctgatgacgggtgagttaagtgcactgataaaaaatacgattgatgcactgggtggtgaagcagaaaggtaatatacacttcgtctttcaagctgcctctttgttggccacactcgctcaccccagtcgcatagttatctataactcaggggattactgagaggctcctgcctctcaccggaggccagcctttggctgggcaaattcgttcccgacgaatttgttactcctttgccgccgcgatgcatcttaaaatccattgtgtatagacggatctaactgattaaagtctaattaatattgggtagagcctcaatgacagcaccattgaggctcattacttcagctattatcagaaacgatatactaggccaacacccattacgttatcagtattaagcttagttgcttttgtgaaagcattatctttcagaagattaatctgatattcagcataggtacccagatttttgttgaaattataagatgcaccgacagaaatatacttcaccaaatcttcagaatttttgtttgttaacaaattattctcacccagatccttacctaaatccttacctttggagtaaacataagcaatccccgggcgcagaccaaaatcaaattgatactgagcggttaactcaatgttttcagttttgtttgcgaacatcacgcggttatccactgagctgccgaatcgggtcaggttacgagcttctccatacatagcggccagataaacgttatttttatcgtattttgctgataccagccaggcttctgctttgttcccttttgccagcaccttagctgatgcagtaccgtttttctgatctgtagtacggttagaattgccataagaagcagcaacagtaaaaccatgccccaaattataggagctggaaagaccgacaccatcaccattctgccgcgcaatatcattacgggtatttagggttccgccatcattcttagcctgatattgcagggcgaaattcaaaccgtttactaatccgaaaaagtcagtattacgatatgttaacaaccctgttgcacgacccatcatgaagttctcagtggcggccatactatctccaccaaacacagacatcatatctgtcagagcgttagcatcatagacaacaccaaagttacgcccataatccagtgtgccgtactcacccagtttaaaaccgacaaaagccagacgcgttcttgcaaattggctgctttcaacttcagttctactggcacccatattgaattcccagcgcccgtacccggaaatagaatctgtaagctgggtagttcctctaataccaatacgaccaaaggaattatcccctgcttctttgctttttgatttagcaaaataacgctgaacttcagctttgccatataaatctattttattaccatccttattataaatttcagccgcatttgcagtcccagttataaaaccagccggaattgccattgctattgccattgctattacgttgtgttttgtcattattatggtcctcacttgtattgttattttaccttttgccaccgccatgaaatacactttctaagaaacacttattcaataaagaaatttcccaaaaaattaattaggcggattaacatttagcaatctttgttactttatggttaattttgtaattagcaatagcgatactaagatccaatttaaccttttgctaacaaaatttatccaaaagtgctatcctgtgaagcaggtcacgtaatgagcagagattcaatactctaatagcatcaattatgtcaattaattattaaaaacagtaagttataaaaaatcaggccagtgatgaaaaagagacgatataaccctaaacagcatttttcactgttaagtattataggctacatgataatcacttattgtaaatattgacaactgccggagagttctgtatttcgtggaaattgggatatttctttttatttcgagggagcattccttatatttttaaatgaacaacgccaatccagtacaataaatattaacaacctataaggtgctaaaatggcagaaaaatacccgcgagcacgaggcagaccagcaattccggaatcagaaatacgccaaaaaattcatgatattactctttctctcttgctaaatcagggttataacaaaacaaccatggatgttattgcccaaaaagctaaaatcgccaaaaaaacactctaccgtttttttaaaaacagagaagaactaattgagcaagttgtattagactggcaagataattcccctccatctctaaccaaaaatgccagtacttctcatcaagtgataataatattagaaaaatatttaaaagatatttctgataagtatttgtcagaaaatgaagtggggttatttaaattattacagtctgatttccctcatcgcaatacattactggaaaagtatcaaaaaagtggtatcgaaaacagtaaagtcattttggaaaactggctaaacaatcaacatgagcgaggagtattgaataattttaattataatactttcagtgatctggctatttccatggtcatttctgagccacttaggaaaatggcattagggcagatcccgcctttaccagaaacagatgtttcaccacagattacagcaataataaaattaatatctactgagtcagataagaaataaatctttccactctaattttatttcacagcaaaagaattggcgttgaggttataataaaactcaacgcctgctttttaataattaacaaaatactcatttttcaacatcaacattatcacctgatctgatgaagatgctccgaaactgttcaaagcaagttattttatttagctgattaatcatttcatcctgactgaaaacatccaataacgcatcataacactctgcaaaacacgccctatcaattctgtttatcgcaatcaaaaaaacaacatgcacacgctcactttccccccagagaataccttttgggctgatagcgactgcaacaccggtctttatcgcatccatctttgctgaatgtggtaatgccagaataccaaacgccgttgaagacgcgctttcccgctgataaacatatctgacaaaatcgccctcagtatagccctttgcaaacatcgtttggcaaagcacatcgataagctcatccctttgctgaaaaccgggctcaaaccagaacaatccaggttcaaaaaacaggtcaaaattacgttgtagcgcccttcttttcctgttcgcattagcgatatcaattttaccaagcaactgagcacgcctatctcgcatctgaaaaggagaaatacacactgtttcatatttatgactggaaggaatattgatagttgtaatcaataactcaaattcaaaacactccagttcagaaggctgtgatattattttaatgatatttatttcatcgccaaaatcacgtaataactggtggtatattttgttttcaattcccttatagcccggacataaaagtactgtctgtactttatggcctttagttttttgtcgttcaaattcagcaccaacatgtaaagccagaaaagaaatctcatcctcattcagtttcttaccaaagaattcatttaattgtaaggagataaaaacagcgatatcaaaaatagtccgacactctttttttatcatatccaacatcgggtttctggtatgaacattgtgctgcaagcgtgttttcaaacctgaaatatgcaaacagaataatgaaataaaatcatccgttgctaaattaatcagataatgctccgctaccgattcagcgacctgtctggcaagttgatataaacccgctttatctgattcaattaatttactgtcgcctgtctgagtgatattggtatcgattttcagtaaggtgtaacaaaaatgcctctcattctctgctataggaatattaaaagtatattgcaacctgtcacacagctcttctgttattgattttattccctgattttcttctataaaggccaatttattttttaaatacttgccataacttaatcgctttagcagtatcaaaaagcgcagcacaagatttgtatatgagagttcataaacagagcaaccccgattattaaatacctgtgcaataatatcagatataatttcgacctgctgttccccgaataatattaccagttttttcaaatccagagttctgtagtctgcctgttccatgatggtatgataggctagctctcttaaatccagctcagagcctataatttcaaggcgattatttttgcataagaacctgacattaaatttttcaaaggaaccattcattttatatatcactgattttaaagttgaatcactgatatataactcagcactgagatcataaattttattacttttcctgaataacagaatagacttaatcagataacctgctctttcctgataggttttcggaaaatctctgagtttttgcttcaatttaagatttgcatcagatgataacacatatcctgaacgtccggagataatgattttactcctgtaggattcattaatttccagcacatagtttttgacggttctgattgaaacatttaagacctgagataatttaacggctaaagtcgggttattttgttccattaaataattcaataattctttctgcttaggccttagcattataacccccctattaactcaacaaccaccgactaaagtcggtgggttagtgattaacggactgaaagtccggatacgcatcgactgaacgatgcgtcaattatccagcctgaagtgatcattcgggttcggttcaaaatgatgcgccagataggcctttatcatctcttccgttaactgacctaccgtcgcacaaaaatagcctctgccccaaaaatgctgaccccagtaacgctttttcaagtgagcaaactcttcaaacaacttacttgctgtccttccctttattcgcctcatgatttctgagggcgctaagctcggaggacaactcaccagtatatgtacatggtctttgctcacgaccccttctactatcctgatttcgaacgcttcacaggtctgacgaactaactctctcacccgtaaaccaacttcacctgttagcactttgcgcctgtattttgttacccacacaaaatgatactcaatctgaaataccgtgtggctgccatatctgtaatccatattgcacctctcgtgcaacacagtatcgcagctaaagctgaccgactaaagtcggtggttttaaccttttatatggaaaaataaatatatatatgaaatcctcccggatggtgtttttaatgcattaaaagataacacaccaaaaacagaaaatggaaactacaaacatagatttcatcaaatattaacaccggaaataggaagggaacatttaaaaaaacagataacggaagttacaacattaatgaaaatatccgacaataaagaacaattcaattcccttttcaaaaaaagatataatactgatccacaatgtgaacttgaattagtatttaaagaggaaattaaatcaaaacctaaaattagcaaaaacctagaccttcctttataggtaatggtctaataagtgattgtgatcactacgtgcccacaatcacttatcccaagtgtctttatacgagtgtcgtacaagtattaaatcggaaccctaaaggggccccacgatttaatacttgacgattttaataatgatctttaggtttagcttttttaaaaatcaataaaaccatacataaggtttattatgtaccggaaatatcattccatcaggatcgctaccgtttagtaccttagatagaagcagtttcacttcccgccgttctggtctggtcatcatcagattgcgataccaagatggagatttatcaaaccattttttacaactggcaaaacgccttcctatccgacgataagacttcaatcttccattaggaagacgatcacggctctgattcttcacagacataacaatatcctctaagtaattaattacctagaaaatatcaagctgctcatatccgataatatttctcatatctatccccaatacccaatcccctatttttattcggattatagccaataaaaaacagaatgacgctatctgcgccgaaaaaacctgcctcctcgcaacgctgcgggggcggcttttccgtgctcgataacgtcagatcacttttacctgcaataacacgataatatctgtcttggtattggcttttgatttgcctgttaaaaagccttttggcaggaaactgaacgcggtttcgccctcttccaccttattttcagccagaccgcccaacacaataatttcaccgcttttgaccgaaacatcagtgacaatgtcacgcttaatcaaggtgggcgactgattaacgcccgtgtcggttttgacaaagttcgataattgctgctgtatctttaaatcaatcgcctgactttttatcgtgggctggatgtcgaaaattaccccgctggaacggtattcaatggattgtacaggccgtccatcctgatacgtcacattcgataatacaggcacatcagaaccgacactaaagtttcctttttaaccggatttcacacgcaaagtcgggctactcaccacatgaaaacgttcatcacgccgaaacaactccaccatggcatcaaggccacccgtattgatcgtaatgaagttcccataattctgtttgaatccaatattaatgcctaatttacctgacaataatttagccatgaggttaatcccactgccctctttttcgatatcctggacttcaaaaacataaccggttaccaccacttcacgcgatggcgcatcaaccgaacttaagacactttgaacccgtataatttcttcctgagtcccataaaaaactaatttatcaccgctggcaaccacatcaccctctgcctttaaaaaaccctgcaagtactcaacatcgcgatgaacaggactataaacgaaactttgcttaatcaccttcggttctggtggtttcaccttaacgagataaacgacaccgtgtttctcgtgaacgttaatattcatattctggaaataacgaacaataaactggttaaaatcctgcttatcggtagcatgaaaacttatcaaattggtatcactggccagattcggatccaacatataaggtttttgtaggacttcatcataaataagcccaatcgctttgggtaatggtacggcttccagcttaaaatccacatttttggcctgcgcagataaagcaagcaaagaaagaaaaaaacacaatccttttctcattattgtattcccccagaataataattcacgatttgcccctcaatttcgccctgtaaaagccgcccgctgtactggaactggctgcggggttcaaagcgcaaccgcccctgtttatctgccagaatcacatatgctctgccatctttaactaactcacctgtaatacgccatttgtccgatagcactacggcgggtttcacagggctgagcactgaattaacaggcagggctgttactagtgaagacgagttaacggaaacgtcttgtttctggctttcaggatttagatactgattgaaatagttataaacagaatacgccgataccagaacaaaaacgggcacggtcagaatcagtattcgaatttttttagatgaaaagatagactgacgtgcatccgttctctgctgattagggttattaccctctaccgatttatagagttcaaaaatagccttatcgtatttttcctgatagaaattcatccggttagatttagtaactttcgctccctgaaaaacatcaacccgatagcggtgacttagccccaatgcaacatgtttctgcatccgataagttgtttctatacgccctttaataaaacgcggaatatcactgacggtttggttaatcaccaccaaatcagacataacgccagtgtctttatcaacaaaatgaccgtgttcagcaataaatgaacgatgatttttaggaatatctttatcgctcccccaaacacgccaaacttcatcaatgacaactaaatccccagcacgacaaaatgttgattgattttccattgaaggtaaaaaatcatcatccagacactgaccattttcaacgtaagccagttcgcccaattcatcagcagacagttttttattttgtttcaaacaatagtcttttattttttcttcatttaatccgtaaatatttgaaacaacacgacgaccagacgcaatcgccggcacaataaccgatttcacaacttcataggactttcccgaacgcggcacacccacgtaagcagtaataggcatcctgactccctatttaaccaatgattggtaggcaacgaataataaaccgtgtcaccatagcagaaatcaccaatggcacacccaccggaaactgaaataatgtaattgcaccagtccctaaggctaatgaaacccaagaaatatcttttgcatgtcttaaagaacttaccgtagctgatttataaactgaattattagcagcaatacgcccgacatactgtgctgtattagaacgaataacgttcaacataaccgcatcattagctgccactgtagcagcacgacgagttatgacagactggaaaacacgtgtaattataggacgtgcaacaagagcaatggcaggattagcataagaatgataaatagggaaaaataaaaccaaaaaaataagattaaaaataaatattctcttttttaaagaaagcgcattcataagaattctcgccactaataactattaagtccctgtattacagcccatgcacataatacccctgtaaaaaaactcatcaattcccacataaatacctctaaaaaaggggctaaaaagcccctcttggctaaaatgcgttaatcattttccctacttttttaagtcccataacagtaacagaaacacccataattattgctgctacactaacaacacccgtaacaataggaccaacatcaatttgtttcaaaagcgcatcaagatatcctgctgattgttgcgttccatctgctgcaaaagccgtagaactcaacgcaactatagccacaacacctgcttttaaataaccactataaataatactttttattttcataatagacctataaactaatcatttttatcatgcgtcctaatccatagcctaatacataaaagactaagacaagccctaatccagcccctaagatattcatgttgaattcacctaaaagcggactgtttgaaaccatcgaagattgaaatttattcatttctgatttcggtaatttcaaaattacatcgttacaactactattatcagtgatcatatttatatgaggctgacacaatttagttgtaatttcggtatagtcatccataaaataactattcctgaaaattaatttataatttaattaaatgcttcacagtttccatcggaacataagaaacattccattgattaaactccaatcttggcggattatcgccaaatggtttacctggatacaaactagaaccagaaattaaatattttccctctggtaacggatttggctctgacaatgtgataactgtctctgacattgagcgtggccccatatgcgcaataacacgctgtgtataataaggagtaatttcgcccgtatttttattagtgcgtgttttttgttctattttcacatcagcggcagtaacttctatataaaatggaattttttctaaaacggacattgtgatactcctaatttctcatttatgagtgtttgatatattgggggcaaatctaatttcaggtttaaatcagaaatgtgatcatcacgcactatcattgatagaacggcttgagtgtccccttcaaaaaaatgaataagttttgcgatagaggaagaagcctgttttctaagccatttaactttagattcaatagcatcaacggccttgcgacctaaaagaatcggaattggtgcaggcttcgtcggattaatggaagctgcataagggcataaccctgtataagttccttgtgtattcaaaagtacctcaattggtacaccttttaattcagcctcagaacgataccaagtgccggaaactttttgctcaagggctttattataaacgcgccaataaacacgagattgccgagaacctaccgttactatttctttggtatagcaccctgttgcatctatttcatgagcattgcctaattttggctttggacccataccaccataaaaagcatcatctttataggctgataatgcatgatggcaagtgaacacaccgtcgtaatcatcagtggcgagatccaaacgttttaatgatgtgatatctaaatgtttaagccacttatagattttttccggtgttgtgccactcataacatgtgtacagccctttccgccgatctgaacgtaaaaagtgccattgttcccaccccagtagatcatgccgaaatgctcatatccaccatcttcagaataaagaatggctgaatcttgataagcaaaaccacctgcaccgcgagcaggaccaacaaataatccaaatacagcagcgataaaacgtctcaggcgtgaatgtaaacaggacaataattctcggttatagcgttcagccttacggttgatatcttcaatcgaagaagaaaacacctcacctgaatcaggtaacgcttcgtaatctctgcctaatactgattcagtaaattggctgtgttgataatgtcgataagatggcaaaaattcatatttacgccattcatgccctttttcctgaaaagtatgaacatctttcatacatgaaagcggcgcagaaaaggccagataatcgataataacgcttctatcagtcatcattttaaagattcctgatagccagtgaaattaccagaagtagtcgccgtagagacgaatactatttgattgccgtaaagagaggtgcattcatacatcaattcatcaacagacgggtaaaaatcccattcatcggcaacaagagcattgatgccaaaacctgcgatgtaatcgaaatagatgatcttcatagcccctctcttgtaaccaagagagagcgaaagttaggggttataactgtatgatcggcgtgggattcgcataatccacgttatgtctaaattgccgggctgccatgcgatattttggcagcccgcaattcaacataacgcggttcgagattatgcgaatctctatcgctagacggaaaatcagacgatcttgacttagcctgcaaccattcgactcataattaaatccagcataaacaatgcgtaccaaaaatccagcaacctcgttatcaattccgattttacaaatcggaatttacgtttagctactattgaagcaatacgagaatatctggaagaaaaattcagtagcctgttatgacttctgatggatattattttttagcgcgctaaaaaatattgctggtatatcatttggataaatagtttccactgaattggtaagctggtcaattccccaccaatgatggtgcttaataactgatttttcattttcagtccattcaatggtattgatatcttctttatcaaacttgatgatataaaaatgttcttttgctaaaacagcctctccactagggagaatcatttcaaatgttctttgagcaacacattgtccaacattatcttttcggatacctgtttcttcacgaagttctctaatagcggcttgttcaaaagactctccttttttaacacctcctccgggcgtggcccaatatgaccgaccggctaatgcaccctcattatgtacaaaattaaataataacacccgattagacgggctaatgatcagcaaacgcgctgaacaacgaatacgcatataatatttccttttagctatgacaggttgatctatgaaccggaaacgcgccttacacgcacacggtatgcgctggatatttactttaagatagagatcttattcaattaatttatcttagcttataattttgtacaattagaaataaatatgttgaacgtaaatttcattattgaattctcaaaaaatttagatgccgatgaaaataattaattggtatagccagattacccacatctcgaaaaatctttgccctattccatccaaacactcttaactaaatagtgttatttttataggctaatttttctcattaccaatcttttaatatgctagattgtctattattgattacaataatacttgaaattattatagggttaatataatctaatcgagctaatgatttaatttagcttaattttcataggaactaaaaaagacaaggtgttattaaaaattatggaaaaattaattaaaattgtattagtagggactgtattggcaacactgactgcatgtactggtcgtgtggaaaataaaaaaaataattgtagctatgactacttgcttcatccggcagtatctatctccaagatcattggcggttgtggcccagcagcagatcaataaaattacgagtaataataataaggtcggattttccggccttattttctcccattctacgcacgaactgtggcgtatttgaatcaaatatttttcgatcaggcctgtgtagctcatagaattgcctcataagacatacccttctcaacagtcagtagacaaccccaacctccccttcatttattacgtcttttcaatccctaactttttatctaatcaacgcatagttgcaaaaatatcagaaaatacattaatgtctgacatccgcttttataggaaaagatatttcacttaacaaagaaaaatatcatgatcgggcagtaaaaatttacagctagtctgattcaattttattacgcaattgaacaaataacgggcaataatacggggaggtttaaaaaatccatgacaaattcagctaaaaaagactactactacaaccctaaagaattccgaggccgaaaaaaatggcatgacagccaacataaacaaaaaggagaatgcaaatacaagataatgtggtttttagcgggtattctggtgggaattatcattgcaatcctgttagctattaaagagcctgatatgataaatgcgatacttaaataggttcatcactggttattgctcaaataattatgtcatttgtttataaattggtggcatcctatttcagttcatcaattgaatataatgccttactccatatatgcagattgagcattaattatgattaatggccggactttaacgaaaaatgtccaatatttagcccggccaaactatttacagcagtgctttatcgagcttattttccagcacttttagtggcgaattttctggcgaagccattttagatattggcaatagataagtctgctccagcataaattgccctgacatcgcggcatggggagtttgatctgagtagcaaatccatgtactaccagcaggaaattgaacttctaactgagcaccctgctgctgatattgctggttggctttcatcgcatcatgtagcccgagcatcagatgatcataatgggtacgccggcttttggttatccccagtttgtgctgtaaccagctattaatacgggaataactacgggtagcaggaaggaattgatcggctatctgagggaatttatcaccaactcgccataccctaggttcgccagctgggttaatgttagtaaatatgcgaagaatacgctggccctgaatcggtctggaaggaaatgcatctacatgtaaccgactatcgtctttacgccaggagttacctgttttccatgcggttaccggatgaacccgcagcgaattgactggtgtatgcagtacttttgtatatattggcagcagatgctcaatcaattgctgacagtgttcataataacgttgcatcagcacatgcaccagctgttcatcggaccgtaacgcaactcctgctattttatgttcatccgggcggtaactgatgttcttacgccctgctttgaccgcgtcttctctgagcaactgctgttcttctgacatcaaagagaaactcagttctggcagatagagaaccttacccagttccaaagaaatcagtgcattctgctgtactgaatgaggtacgttttccgaccaactgtgcaatggcagcgtttcaatcacttcatcaaattcaagctgcttttcagccatcatatactccactttgtaaaatttttcggaatgataaagcctttttattcaaccaaatcctcgatgaattgaatgttttacagtttagtctttagagcac

SEQ ID NO: 79 - DNA, 12269 bp, Xenorhabdus sp.
tagatcccaggctttttgtaaaatcgctatatcaatattttcttctaaaaatgtataccagctaaggctatgtataggactattttcataaagtgcctgctcgtaaaacacatcttcttgagaagggtgaagaggataaaaacccgaattcaaagaacccttaaatgctctcataataaattatacgaatgtattccgtttacaagttatttgtaattgattccgtaatatttcagactgtcatttacgacttagtgggtataattcatcatggtatcattacagataatctcgcaatctttcaacatccttcctcatgaaaaatagttaatgtttatcagtgaatgattctgtttttatttattactgcatgatcataactcatgattgtgaagtttttctggtcattttagctacgggatatgttattttttatctggtataactatttttatgctggatatattggatgaggctggtacttttcgtttcgtcaataatgactaaattgatttacatcaagttatcatctttgtttttttaacgtgttggttgtttattttctggaaacagaagcggctgattttagtgcagcattatagaggtttttgctgattgaagattaaatagatgagaaatgtttgtaaggaagtctgtgatttctgttttagtgagccttacgaacacaacggttaagcctgtcattcgggataaaagagcaggcgattaccagaaaaatcaatattagctctttatatacaatggatttcaagatgcatcgcggtggcagaggtgagcgagtgcagataataaaaaagtaacctgaaagacgaagtgtataacatgccatattttgttagaatttgtgacgtgaaatagggattgctgtagtgaattaacaacaataggttaattgaatggaaagtatgtaccagaaatttaatgttctgaatagaattgacaaaatattaatggcacataagcccaataatagtacaggtgttaaacggtttattttagagtttcttttctttggtttgattaatgcccgttcgtgtttatttgccggtttcttttttttagctttatttttagtgccggcaaaaggtatcttggatataccgcgttatgatgtgctgttggtctttgcagtagcctttcaggctctgttaatacgatttaagcttgaaacatgggatgaatttaaagcgatatgtgtattccatttagttggttttatcatggagttatttaaaacatcagcttctatcagttcatggcaataccctgatgccgcgttcacgaaactttggggagtcccgttgtttacaggttttatgtatgccgctgtcgggagctttattatacagtcatggcgcttctttaaagtgcgcattgagcattatccaccgtactggatggcaacattggtagcgctggctatttatatcaatttctttagccatcattatattgatgattatcgctggtacctgacggcttttatttttgggttgtatgcccgtggcactattttttatacgccattggataaagaacgaaaaatgccgctattattatcgtttatattaattggtttttttatctggttagcggaaaacttcggaaccttttttggggtttggcaatatcctaatcagttaggcgcttggtctgttgttcatgcagggaaatggggagcatggtcattattggtcgttgtgacctttacgattgttgtccaccttaaacatatcaaatcaagtgtggcaattgcccgctagggtagctttgtcaagtggtggggttcaggaggacacccctccattggccgttcaggataagatatatacacaatggatttcaagatgcgtcacggcggtaagggagtgacaaattcgttgggaacgaatttgcccagccaaaggctgcctccggtgaaaggcaggagcctttcattaatcccctggagcatagataactatgtgactggggtgagcgagtgcagccaacaaagaggcaacttgaaagacgaagtgtataattattaatatatttaatttaatctctattgcattggatttgagtggtaaaatctatttattttaatacattattaagtatttaatatatttatataaatatgaataaagtaatttatctttttttgttgtttatttttgtgtttttatattttcaactatacttttaatttaaacaaattaattttccattaaaaataatattgggttaatgaccttaaattacatttaataaaaaacaaaaaattgaatgaagacacttattaaaaatcattttgaatagcatcaaatatcttaaataaaagatgctattacctgactaacacacaatagagagaaagttcaatgtcccttacatatgaattccttgtccaatggataccctcaaccggtgactggaatctttaccagtttattgactctgatactgctgagcttcatttagttaagtcaggcaattggcagacagtgaaatcagggcatcaacttattcccattggtaactatgttatcgacaggaaaatcgcatccagccagttccgtttgtggcaagtcgatatcgctcaggcggattttctgccgtctctgatggcacaaggagacctgagtgctgagctggatccttcgacagaaattattcctttaggtaattatttgctgttatacaaaccagacaccggtgcctatcaatgtcggcgtttcgatccattcagcagtacattgatgcttactgctgatagtccacaaaatattaccggacactggcaaacaatcacgaatgcggatttaatacctgttgcaggttatgtcgtcagccgggatagaagtaatggtcagtgccggacgtggatgtttgacggtggaagtgcctctgatattctgcctgaaccacaaattcccggtatgcagtggacaattgacccgagcacgaaactttgcacgctgggtgacagaattgtcggctgggatcctgattctcgcgatattactctttggcctgttgatccaacgctggcacatccgggtttaccttcaaaaacgatcaccgcttggaagaatgtattacctgccgacaccgtactattcggtataacaccgcttgttccattagaattgccaacaggagtacagggcggagaggatggcccgggaacaattccctggatgcggcaaaggatcaaaaaagtggtatatctgatgctggagaatcgctccttagaccatatgttcggtgatctttataccgtggataaagtcgggaaatttattgggcctgataagccttttgatggagccagtaatacgaactggaatgcggataaaaatggtcaccgctactatcaaaccaaattctccgtacacagtgtggactacccaagaagtgatcccgatcatacatattcaggtattattcaacaattatttgatggagctgagcccggtgctgggcgtattccagaaatgaaaggtttcgtcaagagctatagcttcagtggaaaatcgcctaatgaggtcatggattattacgatcctagtatgctggaaccactgagtctgttggcgaagcaatatgcggtttccgatacctggttctgctccttgcctggccctattgacccgaatcgggctttttcgctaacaggatcatctttctgcaaaacggagaattttgattccggagaaatctatatttcgtggcctaagtctcctcgtcgtccctcagtttgggatgtgttatgggctcacggtatcaaggactggaaactttattaccacgctacgtggggaaaactgcaatataccaaccaattgtttttaaagggacatattgacgaagttgatcagaaaactaaccattacaacacggatatcagcgaattcatatcatcagccaaagcaggcacattgccagcgttcagttttattgaacctgcatgggttggaaattcatcaggcatgggtcctaactcttgtcatcctccttcagatatggctcccggattaaaaatggtggcggacatctacaatgctttacgtcaggggcctgacttcgatcagacactgctgataatcactttcgatgagcacggtggcatctatgatcatgttccgcctccttataccaacaatgcttatcgtaatgatactgagggaggttttggctttgatttgcttgggatacgtgtcccgacggtgctcatttcaccctggatagagaattcgacggtctttcgttcagtgcaagaaggacgccaatatgatgccacatcatttctttcaaccttgttgcaatggcagggaataccggcatcgaattggtggttaggtgatcgcatacgggcagctgcgagttttgaatcggtatttcaggctgagcatctccgtaaagacataccactcagtgtacaggctcctgagcttgatcctaaacagcttgacatgcccatgaatgagttgcatcagctctttattactcgcattgtgtacacactttgtacaggtgttttatcccctgaagaaatagagcgggaagtacaggatatctgtgcccttggaagtatccggctggcaacacaggctttggataagctggagatccgccttaatgctgtttactcaaaaagttgagataaattatcatcggcgtcagatagttacctgacgccgatttgttgctattaaatattgggtatatataatgggaaaaagttcatattgataatattaagataatttgaaaaaataaatctatctatacacatgaaaataatgagagctatgtatagtttttggtaattagatgatattttttaattcagacatattttttattttccagtcggcaacatcccagtatgagtgattgtactcaatgttatttggtatcacgacgcatttcatagaggctgctttaactgcaatcataccggtttttgaatcttctattcctatacattttgtaggtgaaacattcaatttttccgcagcattgagatagaccatagagtggggtttattatatggcatatcgtctgctgaggagatatagtcaaaatatttagcgatatcacattgttcgactatatttaacaggagggataacggagaagcagaggcaataccaatcttaatattttttgcgctaatcgttccaagcattccactacaccatccataattggtttttctgtaagaattaattcaatccctttattgaaaaactcttttacaatttcagatttatttttccatataaaaggttaaaaccaccgactttagtcggtcagctttagctgcgatactgtgttgcacgagaggtgcaatatggattacagatatggcagccacacggtatttcagattgagtatcattttgtgtgggtaacaaaatacaggcgcaaagtgctaacaggtgaagttggtttacgggtgagagagttagttcgtcagacctgtgaagcgttcgaaatcaggatagtagaaggggtcgtgagcaaagaccatgtacatatactggtgagttgtcctccgagcttagcgccctcagaaatcatgaggcgaataaagggaaggacagcaagtaagttgtttgaagagtttgctcacttgaaaaagcgttactggggtcagcatttttggggcagaggctatttttgtgcgacggtaggtcagttaacggaagagatgataaaggcctatctggcgcatcattttgaaccgaacccgaatgatcacttcaggctggataattgacgcatcgtttagccgatgcgtatccggactttcagtccgttaatcactaacccaccgactttagtcggtggttgttgagttgcgttaaatctctgatgcgggtgtagctcaatggtagagcagaggcttcccaagcctacgacgagggttcgattcccttcatccgctccacataaacatctcccttagtcaattaaagtccattaatcccattaaaatcaaagaatagttaaaaatcatactctattatcgtctactgttatctattgaaatgtaccccaattagggggtatatatgggggtatgttttttacttcctaaaaaagtacccccacagttgcgaggatgctagacatatgaaactaacggcccggcagattgacacagcaaaacctcgagataaagattttaaactatcggatggtggaggcttgtatctactaataaaggttaatggatctaaatattggagactaaaataccgtattgcaggaaaagaaaagctacttgctattggtacttctccacttatttctttggctgaagccagaaagaaacgagatgaagctaagaaactgatagctgagggcattgatcccaatcaagataaaaaacaaaaaaaacttgcagctcagggagagctcaataacaccttcgaaaaaataactcgtgaatggtacaaaaaacgtgtagacaggtggtcagcatcatatgcgaatgaaatgatggaaacatttgaaaaagatgtttttccctacataggtaacagacctatcgctgaaattaagccaatggaactaatggctgtcttatctctattaaatgataggggggcgactgagaaactaaaaaaagtacgtcagcgttgtggtgaagtttggcgatacgcaatagtcacaggaagagccgaatataacccagcacctgatttagtatcagcttttgttccacataaaaaagaacattatccatttttacttgttgatgaattaccacagttctacaaagtattaaatacttatacaggtagtttcattataaagatgggaatgcgattacaaattatcacaggtgttcgtcccggtgaattgcgcaaagctgaatggtcagagattgattttcataaagctcaatggaaaatatctgccgaaagaatgaaaatacgtcgtcctcatattgtcccattatcaactcaggcgattgatattttatcgcagataaaaccaattacagggcaaggaacatatgtttttccgggcagaataaaataatcccagccaatgagtgaaatggcattaaatgtattaatcaggcgtattggttatatggggcgggcaacagggcacggtttccgtcataccatgagcacaattttacacgaacaaggatacccgtctgagtggattgaaacacaacttgctcatgttgataagaacagcattcgaggcacatataaccatgctcaatatctggatggtcgcagggagatgcttcaatggtacgccgactatatggaagcattagaacgaggtgaaaatgtgatacatggcaaatttggtaaacgtgcgtaactggataaatagacaggataaatcgactttagtagactatccaagatgttaaagaataaagctatgcctaggctgatcaccgaaaacccgtacacctctacggactggcatagctcctatatatagaggatgtgaggtggcttaatgctggtatttcaaggaaacccgattaattttgtgagtgtaaaaagttttatcaagacagttgaaagaaatttattgggggctgatatacgcgaagctgttagatggattaaaaaatatttttaccctgatggatacgataggtttcgtgcccgctataaacctaattcagtaaatctcgtaatgatagaaggaaatgaaataattgaatcggctcaggaaggaatgacaaaccacttattatctatggctgttgactatcctatattgtttaacgaggattgttacgatcgttttggatttataaaagaagaattagatttatttttccatataaaaggttaaaaccaccgactttagtcggtcagctttagctgcgatactgtgttgcacgagaggtgcaatatggattacagatatggcagccacacggtatttcagattgagtatcattttgtgtgggtaacaaaatacaggcgcaaagtgctaacaggtgaagttggtttacgggtgagagagttagttcgtcagacctgtgaagcgttcgaaatcaggatagtagaaggggtcgtgagcaaagaccatgtacatatactggtgagttgtcctccgagcttagcgccctcagaaatcatgaggcgaataaagggaaggacagcaagtaagttgtttgaagagtttgctcacttgaaaaagcgttactggggtcagcatttttggggcagaggctatctttgtgcgacggtaggtcagttaacggaagagatgataaaggcctatctggcgcatcattttgaaccgaacccgaatgatcacttcaggctggataattgacgcatcgtttagccgatgcgtatccggactttcagtccgttaatcactaacccaccgactttagtcggtggttgttgagtccgttaccatttcactaaattttaaaatctatagaatacaattaggtatattatttgataactaatacagtatagacaataattatctatttaagaaataattggttttagtatatctccaaactgaactccattctcacttataaataaggttgtttgatattcacaaccatttttaacatgtgttggacattcaaataattgtactgcttgcatccagtgggaatgattgttattaggcgagtttgtcaaatatatatcattcgttagatgtaattcaaaccaaaataaaactccgtgaacaagtgtgtttgtgtttgcagtgaaagataagtttccttctttttcaaaagaattgcctgatttgaatgttgagttataaaatttaacaatattacttgctattttatgtggccatgtttgcagtctgacagggaagtatcccattgttcttaatgtgttaaattcgctgatgtctagattatatatttcattataaatgtagtttaatttagctatatcttgacttgctagaagacaagccttaaggcttactgcacatggtattattattgcattttcctttaataaatatctctgtgcatgtaatagagcgtggccaaaaccttctccaaaaaaaccacaatctacagtttcagagaccaaaatatcaatgttttctggtaaatcaacacctgaaatcaaattagttgataatttgttaattacagtaatatgcttttggaatccattaactttgatgatttttttttgctttttctgacagtaatgagtttacttcacacgtataaacatgtttagcaccgttacgagctgcgaacattgctagtaatcccgaacctgtgcctatgtcaagaacagttttacctgagaaatctatggattcaaatgcatcgaaaaatgctctattacgttgagtatcgttaagcatagcaaagtgccagtgtggtatgttttttatttcatctaaatctttattgttttttattctatatatatcttgcttttttgttaagttttctttttctttaatcatattactcaccaaatatctaatggttattgttgtaaatttttattattttctctaattcatttataaatataatgacttttttttcattttttatgtaagggatgtctaaagacggaatggtgcactttttagttttattaccatgccaaggacaaactataaatccattatgttctaaaccgtgggtaagggggcctcctctatgtttacatgtcatatcaaaaaaactcaattctccttctttatttctcaaaacttgaatatatttactagttgtctttaagacaaaggagtcatatggcatctcaaacagtataatttgcatattgacggtaatctccaatagaaagtattctgtacttgcaatattcagaaagtactagtgcaccatgaagtctattctttgcaatgacaacgcattgaccagattccaagtcgctaaaacaatctgggccatggcagaatcgtaaaagtccttcatcgacaatacaaaattcatcaccatcatgtacatgtggtactgataattctcctttgggttcatttagatatgcgattggtatattatcaatattagctaatactttatcttttatatctattgctaacttacagtattgatgccgtttctccatccaatctatttgggctaataaatcgttttccataattttttgaagtatgcaggacatttcaatacccttaataaattctgggtaaatactagggccaaatttatctaccaatgcgaaaagtatttcgtttagtgtcatatttccatgataaccatctatatgaacatgttcagaataatatctagtatcaatattttcgaaacagagatctaatagtttctttacttttccacagtaagggccaaatgaattttcggcataagtgatagctccaacatattcgaaaaatcgttctggatttctagtaaccatatggaaataattattatttaataatgatgatgttaagtaaaagttccaatatgcatgggagttatggtgcatgcctgctgattttaatgtgtctttaaataggatactgtgttttactgaatgttttccatatccaaattcgtctagtaaaactcgaaatacagcagattgcgtttcaccataatcgcctttagaatatcttgccatgtgtgaggattctggcaagaaatcaatagcatgttgcataagcaaaaagcgggccattattttgggattagaggattttttaattgattctaatgatatgatttcggaattggaactatcctccagtttagtagaaaagtactcattaaatgattttttattccatgttcctccaatttttactccagattgtaatttatgaaatacttttctttctaatatcggaataagggtataagccaaggacctcaacttttcattatatgcattacatatatcatcaagtatattttcggatgattctggcaaatagagaaaatcttgttcatatagagctgtaagagctctatttaaagtaagcgaagaataatcaaataaattatcttgcgaaatatcgttaaactcagtataaggaaatgactgaggccttatagacctcttccatacatctctctcttcggtccaaaattcactatcccgaaatatttcaaaatttatcaactgagacagtttatctaaaaaattattagtgcatattatttctttcatattggataccatctctttttgtgaaaaaaaacactaattattatgtgagtaatacgaccctaaaggtagtgacaaataaattattaaaaactccgtttcttgcttttttgtttttatatatgacagagaattttagaggattaataaatgaatattagtttcattgtttattgttaactttgattatttaaattgtaattagttagttggcattatttggcgggagtttattgggtgtgattaataaaaaacaaaattaatatctataatctatgtgtatatgaacaaagataggtaaataataccttgtttaaatgtgattattagtttattttggcaaatataaattttgttgaatatattaaactaaaaacattgcctgttaatttgatttgttaataatcacttttgtaactatttaaatcttgaatggaaactttccattttaaatattttgccttcatacatacactgcatggacggaatccagctgcaattgcagtttcttcattaggaaagaatactcgattcttgatatagtagccttttgcgataactcgcagggctactggacagctcaaacgaccatatatcttatttttacgatgccctccatattggccaggggttgggcttttatatgcttgaccattcttatctaataaagggaacctctaaaaactctcaatacaaaaaataagatcaattttgaactcaccaataactgaccttattgtgtatgactttttcttgcttgttcaggggaaaaaaacaaacgcatcactttttcatcacatctcgaaattaaaaagcatgaatacccgattttccgaaataaaccaaacgttgcaaatcatagcaggttgccttcatcgtcatcgcaaaattggctcgcagctggcctatcgtccgaataattttttcacccatctgagagagtgagccaaagatatgttctacgcgtgcccgagttttcgctattttcttatttcggcctttttggcagtgtgataagggcttattacgtgccgcttttctctgaatatgcacacgatagccctgctccttcagcacacgttcacgct

SEQ ID NO: 80 - DNA, 11928 bp, Xenorhabdus sp.
ctaaagaaagcaagagaagaaaaaactccctaagacagccccaagcgtttattgggcctatattaatttgggcaaactggcgggctggtatgactctaaacgaaatggccgagtaggatgggaaaggctgtgggaaggatggttcatgttacaaaccatccttgacggttatttactgtccaagtctcttgacctatgaaatatgatcaagagacagatctcagtcggggcaatggcgattcaccatattacggatgaaatggtcgctgattctccgttaattgaggatgttattgataaatacaaaggggctgactttctggttgcacataatgccgctttcgattcacgcatgatgccggagatggatgtaccgtttatctgtacattgaaattagccaagcgtttgtggccagacatggaaagtcacagcaaccaatatctccgatatgcactaaaactggatgtttttgtaccggatggattacatgcacacagggcactgtatgactgcatagtcaccgccgcactatttaagcgtatcaaggatgaatctggttggtctgatgaagagatgctggagattagtcaccagccctcattgctgcacaagttcagatttggcaagcacaaaggcatgacatttgaagaggttaagaaaactaacccccagctattttgcgtggctattaaagcagcctgatattgaatttatcctcaattattggttatcgaggtagttatgagtgcagtctacaaagctatcagcaatgttgccaaagaactggctgaaacagggattaaaaaaaacagcgagaataaagttcaaaagttcatgttcagggggattgatgctgtttataacgcactagccccggcactagtcaaacatggattacttatcttgccacgcataactgaacgggccgtaacagagagggccacaaaaacaggaggtgcactgttttatgtcgtcgtcaaagctgaatttgactttatcgccacagaagatggcagcaagcatactgtgaccacgtttggtgaagcgatggatagccatgtgaataacctcttataataacaaaaaggccgcgcaaggcgacctgattaggatgtacaacgaaagagtagtcggatgacataccggttctcttgggtaggaatgggggtagtcaggccgccgagattaaagacgccattcagacacgcatcatcagggtgggccgcgacataattcagaatgtcctgcgcgcgctggataaccggctgaggattattctgcccactgaccagaatgacctgcacatggtcatccgcccctaaatcatccagccgacctgtgccgcccgcgggttggaacaccatatattgggcctgaccaccatcccctttctgctcaatccaattgagcatctggattttaaaaccatcagtgagttcagcctttgccagataatggcggaagtgttcaaagaccatcagagtttcagctcctgcgcaaccgcgttatcgatttcccgccgcatctcatcaaagccggatttcagaaaggctttcttcgccgtagcccggcgaaaatcctgcctcacattggggtcatggacatagacggcatagtttgccgaataacccacgcgtcccgtgagccgtacgccatcaaagcgcacatcacggaactgggagttaatcagcgtggcagtatcaatcggggtatagagggccgcctgtgtactgccgatatacagcgccttatacacagcgcgaaccaccttgcgcccccggatatcatcaattaaggcattgaggcgggactgggcttcacggatccccgtgactttgacgcccatatcaaacgcctgtcactaagatatagtcatcggcaaggcactcgaaggtgcccgaagtaacggcgtaccggagaagatatcgccatcttccgccccttcacacaggataatgacgcgggagggatggatcgccagttgcttggcgggcccctgaacatcaacctgaccgaccggacgttcatcaaagttaaacatcgtcggctgtccgtaattctctgagttgatatgcaaagaaaagtggcatggataaatccagagaacgccaaagccgggaaagcgataggtgtagctctgaatgataccgcatgccgggtgttacgggatcagataggcaagcactcaaggtgggtctttgtgcatactaaagccaagcaccgaccagacggaacattaaccccagcagtgagaaaaatgagggttgatgataatagtgcctggaatatcggccttaaaaaagcaggaatagaagacttccgttttcacgacctacgccacacatgggcaagctggttgatacaatcaggggttccactttcagcacttcaagaaatgggggggtgggaatctatcgaaatggttagaagatatgcacatttagcacccaaccatttaagtgaacatgcttgcaaaattgatgtgctttttgaagataacgacacaaatacgacacaagggaaaaatcaagcgggtctgagattggcgtaacatattgatttcccctacaggattcgaacctgtgacctacggcttagaagaaagtagaccactaaatatcatattgaaatataaagatttatccttgctcgcatcccgttttgtgtcattcatctcctttcaatatctttggctgtcgttcatgtgtcgttagcagagacacaaaaacgacacagatagcagctagacttccaagcatgcaatctgtaatttcctttcaatgcctgtcaaaaatatgctctatcacaccctgctacacttccattaccaaataccaactcagaacttatagccatgttagataataagaacaattttcttctatggttgttgatatgttaccgttgctatctgctgctgtggaaataattattcctcctgcattatcgtccactatcctacacttatatgaaccgttaaatttaaacagaaaaacatcaacatacgctactttattaaagttaattgctgtaattctgtaggtgtttgtagggtttttactgttttcggaggtgttatttatattctgaatcgtgaaattaactaattgcgtatttgttgttgaaccactgtcgattactgtacctgactttttaaatagagctttctgttttactgttttaatatctatatttgtagaaccactatcgtttttgatatactttatattatcaatctctaatttaattatgttgtctgttacatagatattattgacttgcacatcatcaagatacaagcaatctattaaagacacacacacctttaaatcattattaagtttacttgactctacggcgtgtatattatccaaagtcaactttgttataactcccttatcgcctatcttattattaacggatattaagttaacaacttgctctccttttatatttctaaaagtgagattatgtatagacccgtagtcgcctacatggttcaatgctccgttttctattttaactagcgctgctctgttatcataaatagatggcgttatctttctccagtaccccaatagcggatctatcatgtatgggcaatcgtactgacctgaattatttcctatcacatcatcaaataccaccattaccctaacatgtttgaagcccaaccctcccaaccagggcgcgagcacactatttttactgctttttaaagattaataattttcaatatgtcatttttgtggttttatatcgggtaataattgatctaaatcatggttctttagacatttatagttaacaaaagagttaaaaaataatattgacattttaagtacaaatattaatcaaagtatgctcgcgccctgcctcccaacctattgttgtcagcttttatcctattaaatgttagatattctacaggtgaatctattttatcatgagcgtcaacgtataaaccatacccattatttgcgtaaagatttaggccgctaggtgacgatatttcaaaaccagtcctaaataatattccatgacttccacatccaactacagaaatgttactaagctcagatctaactccttcgtatccttcaggaaaacctgaatcaatgcctatttgattctttgcgcgatgatttccaagaacaccgataccgctgagcttaaactcttcatcgtatttttttacaaggatagaaatgtctttatctgagcatactaaacatcctgtcgcaattgaagacatatcaaaccatgttttatttaatccttcgtcatagttataaaagtacgtccaattggctgatttacttccatcaatgaagtttgttttatcttctctacgtccgtaatatggatcggcaaatcctgcctttcctgattctgatatgatatttaaattgccaactttacacgatttagttacatagataggagcatctggcaataccattgcgtaaccgtattgcttgcaaaacagatagcatagctcccatgcttcactacaatctgtagcattaattcctttctcaactaaatctgcttttgccccaaaattacgaatatcattcactggatacccgttgagcccagttagcctgaacattttccttttcagtaacaacgtgttcgacatccagatggtaggcataatatttaccatccaataaaagcacgtcaaatttggattttactaccgaacctttcctaaaattacctgctcgtttaaaaattcctaaactgtaaccactgtaaactgaaccgctgaacgatgatccgactaacttatctataccgttatctttcaatttttcattgaactgctcaggatcgtacttcagtacattaggataatagaactgctgcaccccataagaatcatacaccgctattgagtggccttgctcggtaacgaatttagcaatctgcccgttataaacaaggtatccggccggattgatactcagtggttgcggtacagaaatatacgttccatcctcaagctcaagataaacctgaatctggttcccagatatagccggatcggtatctattttgcctatgtaaatattgccattaggatacgcattgaatgaatggcctatagtgagtaatttagataaatctaaaatagtattttttaattctggcatatatatcactccaaataaaatagcgacattcctacatattgactcttggtttttgcaggaaattcaatattattgataaatagaaattattaattactaaaaacccatgtgaaaaatataattgatatcttaatcaacctaaatcacaatccttaacccgtaataaaactaatcgaataaaattattttttaattaattgtagttgtgtaattttctatacattcatttttatcaatggccatataaattttattaattccccgcctgtcattttatgtcattctgccaacaaaacatgctccctatcaaatagtaatcaagctgtattctcctgtattgatgaacccttttattgatgttcaccggcggagaagtctcccaccgccttcatattatttagcaatgtgtattgttgattagatgagggaatgaatatgcaagataaaaaatctgatgtacctgtctcagacgagagtaatctcgtgatcgttgcaacaccggaatatgtcaaaggatctattgcagaacatgctgctagtcgtaatcacccagatgccacactgcaagataaaggatttgttgtcctgagtaatgatgtcggtagtgatagcgagacaatgtctgcaacaccaaaagcggtgaaagcagcatatgatttggctagtattgctaatcagaatgctaatattcgcttgtctaaggagcagaatggagcggatattccagataaagcggaatttgtaaataatatcggtctacgaaatacagtcaatcaagcgctgaatgcggtacctaacagccgttcaataaatggaaagtctctggcgaccgacatccatttgatggcaaaagatgttacagccgtcagtgctaatgctctgggggtcgtgaattccagtgctccctttcaacactttttatcaacagggttcgctgttgttaatattccacaggctgacaaggttcctgattttcccataggtctgtatagctttggtatattggaagtgcaaggtgattattccgttgttacacagcgttatacatcacatatcggggaaattgcaatacgccagtcatgggatgaaggtcgcagctggcatggttggtacaccattaggggaacagccaatacatatgctactagcagcagcgttaccaaaaaaaaattacctacaattttaatttactcagatggtacatctactactagtgataaatttgaaggtgttactactgagcgtatttctaaaggagtttatcttattaaaggaacctctggatttaatactgatggcatacaaagcgacacagatagcgatattgaaataccattatctaaaaacaaattaccgctaatttggatcgatcataacattctacccgatggttccataaaattaatgacctaccaccgtgaacactcagatgccccagctttcgccagaaatatacgtgaaggctactctgacggtgatttaatcgatattcccgatggtagatttgtttctgttcaggtgcaaatgcctgacactaaataatcacaatcttaattcttctgtcgctttcaaaatataatttggaggtaatactatgtatgattggtctggaactgtttctggaaaacttcaacagggtcaacctactggattaatactccacaaaggggatgtaatctctgtgactgcttcgggatgggttcagtattctcttgataatatacccaatccttggtctgcccctcaaggcgtacctcctcatcctcccggagggggattaatcgcaaagattggcgataacacctatgaaattggcaatggagtactccacaggacagttcccacagagggtgagttaaccctgatatttttagatacctattatgaagataattccggtagctttgacgtcaacgttaaaataaccccaattctgtttaagctgtcactggaatatcttcttcttctgagtagaaaactttcagtgatggtttcttctttttatgacaataagcaattaaccccgttaaaacagtcaacagaaacccttttatacttcgatgacgagaatgttctatttgacagatatttttcaattgcccattaaccgtctcgataataaaacgccttgataacatcatcttatcccaatcttccagcacactcgctttaatattactccgctttttcgtgatgaaagtgacaccgttttgtgctaaatcgtttgccagttcctgactaagataacctttgtcgccatacaaggaaccgattaattcttttgctaattcccgaaccactttcctgtcatccgtatttccagccgtgattttgagggccagaatttcgccaagatggttaataatcaggtgtaatttgaaaccgtaaaaccaccccattgaggtttttcctcgctgtgctgtcccttcaaataccttatggcggggaatacggatattatggcacacgctcaaacgcgtggagtcaataaaggcgatccccgtaggttgagtcagatagctgcacagaggcactaaaacggaaggcgcgacactgataaaacgagtataactgagcaaggtgggaaaatcgtgatgatgatatcgccaaatatgctccagataaaaatttttaaaatcacgataatgcgacagatgaaagaggatcaggatggtcatgatttcactgggatacatgtgaccttttctacgacgtaggcgatatcccttattgagacaaaactgttcccattgtggaatgaaaaaacgacaaaagtcatcgacatcgatgaaaatttcaactaagttgttcatagcctgttcctccccggagctgtttcgacttgcaccaaaacacggctccttgaacaggcttctcgtcaatttcttatccagaattggggttaataaagttttttaaatgatccggtcgcttgtcaggatcaccttcgggtagcgacacgcacactcccgtagcctgtaagggagtacacggcagtgtggtacatctgcgcccctttggaagcagatatcatcggtatagatgatgaaggttttttttcaactcatcgctgaccctcaggtcagtcacccggacggggaatgtcttcccgtcgggcagagattctccgtcttttttatctacaggagaatttcatgtccaacaacgaactgattcaggtggacagtctgtcactgtctgcggtatttccgagttcaactccgctggagcggctggtactgagctttttgctggctaatacggcgttcaaactaggtgggaattaccagccggattactggacaatccagtcaatagatgaccggctggcctatatggtgccgacagcgaagaaaatgtattcggttttcctgccggaaaccgcattcagcgtcacgctctcagcggaggcgtttggtctggcggtgacgtcggtactgttaacccgtatcgctgtgctggatgaatccggtgcgactgctttccgcttcagtgccctgcgggaatatgcgcaacaccatccggaagccgggcttatcaactcagcattttcgctgaagtttgaggaagacattgtctgtccgtcatttatacatacccaacataataacaatccacaataacgttatcagccgatgaggttattaatccttttctttagcgcctgaccggggagccgacaacaccttcctgttaccgggcgggtgttgtcttttattgacgtccaatcaaggagagctacaccatgaacccgatttttttacctgcgccggagagcacgacaccggtctcgcaggaagctatttttaccgtccaggtcaccggcctgatgcagcatccccaacgaccccaatcgctgcgggaggaaacgctgaccgtgtgtgagaccgactcggtcaccgaagcggtacagcggctgaaagtgatccatcttttgggtgactggccggtatcggaaatgccctcagctcagtgccggcgggctttttttccactcacggtgatgatttatgacgcccaagataacaaggtactcggtggccgctttgatgacgagattgtctgggcacagccggtcaccgtgacatcagaacgtttatcactggtgcagaaacaacagcacttgtgtcagtcggccacctttgagctgagctggcagaatgccggggcggcccgtgtcttgtggcatgaggcgaatttattgtcactgcatatgatttcacctgattaccactatcatcacgaagtgcaggatattctccggcatagcgcaacggtcagcgtttgatggtgtcaccctggaagcctgacgtttaaccgtctggcagatgattaccgccgcgttgctgaaacgtcattttggtctgagcctgaatgacacggcattgtgtgaaaccgaaacggtaaccgaacttatcgccagtggcatccggccgtctgatgctatcaatgaacggggggataaatacgatttaacccgcatgaatgcgtctgaaatatcaggtagtacaccgtatctgggcatgcatgatgaactgacggtcattgtcgacagtcaggttgccgatattttcagacaggatttcaactgacacttttcttcaatcacccatcgggggaactgactcccgtggggggaacagtttcgccggttttttaaacttaaaaatcaaaggaacttaaccatggcagaatgggtcactaatcaactggacgtcaccggtaaatctgtttgtctcgatgtgatgcaacaatgggtctgcggggaagaagtcccccgttaccggcaggcggtattacagagcctgcgcctgtttctggcgggctgtgcggggatattaaaacccaccaagcccttcacttacacaccgtatccggaactggtgcggggtacggcagcgccgactgcgcagaatctggcgtttgaacagtggttggcgttgttgcaggacaatgtgttgttaaccgcagaaaacatgaagcggattgacagtatctaccgccagtcaggcttaagcctgttgcgctgggagactataccggtatcagcgcgtgacatgattgcccgcctgctgatccgccagtataccgactggtttggtgtggtgagctggtctgacaatcttgatatcaatgcgtgctgggagaaactggcggtttatccgacctcggcgcagccctgcgatatgctgatgatacgaccaacccgcttggctacagagattaacggaaacagtggcttactgaaaggaatgaccaccacagcgcagtgctacgatgagcactatgggctggaatggccgttcggtcatcatgtccgctgggaacgacgccatgtcagcagtctgacggtgcggtttgataccccgtgggcagcgccgtcagccgaactgatgggcgaactgtcctcggtgtttgactgtgaaatccgccactggtacagcgaaccgtcaggcagcctcaaaggctatgactgctatgaccagggcgagcatgtggacagccacaacgggcaggtaggacacgaaaaccgtccggccctgtatctggttaacggcgataagcccgaaacggcactggcattaccggcgatggccgtcgggcagtaacccgctgtttaacgttgtatcagcatattttcacttcaaccgaaaggggaaacacgttccccttccggggcgtgttttcctttttttatcaggaaaacatgccatggcttcttgtccggactaccagaaagagtttatttcgttgtttaaacaaaccgcccgttcccgtaaccgttatcgggtttttcaggatttttgcaactgtgcgatggcggccattcacaataaatactgtttcagtgaggaactcgagcagttctatctgaaaactatcaacaagtatgaacgggaagatattgaccggattgtgaaacttttttcctataccgcgctggccctggcagaagctccctgtgattttctcggcagcgtgtttatgcaactggagctggggaataagggacttcagcagttctttaccccctggagtgtggccagaatgatggcacaattgcagttgaatgaggtatctgacttgttgcagacccgaccctttatcaccttccacgaaccttgctgcggtgcggcctgtatgatgctggcagccgcagaggtattaagagagcagggacatgatccgttgtccagtatgtgggtgtctgcgattgatatcgacccgctggcggcggtgatggcgtatatccagctttccctgaccggtattccggcagcggtcacgattggtgatgtgctgaatgatcccggcagccaacggacacgctacacaccggcccattatctgggcaactggtcgcagcgtttgcaggcctatgaacacgcggcctgatttctgttttcatcctctttgtttcacgactgcgcctttcggggcgcttttttacgtttaagggtaagtcatacaaacaattttcattttcgcaaaaagagtttcgccttgtttcagcgtgggattgaccgacactgagccaaatttgacaaggagaaaagtgatgtttacacgttttaaatcgcattttacccgctcgccagcattacagaaaaaatcatcagggcaaaaaacgagcggggtctgtgataacggggactatttccggccacaatcagtggaggcgttgctggcaacccccttgcgccatcagtgcctgcaacaattatggcaaaacagtacgctttagagcagatcaacaaggggggg

SEQ ID NO: 81 - DNA, 9744 bp, Xenorhabdus sp.
gttgtagcagattaaagagcagtgtaaaaaccgcagcgccgatgctgaatgacatctggcgattgaggttccagacagtgctggcacgtgccagatgttccccctgaaaatgcagcatcgcagtggtctgagcggtattggctgaaatacctccgccaattcccatcagcaagtaagcagcaacaagcaagagtaattcatgttccgccccgaccagtgtcagcaagacgatccccccggcatgcagtatcaggccagtacagaatagtcgggcagcgccaatgtgattatagagatgaccgcaagctaccatggcacagaatgatccacccgcgaacaatatcatcaaaagtccggtttcactggcagtccagccaatcacctgctggagaaagaaaatattgagtagattcacaccggtaaatatgcccggtacagcatagtaaactaagacagagaagagcatacggttattgcgcaacacattcaggtcgagaattgggtgctctatgctgcgagtatgtctgacgtagagcaggctaaataaaatgccagttccggctaaggtgaggggaagccatgggctgctagaacccgcatacagtgacatgccaaacagcagtgcagtaagtgccagacttaccaataatagccctatgagatccggtcggcgggcggtggtcttttcctttttgatccataatattgccagtaatgccgtgatgagactgaaagggatattgcagagaaatacccagcgccaggaaaagtgatccacgatgactccgcctgcaccgggagaaatagccggtgcaattagcgcgacagccataatcagcgtcgatacttttgcgcgttcatcttttttaaacaggccaaaggtgagtgcctgacctaccgggatcagtaatccaccgcctatcccctgaataaatcgaaacaggatcaatgacacaaaatcgttggatagccctgatagtaaagctcctacagaaaatattgccatggaagctgccatggtcaatctggcacccagatgactggcaaaccaggtgcttagtggaataatgagcgtcaatcccagaatatagctgtttgctacccaggccacgctagattcagaaatgttgagctcgtgggaaatattaggcaatgcaatcgctgacataaaaatatttatgcagtcaatgaaaaagccagctaaaaaaataaaggcaatacgataacgatatgtcattttatcctccggtttggagtctaatttggcttgctcggtagtgtcgattagattaaattgaactcagtgtttactaatatttaacaatctatgatttttaatcacttaaaccgaattcaaacgtttcttgcggtagtagattgtgggtcattcactcttgccgcaaaacggcttttcattagcaaagcgatggcgagtattcatgtgaaatcgttggaggaagctctgaatgtgccgctgcttattcgcaatacacgaggcatcactctgacagaagccggtgaagtcctatataaggattttcgggaaatattttctaatattcagacatctattgaaaacatatctgacattcatcgttctttgtccggaactctgagtattacatccactgcggaatttggtgcgcaatttttactgccgttaattggtgagttttgcaaacttcatccaaatttaggcatcaattattacgctgattcatcattgaatgatttaatttcagaacggtttgatctggcaattcgcttagggactttgcgtgactctactttaagaagtagaaaactgggtaattatgccattgttatagtggcctcatcagagtggttaaaaaacaatcccgttaaatcccttgatgatttaaatgctgtgcagtggattgctaacagtaacttacaggcaccaacacagtggactttacgcaacgataaaaaggaagcgttcgaatttcgtgctatggcccggtttcactctaattcagccttagctactaaggcgatggtgtgttccggactcggtgtagccattctgccggagtggatggtgaaagaggaaattgctaaaggggagctgatccagttgtttcccgactatacattgcccaagcaggacatcacgattgtgtttgccggtgatcatcgtattcgcctcaaatgccgcgtttttattgattatctgatacagaacttacgtattttataacactagctttggtgggcatttatccgccaaaaaattgcaaattgcgacaaattgttgtattctgacagtgcaagttaaaaattcataaaactggaggtcatcatggccattagcgttaggttggatgatgaatttgtggatgatgttaggattcatgctgaagcatcaaacagaagcgttccaaagcaaatagagcattgggctaaaattgggcgaattgccgaggataatccagatttaacttattcatttatccatgaaattttactagctcaaaaagaagtagagcatgggagaataagtaaatatgttagaagaacaaaaaaatgagattgaggtttacgaaacaaggcgtttttctaaagcgttaagtaaactaccagaacagagtctatatcttgtagaagatgaaattgaaaaaataattaaaaaccccaaaataggtgaaaataaaaaaggtgatcttgattttttaagagtgcataagttttcactaaacaatcaattgattatgctcggatatcattggaaagaaaataaattagagttatatctacttgatatcgggactcatgagaatttctatcaagaacaaaagcagtacagaaaatcagaccttaaaatcataaaatgattttttacaatgaaaaatctcatcgaaaataatatgttttttctttatcagttcgcccatgttggtaaccagagtactcgaccattaataagttgaagtgggatcatggtcccacttttttagataacaaaattcattgaattactatcaggtagtttgatgcctagtgtgatttatttccacagccaccagtgcctgcgcacaggcccaggctgaactccatgcccactggaaattatatccgccaagccagccggtaacgtcgacaacttcaccgataaaatacaatcccttcaccttatgggactccattgttttcgatgacagctcattagtgtctacgccaccgagagtcacctctgcggtgcgatatccctcagtaccatttggctgcacctgccagcattgcagggtagtgaccagatcttttttctgtgctgaattgagctgtttcagagagagttctggtagttgacccagagattgcaggcactctaccagacgttttggcaacagtttggcaagggtgtttttcaggctttggttagggtgggtttcacgttcctgagttaagaagtcatccaagtcgatattcgggagtaagttaatactcacatattcaccgggctgccaatagctggagatctgtaaaatagcggggccggaaagtccacggtgagtaaacaggatattttccctgaacaccgttccgtcctgtgcggtaacaacggaaggaaccgccacaccggagagagtttgaagctgttccagcaatggtttgtgtagggtaaaaggaactaaggcggcacgagttggcaggatattaagaccgaattgttccgcaatgcgataaccgaaaggagaggcacctaaaccgggcatagataatccgccagaagccacaacaagtgagtgcgcgcttacttttttccctgatgcagtaatttcgaactcttgctcatttttctctatctgagtgacttcactacgtaagcgaatcgtaacctgaccggcttcgcactctttcaaaagcaggttaataatctgctgagccgagtcatcgcaaaaaagctgccctaacgttttttcatggtaggcaataccatgacgttgcaccaaatcaataaaatcccattgtgtgtagcgagcaagtgctgacttacaaaagtgcggattggctgaaaggaaggctgcgggttcggcatacatattggtaaaattacagcgtccgcccccggacattaaaattttgcggcctgcttttttaccattatccagtaccagaacatttagtcctgactgcccggcctgtgctgcgcaaaacaagccagccgcgccagcaccaataattactacatcaaatttttccattcgtttgctatctctatacttgcagaataactttcttgccggattatttttcaggaaatacacttcattgtggagggactatctgcgaaatgcagagaaaaataagtacttggttgaacttttattatggcaggccatttttcatcaaaaaaatataaaaagataaaaatcacataattttttgatttttatgataaaagtaaatcattcgctgccggtttattgtcattaaatcaaaaaaaggtcatatttctcttttcccgccagcgtttgtcactgataatgcgccgcgttcatgtcctactaactggcttaacgtttatgctacatctgtttactggcctggatttttataccggccttatgttagtacttgctctgttgtttgtgcttttttatgaagccatcaatgggtttcatgataccgcaaatgcagtagcaactgttatttatacccgcgctatgcgctcgcaatttgctgttgtcatggcaggggtttttaacttttttggtgttctacttggtggattaagtgtcgcttatgcgattgttcatctattacctacagatctcctactgaatgtcagctcaagccatggtttggcgatggtcttttccatgctgctggcggcaattatctggaatctgggcacatggtatttcgggatcccggcatccagctctcatacgttgattggttctattatcggaattggcctgaccaatgcgatagtgaccagctcttctgttgttgatgcgctgaatattccgaagatgatacagatttttatgtccttgattctgtctcctatgattggtttggtgatcgcgggagcgatggtctttttactgcgccgttactggagtggtactaaaaagcgccgtcgtatccatatgacgccggctgaacgtgaaaagcaggatggtaaacgtaaaccaccattctggacacgaacagctctgatcctttctgctgttggtgtgagtttttctcatggcgccaatgatggccagaaagggattggtctgatcatgctggtactgattggtgtcgcgcctgctggctttgttgtgaatatgaactcaacaagctatgacattgctcgtacccatgatgctgttgtgcatttgcagcagtattatgagcatcatgaacctgcgcttacccatgcaattgaactgactccggctatatctccggttgaagatcaactggatatgaatttccactgtgataattcacgggcactggatgtgctgaataccacggaaacaatgctgggaagtattcagaactatagtgagctgaatccggatcaacgtaacagcatgcgtcgcatgttgatgtgtattgctgatacagcaagtgctgtggctaaattgccagaaaccagcatggaagatgcacgtttcctgcataaattgcgtaaagatctgctgaataccgttgaatatgcaccaatgtggataatcatcgcggtggcgctggcactgtctctgggcacaatggttggctggaaacgtgtggctgtcactattggtgaaaaaatcggtaaaaaaggcatgacttatgctcagggggtttccgctcaggtgaccgccgcagtatcgattggggttgctagttatacggggatgccggtatcgacgacacaggttctttcttctgcggtcgcaggtacaatgctggttgatggtggtggtgttcaaagtaagactatcaaaaatatcatgctggcgtgggtactgacattgccgatttcaattgccctgtcaggctgcctgtattggattgctctgcaattgatctaagcttaagttattaaaaagggttggcagctctatcagcagctcaaccctttttattgccactttttattttcaactcgcttttcctctctgttgttatcagactaccgctattcctaccagacacagtaagacaatcccacataacactttcgtcaatataaactgcttacgcagcctttcgcagaaaaagatgacatcatcattgtgatggttgagatagccttgtgtgttaatgtagcgtaccagccgcatttgtttactgaattggccattaccagtaaaaaaaccattcccatcaatggcttgatatagcatcggatctgcctgacgcagaatagataataaagcacgtagtgaagaaatataacgtaatatattgataatacagataatgcaaattgcccagaagaatgcaagcatactgaacatattccccctccttagagtggcaacgggatattgtgtatggattaagaatttatctgaaaaggtagcaatgtaaatagtcacagtattaaattttaggaggaaatggcttattagaaaagccaagtgatattgaaaaatggcctcagtatcagagataaaatgtttaatacagttatggtattgaaagcagatatcttttctttcaactggttaactaaataaagtaacaagttgtgatcacgacgacactcaaaagaggcgtcaagcagttatagtataagtataaaatcatggcgtttaatgccgccaatccattttatggaaggagttcacttatatggcttataaacatattcttgtagcagttgatctatctccagaaagcagggtcttggtggataaagcggtttctttggcaaggccatacaatgctaaggtttccttgatccatgttgatgtaaattactctgatttatacaccggcctgatagatgtcaatcttggtgatatgcaggcacgtatcgcagatgaaacccgtaactccctgaaagagctgtcagagaattcaagctatgaaattcaggaaacgctgagtggtagcggcgatttagggcaagtacttgttgatgcgattaagcaatatgatatggatctcgttgtctgtggtcatcatcaggatttttggagcaagctgatgtcatcagctcgtcagctcattaacacagtccatgttgatatgcttatcgttccgttgcgtgacgaagattaatattctgctgaaaacttattctatggaatcgcctgctcattgcaggcgatttttttgcttccgtaaaggataaggtgctttaaaaagctttttattaagaaattataaaatttattttcaacaaaattaataaaaatagttattgaaattcaatcataaaatagtggtatattcagaaagcaaaccgtaattacctcacattttcgacaaaaaataacaaaggaaatggggagggcatcacatctgaatgtataaaggaagctataaatgaatgtaccatcatctttagtctcatttcttgaatctgttcagtatcacaatccacatcaaccagaatatttacaggcagtaagagaagtattgacctctctctggccttttcttgagcgcaatccgcaatatcgtgaacaggggttattagagcgtttggttgaaccagaaagagttattcaattccgcgtcagctgggttgatgatcagggaaaggttcaggtaaaccgcgcatggcgggtacagttcaattcggccatcgggccatttaaaggcgggatgcgttttcacccttccgttaatctctctattctgaagtttctgggttttgagcaaacattaaaaaatgcgctgacaacattaccaatgggcggtggaaaaggtggttctgatttcgatcctaaagggaaaagtcagggtgagattatgcggttctgtcaggcattaatgaccgagttgtatcgccatctggggcctgatactgatgttcctgccggagatatcggagttggtggccgggaagtggcgtttatggccgggatgatgaaaaagttatccaacaacacggcctgtgttttcacaggtaaagagctttcttttggtggcagtctgatccgcccggaagcgacgggttatggtctggtttatttcattcatgcgatgctgaaacgtcatggtatggcgctggatggtatgcgggtatcggtttcgggagcaggaaatgtcgctcaatataccatcgaaaaatgtctggaactgggggctaaagtggtgacggtatccgattccggcggtactgttctggatgaagaaggattcactccagagaaactggctcatctggaagagattaaaaataaacgttatgggcgtgttgaggattatgccaaagaacgtgggctgactttccttgaggggcaaaacccgtggtcagtgcctgtagatatcgctctgccttgcgcgacacagaatgagctgcatttggaagatgcgaaaatactgattcagaatggtgtgaaattggtagcagaaggagccaacatgccggcaactatcgcagctactgatgctttccttgaagcaggtgttctgtttgcgccgggtaaggccgccaatgcgggaggtgtagccacttccggcctggaaatgtcgcagaatgcgatacgccagaactggaaagcagaaaaagtggatatccgcttacatcacatcatgctcgatattcaccaatcctgtgtggaatatggtggagaaggcaaacagatcaactatgtacagggtgcgaacatagcgggctttgtgaaagtggctgatgccatgctggcgcaagggattttgtaattcagtgagcttaccagtaaacaataaatgatttttgatgaataaaccccatgttgaatctgtctttcatacacaaatcccccgataaaaaatcgggggattttttgaatctttttccactttaccgatctgagtaataacgatttcattgaggtacggtaaaatgttccaaactcacgcagaacaatgggctgatgaaactttttctcgcgcaaatttgggcgatagtcggcgtacaaaacggcttatcaaattcaccgcctcgttagccaatcatatcgggcaatctattgtgcaatcactcaaaaccccagcggatattgaagccgcttatcggtttacgcgtaatcaggccattaacgcaacctctattgccgaggccggatttgcggcgacggctgaacacgccaaatcctatgactgtttgctggcattggaagatacgacctcactggaatttactcatcagaccgtccggaaagaaatgggctataccacatcccgaaaaagtgccaccggtctgcatgcccattctgttttactttttgctcccaaagaagaacagctcattggcctgattgaacaaacgcgctggataagagcgctgagtcagtatggcaagaaagcgcaacgggcttcccgtccatataaagacaaggaaagttataagtaggaacgggcctctcaggccacagaagcccgccttggcagtgagatgaataacgtgatttcggtgtgtgatcgcgaggcagacatcattgactatctgacttataaaatcacacatcaccagcgttttattgtgcgttcaatgcaaagtcgttgtatttgaacaaagcccggataagctttatcagttcagtgaatctttacagcctgcagataaaaaaaacgttc

SEQ ID NO: 82 - DNA, 12203 bp, Xenorhabdus sp.
cctaatccaacaagcggagtgactgccagctcttcatttgaagcctgattttcaacatgatacgtcgcactgcgtaagtggccccgaaattgtcggataaaattctttatttcaaggctacgagggcggtttgggcaggccagattattgactgctttgtcagaaataatgctgtcatctatatactgcttcatgatggctgcgagcttcgcattatgcagtaaatgataacgatcataacgatatttttcatggcggtgcagatagacattattaatactggcaccactgtaaatcacagtgtcgtcaaagataaaaccctttaaatgtaagacacctagcgcctcacgggtattgacgggaacaccaagaatggagatatgggcattcgggtatttttcagccatagagcaataccagtctgcatttgttgcggctgcttgtgcgccaatacgaccacgttgcgcgcgatgccagtcgaccagaattttgatatccagttcagggcgtttttgcttggcttcatataacgcagttaaaatatcttgaccggcatcgtcatgttctaaatataatgcggcgatataaatatgctttttggcgcctgcaatacgttccaacagtgtgctgcgaaactcttcggattgataaagggtttcaatattagcaactgactgtggtaatttaggcagttgtgcaaggtgttgttggtgttttgcttgtttaaatttaaacaacatcacagtgcgatttttctcttagtttggatggttataatcccatcgtaaatttgtgaatcaaaatgatctggcgatgataccactagttttgtcaattgtggctaaagttttaaaacaagattaacgataccttcttctaactggatatcgatggtaaatcccagtttcttagccagcctgatcatattgcggttttctggcattgttattgcagttaagacctgaatgccatgttctttggcgtaatgaatgagtttagccataagctgagatcctaacgtgattcctttcagatccgatcgcaccaatacagcaaattctgcttcaatattatcgggatcagccatcgcacgtgcgacaccgataatctctggttttgttgtcggataacgtattgcgacaaaagccatctcacggtcatagtcaatctgagtcatattagcgagatcatcatgagtaaattcattgatctcactgaaataacgataataaagatcttcttttgttacctgctcaatgaattcttttaatagcggttcatcttccggcaaaatcgggcgcagcaaacaggcaaaatcatctttgatatagatagtttcttccagttcattaggataaggccgaattgccagtcgattccgcggatcgtcagtgattggggttaattccattgtgacatccaggagtgtaaattcactgccggatgccagtaatggatgaatattcagacgggtgatttgggggcaatcgattagtaaattagagactctcaccagcagctggctaagtgagggaatatcgagaggctgcaatgatgctccggattttattttaccgctcttaatcgcctgaatgaccagataacgggccaaagccatattaagcggtggcagagcaacagccgcctgagtttcattaacccagtctatcccgccttctccaagcataattaaaggaccaaaaacttcatcctgttcaatggcaattctcagctcctgtgcaccggcacggtttgccatattctgcaccaataaaccctcaattctggcttgcggaaaattctgttttacacgttcaacaatggcctgagctgcggttttcacttcttttgcagtacgaagataaagcatgaccccctgtacttctgatttatgaggaatatcaggtgagcgaagtttcagcgccacaggataaccaattttttctgcgatactgaccgcatcgtcactggagtgagcaatccatgtcggcaatgtattcagcccataggcttcaagaatagaatggacttcatgagtatctaactgagtattacccttattaagagcctgttgaatgcaatcatgggcgtgggccgtatttgaagtaataccaattggcagggccggtgtttctttgagttgtttctgattacggcgatactccaccatatgcataaatgcggtgaccgctccttcaggggtgcgataggttgggatcccggcttcgctgaataaccgcctgacttcctgcgaagaatattctccacaccaattcgtgaatattgtcagccattttccacggggatgttctttgatagtccgaataacgtttacggctgtttgcatactgtcggaaattgcacagggagaatgaatcaacaataaggcatcatagctacggctatctagcagtattttcagtgcgtcaatatattgtgcagttgacgaagcgtcaccgagatccagagggttttgtaagatttgtacatccggtagtacgctgaccaatttagcaatagtttcttcctctaagtcagctaatttaccggttcttctgatgagttcatccagcgccatagcggccggagccgtgccattactgacaattaacaggcgttctccgcgtagtggacgcataaagctcagtgtttcgacggcggaaaacatttcatgcgtatcctgtacgcgtaacaatccggctctttgaattgcggcatcataagcgacatcaaaattttgctgttctcccagtaactgctgcgctttacgggtacggctgcttttgacgaccagaattggcttattgcgtgatgcgctgcgtgaagcggaaaggaaacgtcgggcatcgctaatatgttccagatgcaggaggattgcactggttttactatctcgcgctaaaaaatccagtaggtcatcaatatcaatatcaacgctatctcccagtgcaataaaatacgaaaaaccgatattgcgatggtttgcccagtccagaatcgtgttggatattgcggctgattgtgaaataaaagccagttttccctttagaataggaatgggtgagaaactggcattcagcccgatccacggagccagaataccgaggctgttaggcccaaggatgcggatatgatgtttctggctgtattgcttcagttcagcaaactgggagggatgggatgagagaatgataaccgttgtacatcccagctccgtcagttgggctaataatgataagttacggctgtgatgagtacaaataaccgccaaatcgggtgttaaaggtagcttgtcgacagaaggataagccagcacaccgagaacagaacttttattgggagtgacgggaaggatcgggccggtaaaatttcctgctaacaaattccgcatcaggagcgaactggctttttctggtttctcggaagctccgataacggcaatggatttgggatgtagcagggcttcaagtccacgctggctcatttttcgctccttgttaagaacacgtcaataaacaatcatcattagttaagcaattaccatgaataactttagccgtgatcgacaggaattactgtgatttataccgctggatgatttgatttcccagccagatactgttcccgaaaatgattgaaatggttcaataattgttgggatgcttcaaaatcattggctaactctaacgcagcggcagcgacctcagcagtacagtgttgctcttcccttgatggcattcgcagtaaatagtcgattttggcaatgctattgattgataacaaaggaatatcatccagatacgggcttttgcgaaacatttttcttgcttcaggccaggtgccatccaatataatgaataacggcgctttttgtgtgtctggcagttgctgatacacagttcgcgatggcgtggcgtaactatcaggaaaaatcagataaggctgtcggctcggatcacgcagtacatcaagcattctttgatcaggctcagtccttgaccatagaaaagcctgtgtatcaggcagaacatctgcaattaactttcctgtattactaggcttcattggctcagtatcaaacataataaggcaaaaacggctgtcagcttttgcgggtgaaatattttcacacagacatcttttttggggtaataaacagtacgtacaacgtttaacccgacagcctcttgcttgaaaagggcgggtagaacgcgcaagacggtgttggcgaagctgataaacggcgttgttatttctcatttaagaactcagaaatgctcatgtacaaagtcagaagaaaattgacggatattttaattgattgtcgttgccagaggtagcttcggaagcgaacatcgggtaatctgcgcgccatagagaagttggagaaatagatgaacgattcctatagtggtaagagtggcaaagtcaaagtaatgtatgtccgtaatgagggcaacaatgacagccgtaataataacgatcgtcgtaacaacaatgatcgccgtaacagcaatgatcgtcataacaacaataaacgcccgtcaggtaaaggacgcgagcagggcggcagacgttacgacaatgatcgtcctgagcaaccaaaagagcgttctccatggagaacagtttcccgctcgccagatgaagagtcaaaaccggatcatggcggcattagtggcagaagccatatcgaccctgaacaactgcgtcgtcagagactggaagagacccggatctatggcgaaaatgcttgtcaggcaatgttccagaatcgcccggatgcaattgtgagagcatggtttgttcagtcagtaacccctcgttttcgtgatgctctgaaatggatggcagcaaaccgtaaggcttaccatgtagtggatgatgaggaattagcaaaagcatccggtacagaacatcatggcggcgtttgttttctgattaaaaaacgtaatggcctgaatgctgaaacttatctgcaacaggctccggcaaaagattgcgtattggcattagaaaatgtcggtaatccacataacctcggcgcaattatgcgtagctgtgctcattttggcgtacagggtgtgatattgcaggatacgacaatgctggaatccggtgcggcagtccgtactgcggaaggtggtgctgaacacgttaaaggtattgatgcagatggttttactgccgcgctgagccaattccgtgatgcaggttataccattgtgactacatcaagtcataaagggagcacaaaactggcagaagctaaacttcctgaaaaaatggttctggtactggggcaggaaggtgacggcctgagtgacagcgtctgggaagatggtgatatccgtctctcgattggtggtactggtcgggttgaaagcctgaacgtttctgtcgctacaggggttatgctggcggaatggtggcgtcagaataaaatctgattgttaataaagaatattattgcttttataaataaggctctgaattttcaatcagagccttattcttttgaaaaaataaataattcaccacaattaaatttaataaataatatcaaccgtaataatttggttttaatattacaaatattaattttttgtaaaatgattcaattgtgaaatttatttctctcccttatgtgatattttctaaccgaactttacccatttcctttgtctttcgagttgcctctttgctagctcaggctgcttatcccaatcatcctcggtcgccgtaatttatcctgaaatgcgttatgtataaaatcattacgttaatgcagttgttaatgataataattttaattattattagccaaaataaaaatgtgcttctcatgagtacaatttgtggtgatggatacgaatgaaagactttattaaatgatcctgctgcacaccgaagctgaatttatttcttgaattctctaaggaaaataaacggttaccgttcagaaaaataaataaaaaattgaagaaaacataataaagaatcattttgataacaggacaaaaagagtgagtcacacaattttgcaccgtaatcgtttaaccagaaaaaaattactttcagtcttaatcccgctactgattacagggaacaatatagcaatagcggaagaagagcatgggaagaatgataaaattgtcgtaacagcaggaactccggggcatgaaggagtcactgaagacagcgagatgtacaatacgacttcaatggtgacatcaaccggcctgaatttatctgcacgtgaaacgccacaaagtgtcagtgtgatgactaagcagttgatgatagatgagaatctggacagtgtaaaaagtgccatcggcagtatcacaggcatgacagtgaatcaggctgacagcgatcgttttaccttttcatcaagagggatgacggtcagaaatatgttgcgtgatggcgtaccaaccttttacgacattcgctttaattacggtgataacctgatggataccatcatgtttgaccgtctggaagttgtgcgtggcgctgcgggtttgatggtggggccgggtactccatctgcggcagtgaatgtgatccgtaaacgcccaaccacagaattccgtggtgaagttactttggaaggcggttcttgggataaatggcgaacaggccttgatctctccagctcattaaatgaaagcggcacaatcagaggccgttttgtcacagcttaccagcgttccaactcttttattgatcgtgacaaacacgagaaataccccttctacggcattattgaagctgatttgacagacaacactctgctaactattggtgctgattatcagattaatcatacccgtggtggaatgtttattagctctcgcgggagccgtcactcagggcttgctgcgcaatccgttgggggagccgggattattaggaattaatgtgggagcggcggttaccgtggtttttttctctttcattccggcgctagaggaattctcccgtttttggagtgcatttattggcgcgggtttatcaactttattgttctatttactcagcggcggtgtccgtaatactaaccctgtacggctggttctgacaggtgcagctatcaatgcctgcctgtttgcagttgtacagggagtggtattaataaacgcacaggtaatggatagttaccgtttctggacagtggattcattgagtgcgatgtcgctgaatgaggccagtttactgataccttacctgctggtggcgattgtattgacgctttcactcagtgcttcattaaatgtcatggtttttggggagggaattgcaggtgctctcggtgctaacgttgcccgtacccgtattctgtcactattaagtgccacgatgttggctgccggagcgacagcaatggctggcccagttgcttttattggtctggcagcaccacatctgatgcgggtatgggtaggcagtgattttcgctggttgttgccttactgcctgtttgccggcccttgcctgttattgatatcggatgttgtggggcggttgttgatagcgcctgaagaaattatggtcggcattattactgcctgtattggtgctccgttgctttatctggttgctaaaaaccggacacaaaaaatcatggtggaataaagtatgactcagatttattcaccgaggccaataaggcaacaagctgtcagaactttctctctgggaagagctatatttatcagcccatcatggcacacgagtaagataatcatgctcattttgctgttgctggtggcgattttctatctgactttatcatcgggtagggaaggaatggataacccttttttgggaacaggaaactcctatcaggaatttatttttccatatgacaggttaaaaccaccgtctttagacggtgactttgactttaatgttttgacctacgcgcgtttacgaggtgcgtggttcgacgactttcagtcgtcagcaccgaagtgcgctaacccacctacttcagtaggtggtagttaagtttattgaaatccgcttacccagagcgttgttagcaataggagccggaatggctctggcactttcgggagcgctttttcagctgacgacccgtaacacacttggcagcccggatatcattggtatcaatgcgggtgctgcactggggattatggttgcgttgcttgtctggcctgatgtattgccaacctcggtaggagcaatatcaggtgccggacttgcagtattgctggtttatctcggcaatggtgctgggatggacagaatgcagacagggaaaattgtgatatccggcatcgccattgccgcattttgcatggcaatggttgactttgccgttgcaaatattcgtgctgaacaggcccagcaaatacgtgcattactgagtggtagccttgccagcaggggatggcaggatgtggcaattattagtggattggtcgtttttactcctgttttattttggctgggcaggcaattacgttatacccattttggtcatgatattgccaatacattgggtgtgcccgtacgccttatccagattattagtatattactggctgtcattttcgctgcaatgtcggtattagtggttggccctatctcttttattgcgctttctgcaccacaaattgcccgccgattagtccatgcgaaaggtgctgcattattttgctcagctttggttggggctttactgatgctgctgtctgattttattaccctaatcttaccaactccggcacgtttgcctgtgggtttagtgactgcggtgattgggggaatttacttgatgtatttactgtatgccgaattaaggagaacacaataatgccatcgggcgtcaattcctcagtagtgacttcgcggcttaaagcccagagtctttcactggcatacggtaaaaaaacgattattgaagatattaaccttgcaatccacgataacgaattcagcgttattattggccctaatgggtgtgggaaatcgacgttgttgcgggcaattagccgaagtatgcagccacaacacggtgaaattcaacttgatggaataaatatccatcgttataagccaaaagcggttgcacgtgagttgtcattgttaacccaaggggcaatagtgacggaagcgttgacgatttatgaccttgtttcccgcggtcgctatgcttatcagactttcctgcggcaatggtcagaagctgatgaacgcattgtcagagaagccttacaggctgtcgatttatgggatatgtcggaaaaatttgtcagcgaactttcaggaggccagcatcagcgggcatggtttgctatgacactggcacagcaaacgccgattattctgttggatgagccgacgacttatctggatatttcccatcagatcgaaatgcttgatttatgccaacgcttacatcagcagggaaaaacattggtattggttttacacgatattaatttatcactgcgctatgccacccgattaattatgatgaagagtggccatatttatgcggaaggaaagcctgaagaaattatcacggagcagagcattgccgatgtatttggtctggcatgtcgtattatccgtgatcctgaatcggataagccattaattattccgagatataatggaagggggtagaatgactcagataacgtcagaaatagaggttaataatattgtcaatttattcgacagcgcattcagccattttaattcatcgatgaaagtgaatgcggaaaatattccagaaggcagcatgatatttcaccaatggtcggatgaaaaagaatttttaccattaatgcaacgttaccagaatgaatattatgcaaagagtgatcagaagccaaatagtaaagggctttattctttatgggcgcagtggtattttggcatagttgttccgccgatgatgctaatattgctggaataccctcaagcagcagatgctgattataatctttttcaggttgaatttcatgaaagcggccggcctgatatggtttactatcaattaacctggacggatgaacctatatccctactggatcgctactatgctttattggatcgccatattattccggtctgtgaaaaaattgaatcttacaaagggattaatgggcgtttgctatggaataatattggttatgtgatgtattggtacttaagtaatttcaaagaaagaatgaatgatgaacaatatgaaatattggtcaataatcttttctttgaagcgaaattacccgatggcagagataacccattatatcgtaccgtgatattgagaaatgatattatacagcgtcgctgttgttgccaacggaataaattaccgggagtagggaattgtcgtgactgcccactggaaattggttaataaattggaggagctatgcaagtaacccatctccgtgaaaaacggattgaaaaagatcaatttcgtggtcaggtgattaaaaatacgcatttctttcatggtgatttttcatatgctgatttaacgacagccagtttattgattgcttattttatgaatctaaagaccagctaagctgcaattttaaacacgctattttgaaagatgccagttttaaaaattgtgacttatcgatggtagatttcagatatgccaatgcactggggatagaaatttgtggatgtcggttgcaaggtgctgattttcgtggcgtgagttttatgaatatcatcagtcccacaattcggttttgttcagcttatatcaccaaaagtaacttaagctatgccaatttttctgatgtggtacttgaaaaatgtgaattatgggaaaaccggtggcatggcactcatattttaggggcaacgttcagtggctcagatctgtctggcggggaatttaccgcttttgattggtatgcagcaaactttactcattgtgatttgaccaattctgttttaggagaaattgatatacggcgagtggattttcagggcgttaaactagaaccctctcaggttgcagagattatggaacagcttggcattatcgtcattggctagcagcaggaagcatgtcaggcggtcaatcacggcaatacattcgaaacagtctggctaaatgctccccggcgggggttaaattggtatctttgcgacgaatcaggcaaaacatggctaatggaagctgttctttaagatctagggcgacaaattgctgatgaaacagtgcatcatctgctaaatcgacagcgacaatggtcacaaaatcacttttggcgactaggctcatgcaagacgttaatgtttcgcatatgacgctgaagacaggaggcctctccattaatgagagcctttcaaacaattggcgataataagtgccttttggtgttggcatggtccagtcgcaatcagataactcttctaaagaagttgcatgctctttggggtgccctttacgcacaatcactttgtactctttttccatcaatttctcaaagctgaggtctgcatctgtgctatcgggataataggtattcacagagaaatccagttcaccttgtctgagttggggtaacatagccaataactgcccttcaacaatacgtaatttgacggtgggataatttcgatgaaattgtgtaatgatttttggcatgattgtgcggacaatacagccagtaacaccaatattgatgacaccaccgagtaagccaatacgttgctgaatatcttcctgagcaattctcaactcttcaagtatcaagctggcacgtgataaaaaactttgcccgcactccgttaaatgaatgccctgattactgcgtataaataattttgcccccagtgaatcttctaattcacgaatcgatttcgttaaagcgggttgcgaaagcgacagggttcggcttgcagctcgaatactgccatagcggctaatttcaacaaaagcccgtaactgattgagttttattggcatcactattttctcttttgcgataactattagttatatagatgaagttaattgtatctcatttaagctgagcttcttgtctacattaattaaaaacagactactgatgtgataactaaaagagatagtaatatgcaaactttattgaatgaatctattcgccaaatcgccggacaactacaaaactggcgtcgtgattttcaccatttcgctgagt

SEQ ID NO: 83 - DNA, 14696 bp, Xenorhabdus sp.
aaaactcccctaaggatgaagatgcccttaacttaggtttacggttttatcagaagttattcatacatcataatcatcccaatatcagcagcaaagccgcaagccgattaccgggagcattatgtttttctgtcagccagcagcaatataaagcggccatgagcattattgatgatgttaacgagttaaaaacagaactggaaaatatagtaactaaagagtcaggcgtcagcaaagaacagcggtttgaattcgttcatgatcatttacgcggtttaattaccttaaatgcctatcgaacgattaccccactcgtagatccggatactatcaactttggctgggccaataaaaacatcattaataaagtgacaaagcaacaaattctggaaaggctggaaaagagttataattctggtcgtgcagtcccaccctactccagcgatcagtggactgcgttggtcgcattggaaatcaccgatattaagaaattgcctgatgatgtagttttgaaaattaaacgaccagtaaaagtacagcctatcgcacgcgtctggtattcagaaatacaaaaacaggttcaatatgcctgccctctccccatcatcgctttttatacaaaagatcgtggcgtaacccccaaagtaggttcactgccaaattataacgccaatacaatcaaataccgccacaaacccaaagctaagccgcttgagctgataatccctcgtttacatctttatcgggaaatataaaacaaaaaaccggaggaaaaacctccggttccacatcagccattaataggcaagagttacttcatactgccaaccatatcttccggacgtacccaagcgtcaaattcagcttcagtcaggtaacccaactgcattgctgattgcttcagagtcagaccttctttatgtgcttttttagcaatttctgctgctttgtcataaccaatatgggtattcagagcagttaccagcatcagcgattcattcagcaattgagtaatgcgatcacgattaggctcaattccaatagcacaatgctcattgaagctacgcatgccatcagccaacagacggacggactgcaagaaattatgaattaccattggacggaatacgttcagctcaaagttaccggacgcaccaccaatattgacagccacatcgttacccataacctgcgcacacaacatagtcatagcttcacactgagtcgggtttactttacccggcataatggagctacccggttcattttcagggatagaaatttcaccgataccacagcgagggccggaagccaaccagcgaacatcattggcaattttcatcaatgatgaaaccagacctttcagtgcaccatgggaatgaaccagtgcatcacaagtgcctaatgcttcaaatttgtttggtgaaatgataaaaggctgaccggataatttagcgatttttttcgcaacacgaacggcatattcaggatgagtattcagacctgtaccaaccgctgtcccgcccagcgccagctcacaaacatgagggatgctgttttcgatgtgtttcaggttatgagccagcattgctgcccaacctgaaatttcctgacctaaagtcagtggtgttgcatcctgcaggtgagtacggccaatttttacgatatctctaaacgcttctgctttatctgccagtgttttttgcagaacttccaactcaggtaacaggtgctcacgtaatgcgataactgccgcaacatgcattgctgtcgggaagacgtcattagagctttggctcttattaacatcatcattagggtggatcaggcgttcattacctctttgaccaccaaggatctcgctaccacggttcgccagcacttcattcatgttcatgttactttgagtgccagaacccgtttgccagatagcgagagggaattctgtcgggtgtttatctttcaacacctctttcgccgcagcgataattgcatcaccgcgttccttaggtaaaaggcccagatccatattaacactggccgcggcctgcttggttaacgcaagagcatgaatcaatgcaacaggcattttttcctgagaaatgcggaaatgctccagtgagcgctgagtttgcgctccccataattggtcagcaggtacttcgataggtcccattgagtctttttcaatgcgagtggctgccattactatctccttagcacacagaataattgaatacgccggatccaactgtttttaactcacccaacagtgcagataaattaatcggcatctctttataatgccataaatttattatcgataatgcgacctaatcgtgtttattgtattgttgtcatataaagttgttgtataaataagtttttttattataggaaacccgccatgctgaaaatgaccaaccaaatccaacattatgattggggaagtacaaccgcactgaccgatatttatggtatcgcgaatccggataatcagcctatggcagagctatggatgggcgcacatcccaaatgcaattctcaggtagttgatcctgaaacgggccagcctattgccctgaatcagcttatcgcccaggacccagaaaaatatctgggtaaaaaagtcgccaggcagttcgggcggctaccttttttatttaaagtcttgtgcgcagctcagccactttctattcaggtgcatccggataaattatcagcagaaaaaggttttgccagagaaaatgctgcgggtattcctctggattcaccccagcgtaattataaagatgataaccataagcctgaattagtgtatgcgctaactccattcaaagcgatgaatgctttccggcctttatcagaaataactgaactactgagctatgtctcgaacgcacatcccgatattcagccatttattcaacacccgaccgagcagggtctatcgttcctttttgctcagttactaaatatgcagggtaaacagaaaagcttagcgcttgcggtattgaaaacggcattgaatagccgtcagggagagccatgggagacgattaaaaaaatgacagaattttatcccgacgataatggtctgtttactcctctcctgctcaatattgtggaattacaaccgggtcaggccatgtttctctatgcccgcactcctcatgcttatcttgaaggcgttgcattggaagttatggcaaattcagataatgtccttcgcgccggcttaaccagcaaacatatcgatgttcctgaattgatggcaaatctggagtttatctctaaacccgcagccaccttgttaactatcccaacacaagaaaaagaagctctgaattattctgttccagtcaacgattttcatttttctatttatgctgtttcagggcagccgataacgctggaaaatgattccgcatcggttctcttttgttctggcggtcagattacagtcaagtctgctgagcaggaactgaaactatatgctggtgaatccatcttcttagccgcggcagagaaaaatgtaactatttatggtaatgggaaatttgccttagtatctaataaataattgttattcatatagttacaaagttatccatcagtagttaatcacacttttattgaaaagtgattaaaagttctctatttaatctatacaattaacaactattttttacacaaagacatatcgcatatggcaataatgccgtatgcgcaaaaaaggatggaattcccacatgaaaaaatcgctagtagctgtaggtgttattgttgctttaggtgcagcatggacaggcgcgtcctggtacacagggaagcaggttgaagcgcgtatggatgcagcactccaaaaagcaaatacgaaactggccgaaaaaatgccagatcttggattagaattgcagaaaaaagatgtgaaacgcggcatctttagcacggatgtccaacttgctcttactagcaaacttgataagaaagaaggtattgttatcacatccaatattgagcatgggcctttccctctttccgatattgctaaatttaaatttggccctaaattagcattaatccattccgagctaaaagacggtgaattactgaaagaactattcgaaatcaccaaaaataaatccttacttaatgtagataccagtgtcgcatatgatgggaatttatcttttggtatcaatattattcctgttgattacaccactgaaaaaggcctccactgggtcatttcaggagcaaatgtaaccatagatactaataaggatttcagtgaaattacatccacaggaaaaagcgatgaaataaaatttgttcagcctgctcagcaagacaccgaatttaaaatgaaaaatttaagtttttcatttaatagcaaaaaaaatcaatctggtatctatctcggtgacacttcatcaaacatagacgaagtgagcctgagtggatttggtgaagatatgatgtccattaacggtatcaaatctttttctacctttactgaaggtgaaaaaaacaatctggatggaaaatattctcttaccgttgatggcatcaaagttaaaaaccaggattttggttcagccaaatttgtgttaggcatgtaccatcttgataatcaagcctacagtaaggtagaccgggcaacttatgaagctctcttcaaaacaattaattcttttgacatagaaaaatattctcagattacagatgctgcgctgatggaaaacctacccgcgttgctgaaacataatccaacattcaccctcgaaacgcttagcttcaaaaatagcaaaggcgaaagtacagctaacttcacaacgactctgaataaccttcctgacgatttcagtaagctacaaaatagtaatcaagaagaaatcattcgtagtctgatcaaaaaattctcacttgacattaagctatcaaaaccaatgctgacagaatccatcgctctgtctgcgatggtcaggggtgaaaacagggaagcagccgatgctaccggaaaaagtgttgtgcaaatgattgaagcacaagctacggcacttaacttatttacccatactgatgactccattgacatgaatctcaattatgccgatgacaaggtcaaatttaacggtgaagagttcgacctgcatcaattcctgcttgatcataacctgatcgactcctatgatggtgccgatgagcaaaatcagcatgatggcgaagctaatcttcctgcggctgagtaacacaaaaccctatcaaggttctctataagaaagtacatgctgaggctggagaagcctaaacagcgcaaacatcgtaaaaaaaccgatagatagtactttcattgccagtcaatgcgttgactggcttttttgtatactttttatgataactttataaaacaaaaaggataaaaaatgattgatacacagcttccgctgaccgatttacaccgccaccttgacggtaacattcgtcccgaaacaattctcgatcttggtcgtcaacacaatatcattcttcctgcctatgagctggaagctctgcgtcctcatgttcagatcattgaaagtgagccagatctcgtcagtttcctgcaaaaacttgactggggcgttgctgtactggctgatttggatgcctgccgccgcgttgctgtagaaaacgtcgaagatgccgttaatgccggtctggattatgctgagctgcgtttttctccttattatatggcgatgaaacaccagcttcctgttgagggagtcgtagaagccgtcattgacggtattcattccgccagcaagcagcacgatatccaaatccgtctgattggtattctgagcagaacgttcggagaaaaagcctgttctgaggagttagccggtctgctcgctcataagcaacatattactgcaatggatttggcgggtgatgagctgggtttcccagggcatttatttgaacgacactttattcaggcccgtgatgcaggctggaatatcagcgtacacgccggagaagcagcaggtgcagaaagtatctggcacgcgattcgtgaactgggagcaacccgaattggtcatggtgttaaagccattaccgatccggcactgatggattacttggcagagcaccgtattggtattgaatcctgcctgacatcaaacctgcaaactagcactgtcagcactttatccgctcatccactgaaaaagttccttgaacatggcattctggcatccatcaatactgatgatccggctgttgaagggattgaaattcgtcatgagtaccatgttgcttcacctgccgcaggcttgtcaccagagcagatccgactggcacagatcaatgggctggaaaccgcattcctcagcgaagcggagaaacaggcattaagaatgaaagtcgaaaaccgttaacagacggtttaagcttatatcaagctgatgatatgagggtataaaggcagaagttactctgccttttttgaacaattagaccttttttgaacgtctggcatatcgattggcgagtacagcacaaaccatcaactggatttgatggaatatcatcagtggcaacagcataatgcccaccattgcggccggaaatagcacatttgccatcggcacaccattggcaaggcttttcttcgaaccacaaaaaacgatggtaatctcatcttctttactgaaccccagtaagcgtgagctgtatacattgatggttaataccacagcaagcagaacacagcagacaataccgatcattatcagtgagtaagcatcaatcttatgccagattccttcgacaacggcttcactgaatgcaacataaaccaccagcaaaatagatgagcgatcggtgatattaaccagttttttatgcttttcgacccacttagcaatcaatggacgtgacagatgaccaacaataaaaggtaccatcaattgcaggataatatcttttatcgcctgccatgtatcaggatgacttccaccatcatgcgtctggataaggtagccgacaagtaaaggtgagagaaatattcccagtaagctggaagcagaagcactgcatatcgctgcggcaacattgcctttggcaacagaggtaaaagcgatagctgactgcaccgtggctggtaatgcgcaaagatacagaaaacccatgtaaacagacggtgacatccattccggcacaatgaaatgtaaccccatacccagtacaggaaacaaaacaaacgtactcagaaaaataaccagatgtaaacgccagtgccctattcccgccagaatggcatcacgcgaaagtttggctccatgcataaaaaataacagtgcaatggctgccgtagtcaggtactggaaccacgttttcacttccccttcacagggaaaaaacgatgcaatcatgaccacagtaagcagtgttaacagaaaaggatctatttttaatttttgcaaccaattcatcagtacccttcctcttgcctcaggattactccatcactaaatcagtcaatcgataacgactgtgcgttgctctttcgctgatttttcacctgcttcaatcagtttcataatcaggatagcttcctccgccgtcacaggattcggttttcccgccaaaatagcatcacggacagcagcataatacgcaccataattacccggtaaattaggaacagtctgtgtaatcagattatcattttgtgacactgtcacatgaccatcacgcggatcatatccccaatcttcttgtgtcaggctttccccggccttcagacaatcttcctgtgtatctaaaccatattttacgtaactgccagacataccatgtaaggtataaataggagattctgcggcaacaagcattgatgcatgtaatacaactttcagcgtagggtattttagctgagcatggaagtaatcagcagtttcagcatttggacgtattatgcccaaatcggttgtaatggcctgaggtttgccaaaaagctgcaccgcctgatccaacaaatgagggcctaaatcataccaaatcccgctgcctgcacctgccgcttctctccagcgttgacgtacagccgggcgataacggtcaaaatgagattcataatactttaattcccccaacacattgtctttcagtagtgactgaactgtcagaaaacccgaatcccagcgacgattatgaaataccgataatagtaaattagcctcttctgcctgtttcttgagagcttcggcttctgccaccgtaatcgtgaaaggcttatcgaccacaacatgttttccggcagccagcgctttttgtgctaatgggaaatgtgtatcgttaggcgttgggatcacaataagatcaatgtcaggatcgttaaataatgcttctggagaagaagcaacattcatgtccggccagtcttttttgactttctctgcatcactgctggaaatagcaactaattctacattcggcgttctcgcaatcaatggcgcatgaaacgttttactggcataaccatatccaaccagaccaactttcagaagatgactcataatgacctctcaacatttacaaaaaggataagaaaatatcacctgcggtgactcattagcaaataatcctacttcctgtgttactatcttttttatatttgaatacccatcatggagagaatgttttgtatgtatcaatccaatgattattaccgtattaatggttggctattagcccctgctgcttatttagtcatgacatttattgctgccagtacaatgttagtgttatatggaataacctattcctatcaaagtacgttaattcatcgaataggtggcgatttcgcagtccaatggtatatatccgtattaaccacggctattatgtggtgttttacgctttgggtattaaaattgctttttattcgttcaaaacggttcccgcgtatttttatcatctggctgacactttcagtacttattgctgtcaaagcttttgcattctcccccatttcagatgaacttgcagtcagctcattattttggtcactattagctgctgctgtttttgttccttatattaagcgctcttatcgggtgaaaatgactttcacacaagatcgataacatcccccacaattggttgttatcattgccccacttgcctcaccgcaacgtggggagtttctgtcactttcacgactatattattttcatcaaataatcttattttcaggtatagcaatgactgaataccttctgttatttattggcacggttctggtcaataacttcgttttagtgaagtttttgggtctatgtccgtttatgggtgtttcaaaaaaacttgaaaccgctattggtatgggaatggcgaccacatttgtcctgacgcttgcttctatcagttcatggctggtaaatacttatattcttattccattagatttggtttatttacgcacattaagtttcattcttgtaattgctgttgtcgttcagttcactgagttagccgtccgtaaaaccagcccctcactttaccgtttattaggcattttcttgcctctgataacaacaaactgtgctgtactcggcgtagctctgctgaatgtcaatcaatcgcataactttttacagtctgctgtatatggtttcggcgctgcggccggattttcgcttgtcatggtgctatttgcagccattcgtgaacgtctggctgttgccagtatacctgccccttttcgtggttcatcgatagggcttgtcactgcggggttaatgtccctttcatttatgggctttagtggtttggtgaaattctgatgatatctttatggattgctgtcggcgtactcagtgtactcgggttaattttcggattaattctgggttttgctgctcgccgttttaaagtggaagaagacccaatagttgaaaaagttgataatctattgccacaaagccagtgtgggcaatgtggctatccgggctgccgaccttatgccgaggcggttatcaacaatggagagatgatcaacaaatgcgctccgggcggagagcaagtgatgctcaaaatgtctgaattgcttggcgttgatccgcaaccgctggatggcgatgaaagcatacaaaatccggccagaaaagttgcttttattgatgaagacaactgtataggctgtacaaagtgtattcaggcctgtcctgttgatgcaattatcggtgcaaaccgcgcaatgcatactgtagttgaagatctctgtactggctgtgatttatgtgtcgccccatgcccgaccgattgcatcacgatgatccctgttgccactaccacatccaactggaaatgggatttgaatgccattccggtcaaaaatattcctgctgaaccaaattctttgtttatgtcatctgttaagcctgttgaggttaaagccaatgtttaacctattcaatttgcttaccaacaaaaacaaaatatgggattttgatggtggcatccatccaccggaaatgaagctgcaatccagccggacaccattacgctatgctccgttaccagaagaattaattattcccctccagcagcatattggcccggagggagagttgttggtgaaagccggagataaggtcttgaaaggccagccactgacacagggttctggtagaaccgtccctgttcatgcttcaacttctggtacaatcactgccattgaaccctgcgttacagctcacccatcgggcctgaaagagttgtgcgtccgtttgctgccggatggtcaagatcaatggtgcgaacaagttaaaaccttagattacacatcccttgatgctgatactttactacaacgtattcatgcatcggggattgctggacttggcggagcagggtttccgacagcggcaaaattgaaaggcggcgggaactacatcaacacattgatcatcaatgcagccgaatgtgaaccctatatcacagcagatgatcgtctgatgcaggaacatgccagcgagatcattgaaggcatccgcattctgatgcatctgcttaatccgaagcaggttctgattggtatcgaagataacaaaccagaggcgatcagcgctctgaatcttgccctgcaaggtgataaatcgattgccgtgcgtgtcattccgacaaaatacccttccggcggtgcaaagcagctaaccaagatactgacaggcaaagaagtcccatctggtggccgttcttctgatattggtaccctgatgcagaatgtcggtactgtggtagctatcaaacgggctattattgatggggaaccattgattgagcgcgtggtcactctgacaggagaagctgttacttcacccggcaatttctgggcacgtttaggaacaccggttcagtttctgttgcagcaggccgggtttattcctcagtcagagcagatggtcgttatgggcggccctttaatgggttttaccctgcctgacttgaatgtccccatcgtcaaaatcagcaactgtatacttgcgccctctgtacaggaaatggaaccaaaaaccgcggaagaagcctgtattcgttgtggtttatgtgttgaggcttgccctgccgggttattgcctcaacagctttactggttcagccggggccaggaacacgaaaaagccaaaaatcataacttatttgactgtattgagtgtggggcctgtgcttatgtctgtcccagcaatatcccgcttgttcaatactaccgacaggaaaaagccgaaatacgtgccattgatgctgaaacccgccgggctgccgaagctaaactaaggtttgaagccaaacaggcccgtatggagcgggaaaaactggcgcgtgaagaacgtcataaaaaagctgccgttcaggtaggcaatcaggatacaagtgctgtacaggccgcactggctcgcgtgaaagaaaaacaatcctctgcgggagaggaaatcaccgtacaagccggtcagttacctgataatgcggcagcaattgcagcacgtaaggcaagaaaagaacaattacgcgctcgccaggctgaaaaacagacagcgaatgcagctacagcaaccgcagactctgtagcaaacgaagaagatccgcgtaaagccgctgtcgcagcggccattgcccgtgctaaagcgaaaaaagccgctcaggctcagcctgaatcggcacccgcgccagaagttcagccggtggtttcggaagaagcggatccgcgtaaagcggctgtcgcagcggccattgcccgtgccaaagcgaaggaagatgctcagactcagcctgaatcggcacccacaccagaagttcagtcggtggtttcggaagaagcggacccgcgtaaagccgctgttgcaaccgccattgcccgtgccaaagcaaaaaaagccgctcaggctcaacctgaactgacaaccgtgccagaagttcagccggtggtttcggaagaagcggatccacgtaaagccgctgtcgcagccgcaattgcccgtgccaaagcgaaaaaagcgactcaggctcagcctgaatcggcacccgcgccagaagttcagccggtggtttcggaagaagcggatccgcgtaaagccgctgtcgcagccgccattgcccgtgccaaagcgaaaaaagccgctcaggttcagcctgaatcggcacccgcgccagaagttcagccggtggtttcggaagaagcggatccgcgtaaagccgctgtcgcagccgccattgcccgtgccaaagcgaaaaaagccgctcaggttcagcctgaatcggcacccacaccagaagttcagcctgcggtttcggaagaagcggacccgcgtaaagccgctgtcgcagcagccattgctcgtgtcaaagcgaagaaagctgctcaagaaaaacaagaaactctaacagaatagtgacatttatcgatgaaatttaggccagtcaacactgacaataacctgttaaaagtcgccagttcgccttttacacacagtaaaaaaaataccagccaaattatgttatgggtggtttttgctgctatacccggtatcgcactacaaacttacttctttggttatggaacactaatccagatcttattggcagttattaccgctctgttggcagaatccactgctatcacattaaaaaaacagctggttattccctacctgaaagataactctgccttagtcaccggattgctgcttgggatcagcctgccaccactggcgccgtggtggctcatcattctgggtactttctccgccattatcattgccaagcatctttatggcggtctgggacaaaacccatttaatccggcaatggttggttatgtggttctgcttatctcatttccggtacaaatgaccagctggatgccccccgcttccttacaggccgttactttgacgccctgggagtgtctgatggtcattttcacaggccatacacctgacggctcgactttgttacaacttttacagggcattgatggattaagtcaggctacgccgctggacaacttcaaaaccggaagactgacacatgatataagtgaagtattacaacagcccatcttgcaagggactctggcaggcattggctggcagtggatcaatgtggcttacctgtttggcggattaattatgctgaaccgcaaaatcattagctggcatattccaaccgcatctattctggtactgggaagctgtgccctgattagctggctgattgatcccggtcgttactcaccgcctttattacagctcttttccggagcaactatgttaggtgcgttttttatcgcaaccgatccggtcagcgcctcaacaacaccgaaaggccgcctgatttacggtgccattattggtttactgatttggattatccgagtttatggtggttacccggatgcagtcgctttcgctgttttactggcaaacatctgtgtacctctgatcgacaattacactcagcctcgcgcttatggtcataaataagggagtgactatgttagaaactatgcgacgtcacggtattactctcgctatttttgccgcctgcacgacagggctaactgcggttgtctattctttaacaaaagacaggattgcagatcaggctgcattacagcataaaatattactggatcaggttgttccacccgctctctatgataacgatatgccaaatgaatgttatctggtaacagcggatgctctgggcagccaacaacctcatcgcctctatctcgcccgtaaaaatggaattcctgttgcggcagcactggaaagcactgctccagatggttattccggcgcaatccaattgttggtcggggctgacttttccggcaaggtgtttggtgttcgtgtgacggaacaccatgaaacaccgggattaggggataaaattgatacccgtatctccaattggatttatgcgtttgccggcaagaaaattacctcacccagcgatccgcactgggcggtgaaaaaagatggcggagaatttgatcagtttaccggagcaaccattaccccacgtgccgtggtcaacgccgttaaacgcacggcaatctatatggaaactattccgacacaactctcttcattaccgacatgtggagccaaataaatgagtgaaaccaagaacgt

SEQ ID NO: 84 - DNA, 12775 bp, Xenorhabdus sp.
tgctctaaagttataaaaattatttgacttcgaccacagtttcctttaaccaataggggtcgaacagaataaaaagacagacaggaaactatgcgagacatcagcccgaaaaatacaattacctcaaaagtaatcactgcaaacacaaccaccacgattaccaccggaactactagttacggtgcgggctgacgcataaaataaaatagtaaaaagcccgtatccaacaagatacgggcttttttttgacccttttttaacagtaagtcaggagagaaataccaatgcgtgtacttaaatttggaggcacttcagtcgcaaactaccagcgcgtactgagtgtggcagatatcgctgaaagtgagctaccccttgggcaggttgctctagtcctttctgcccccgcaaaaatcacgaaccacttagtggcaatggtcgctaagacggttgcagggcaggatattgtttccaacatcagcgatactatccaaatatttactgatttactgtctgggttaaaagagcatcagccaaatttcgattatgaaaacctcaaaacgctcatggaacgtgagtttgctcacctgaaacaaacactgcacggtatttctctgttgaaacagtgcccggatagcattaatgcctccctgatttgctgcggtgaaaaattatccattgcgattatggctgccgtactacaagcccgcgggcataaagtttctgtgatcgatccggttcaaaacttgcttgctcatgggcattacctcgaatccacagttgatattcacgaatcctccaaacgtattgcagccctgaatattccttctgaccatattattctgatggccggttttacggcaggtaatgataatagtgagctcgtcgttctcggacgtaatggttctgattactcagccgcagtgctggccgcctgtttgcgagccgattgctgtgaaatctggactgacgtagatggcgtttatacctgtgatccacgatctgttgccgatgcccgtctgctgaaaagcctgtcatatcaggaagcaatggaactttcctatttcggagcgaaggtgcttcatccccggactattgcccctatcgcccagttccagatcccctgcctgattaaaaatactgtcaatcctgatgcgccgggcacatttatcgggaacgggcaaaaagatgacagcatgcttattaaagggatcactaacctgaatcatatggcgatgattaacgtttcaggtcccggcatgaaaggcatggtaggtatggcagcaagagtctttgctgtgatgtcccgttcaggcatttccgttgtcctgatcactcagtcttcatcagaatacagcatcagtttctgtgtaccgcaaaaagagctgaacagagcacagaaagcactgaccgaagagttttatctggagttaaaagatggtgcgcttgatcctattgatgttatcgataatctcgccattatttctgtcgtgggtgacggaatgcgtacacagcgtggcatctctgcccgtttcttctcggcactgacccgcgccaatatcaatatcattgctctcgcgcaaggctcatcagagcgttccatctccgcagtgattgacaatgataacgcaacaaccgcagtgcggctctgtcatcaaatgttgttcaataccgctcaggtggttgaagtctttgttgttggcgtaggcggtgtcggaaatgccttaatcgaacaaatccgccgccagcagtcatggcttaagcaaaaacacattgatctgcgcgtatgcggaattgccaactcacgggcgatgttaaccgatatgcagggcatcagtctggataactggcagcaggctttgtcagaagccagcgaacctttcagcctgagccgtttaatccggctcgaaaaagagtaccacctcctgaatccggttattgttgattgtacatctaatcagtctatcgctgagcagtattccagcttcctgagtgatggcttcaacgttgttacgccgaacaaaaaagccaacacgctttccatggcctactatcgtgagatccgtcgtgcggctgaaaactcaaaacgtaaattcctgtatgacaccaacgtaggcgcaggcttaccggttatcgaaaatctacagaatttgctgaatgccggtgatgaactggttcagttcaacgggatcctgtcaggctctctgtcttatatcttcggtatgctggatgaaggtatgacactttcgcaagcaaccctgctggcaaaagaaaaaggcttcactgaacctgatcctcgtgacgatctctctggcatggatgttgcgcgtaagctcttaattctggcccgtgaatccggttatgaactggaattggaggatattcacgttgagccggttttacctgcttcgtttgattccaatggtgatgtcactgactttctgcaacgtctgccacagttggatcaggaatttatccgccgggttgcagatgccgcagagcaaggaaaagtgctgcgctatgtcggtattattgaacagggccgctgtatggttaaaatcgctgctgttgatggtaatgatccgctgtataaagttaaaaatggtgaaaacgcactggctttctatacccgttattatcaacctatcccgctggtactgcgcggttacggcgccggaaatgatgtcacggcagcgggtgtttttgctgatatattacgcactttgtcatggaaattgggagtttaatgatggtcagggtttatgcacctgcctctatcggaaacgttggggttgggtttgatgtgctcggtgcggcggtttctccggttgatggctcactacttggcgattgtgtttcagtcaaagccgcagagaagtttacgttaagtaatgaagggaaatttgtcagcaaactgcccggaaaccccaaacacaatattgtttaccaatgttggcaactcttttgccagcgtttgggtaaagaactgcccgtcgccatgacgctggaaaaaaatatgccgataggctccgggctaggttccagtgcctgttcggttgttgctgcactggtcgccttaaatgaatatgccggccatccttttggtcgcgaccagttactggagatgatgggagaactggaaggccgaatttccggcggcgtacactatgacaatgtcgctccctgttatcttggcggcctgcaacttattatggcacaggaagtcatgccgcagggagatgcggtttgccaatccattcccgcttttgaggactggttgtgggtgatggcctaccccggcatcaaagtttctacatcagaagcccgcgccattttgcctgcccactattcgcgcagtgatatcattaatcatggccgttattttgccggatttattcatgcctgccatacccggcaatcccgtttagccgccaacttaatgaaagatattgtcggcgaaccttatcgcacacagcttttacccggttttgctaacgctcgtgaaggagtaaaaaaacggggtgcgctggcatgcagtatttccggctctggcccgacactgtttgcaatttgcaatgaaatggcaatagctgaagaagtcgctcaatggctgcaacaacattacgtacaaaatgatgaaggttttgttcatatttgccgtctggatctcgcaggcgcacgacagatagggtaacaggtagataataatgaaattatataatttaaaagacaatcacgagcaggtcagcttttcacaggccgttaaacaagggttaggaaaacagcaggggttatttttcccacaggatttaccggaattcagtcgtgccgaaattgatgaattattaaaactggattttgtcagccgtagccagcggatactttcagcttttattggtgacgaaatcccggctgaccagctagctgcccgtgttaagaatgcgttccccttcccagcccctgtatcgactgtggaagatgacatcgcttcacttgagctttatcatggcccgacactggcttttaaagactttggcggacgttttatggcccagatcctgactcagattgcaggtgagcaaccggtcactattctaaccgcaacttccggtgataccggggcagcggttgctcatgccttttatggtctgaataacgtgcaggttgtgatcctctatccagaaggaaaaatcagcccgctacaggaaaaactgttctgcacattaggtggcaacatccatctgtcgcgattcaaagtgactttgacgcctgtcaggcattggttaaacagtcatttgatgatgaagaactgaaacaggcactgcatctcaactctgcaaactcgattaatatcagccgtcttttggcgcagatttgctattactttgaagccgtcgcacaaattccggcaggaaaacgtgaccaattggtaatttcagttccaagtggcaatttcggcaacctgaccgcgggcctgctggcaaaatcaatgggattaccggtgaagcgttttatcgcagcgactaacgttaacgacaccgttccccgctatctggcagaaggaaaatggctgctgaatcaaaccattgccaccctttccaacgcaatggatgtcagccagcctaataactggccacgcattgaagaactgttcaaccgtaaaggctgggcactcagcgaactgggcaatggcgttgtcgatgacaaatccacgcaggacaccatgcgagagcttgcagcaaaaggctatatttctgaaccacatgctgcggttgcttatcgcgttctgcgtgatcagttacaggatggtgaatatggtttattcctgggaactgcgcatccggcaaaattcaaggaaagtgtcgaagagacactcggccagacattaccattgccacaagaattagcagaacgagcagatatggaattgttatcccacctcctgcctgctgatttcgctacattacgcgaatttctgatggcaaaagcctcgaaataacctagcatttgtcactccactcattattgtggagtgacactatttatcaatgctactgattatcaatgctgctcggagcgtttaaacaccagctcattctctttagatagagattcatcaaacgcgtatccttccagattaaactccaccagccgtgcaggatcagttaattggttctgaatgataaaccggctcatcaggccgcgggcttttttcgcatagaagctgataactttgtatttgccattcttttcatccagaaagaccggcttaataatccgggctgccagctttttcgtattgacggatttgaaatactcgtcagatgacagattgatcagaacatcatccccctgttgttccagtgctgcattcaggttttccgtgatgcgatccccccagaatttatacaaatccttaccacggggattttccagtttgattcccatttccagacggtaaggctgcatcaggtcaagcggacgcaaaaccccatataatccggataacattcttaaatgagtctgggcaaaatcaaaatcagcatctgagaacgtttctgcctgcatcccggtataaacatcacctttaaaagccaagatcgcctgacgggcattttccggtgtaaaatccggctgccattcaccaaaacgtgcggcattcagccccgccagtttgtcactgatccccatcaaactgctgatttgtgccggcgttaacgtacggcagacatcaattaactgttttgactcctccagtaatgcaggttggctatacttttttgtagcaagcggactttcataatcaagtgttttggccggtgaaatagtaataagcatgattttgttccgaatttttgaatggttattctcaataatcgaggcttttcctctccaatttagcaaaaataaccggaaaaaggggaataacaacgataggattttcctagcttacgagccgagcctgaccatgttattatcacaggatggcgaggcaacaatgccaaagattttacgtataacgatgagatattaaacatgaccgataaactgacttccctgcgtaaactgacaacagttgtagcagataccggggatatcgcggcaatgaaactgtatcagccgcaagatgcaacaactaacccttctctgattttgaacgctgcccagatcccgaaatatcgccaactgattgatgacgccattgaatgggcacgtgctcagagcgattcccgtgaacaacagatcattgatgccggcgataaattggcggttaacatcggtctggaaattctgaaactgatccccggtcgtatttccactgaagttgatgcccgcctctcttatgacaccgaagccagtgtcgcaaaagcaaaacgcctgatcaaactgtacaacgaagcgggcatcagcaatgaccgtattctgatcaaactggcttccacatggcagggtatccgcgctgcggagcaactggaaaaagaaggtatcaactgtaacctgactctgctgttctcttttgctcaggctcgtgcttgtgcggaagcaggtgttttcctgatttctccattcgttggccgtattctggactggtacaaagcaaacagtgataagaaagaattcgcaccaaacgaagatccgggtgtgatttctgtttctgaaatttaccagtactacaaagaacacggctataacaccgttgttatgggtgcaagtttccgtaactccggtgaaattctggaactggctggttgtgaccgtctgactatctctcctgcattgctgaaagagctgtctgaaacagcaggcgaagttgagcataaactcagctatgaaggtgaaatcaagccacgtcctgcggcaatgactgaagctgaattctattgggaacatcatcaggatgcgatggcaaccgaaaaactggcggaaggtatccgtaagtttgctatcgatcagggtaaacttgagagcatgatcgctgacttgctgtagtcctgagcggcacactatacccattggatttcgagttgcatcgcggcggcaagggagagaatccccgggaacatagagaactatgtgactggggtgaacgagcgtagccaacaaagaggcaacttgaaagacgaagtgtatattttttattctttaaaggcgacataacaaccgtgtcgcctttttcactttcactatttttatcatttgctgttaattgaggttcgcatgaatgtattacgcattggcctcgtgtctgtttctgatcgtgcttccaatggtatttatcaggacaaaggtctacctgcattagaagaatggttgggaaaaacggtaacgacgcctttcagtatagaagcccgcctgatccctgatgagcaaatcctgattgaacaaactctgtgcgaattagttgatgaattgggctgccatttagttctgacaacaggtggaacaggtcctgctcgtcgtgatgttaccccggatgcaactctggcagttgctgatcgtgaaatgcccggatttggtgagcagatgcgccaaatcagccttcaatttgtacccaccgcaattttatcccgtcaggtaggcgtgatccgcaatcaggcattaattcttaacttacccgggcagcctaaagctatagcagaaacgctggaagggctgaaagatgatagcggaaaagtcttagtacccggaatttttgccagtgtaccttattgcattcagttgttagatggcccctatatcgaaactaatgaaagcattgtctcagccttcaggcctaaaagtgcccgccgttaagatcttaatgctggctgactgttgttattactcaacttattattgctcaaccagcagaaattatattttgaaaaggttctgaatacatcagaacctttgagaagctgagctggctcaaatcaggctgccaccgcccgtttcaataacctgtttataccaatagaaacttttcttacgacggcgttccagcgttccggttccctgctcattttgatcaacatagatatacccgtaacgcttggaaatctccccttttgaggcactaaccaaatcaatggctccccagctggtgtaacccatgacatccactccatcttcaatggcttccctaacctgcacaagatggtcattaagatagctaatccggtaatcatcctgaattgtgccatcggcttctacggtatctttggctcccagaccattctcaacaataaacagcggcttctggtaacgatcccataataaattcagtaacgttcgcaatccgacaggatctatctgccatccccattctgaactggccagatggggattcgggatcatattcagaatattgccctgctttttctgatagtccgcttcattcccggaagtacacccactcatgtaataactgaatgagataaaatccaccgtgttttgcatctcaagcttatcctgttcagttatcgtgacttcaataccatgttcccggaaataacgcagcatataacccggatatgccccacgaacctgaacatcaccaaaaaacagccatttctgattttgccggagagtagccagcacatcatccggtttacaagtcagtgggtacatcagcccacccagtaacatattgccgatacgggcatcagggataatttcatggcaaagttttaccgcgcgggcactggcaaccaattgatgatgaatggcctgatagatttctgactgtgtgctgtttttcggtaacccgacgccagttagtggctcatgcagtgacatattgatttcattgaatgtcagccacaatttcacttttttctgataacgagtaaaaactgtgcgcgcataacgctcaaagaaatcaattaatttacgatttccccatccaccgtgttttttaaccaacgcccacggcatttcataatgggataacgtaatgactggctgaatcccgtatttcgccatttcatcaaataacctgtcataaaatgccagacctgcttcattggcctgcatttcatcgccctgaggaaaaatccggctccatgcgatggaagtccgcaaacaagtgaatcccatttctgcaaacagagcgatatctccgggataacgatggtaaaaatcgatagcgatatctttaaggtattgtgtactctcagactctcgctcaatgaccggccccataattccctgtggctggacatccgaagtagaaaggccctttccgtcagctaaataagcgccttcaacctgattggcagcaatagcccctccccacagaaaatgtgtcggaaactgtttcatacaaatatcctctcgggttacaaactaattgatcaatagggttttaatgatacttttcactgttaactttcttttgtagaaggcctgagcaaagaattagaagagatcggaagcccgaacagccatgtcagtacagtggaaatgataaaggccagcgctgtgccaatcatcgctccccacaccgtgttattgatgcctgttggtgggatcatctgagtgaaggtaaaaatattcaccagccccgctgaataaattgcgccttggtaataccccaccaccgaaccaccaattgcccccgcgacacagccaaaaataaatggccgtcggtaaggcaaagtcacaccataaaccgcaggttcagtaataccgaacataccggaagtcgcagcagaacccgccagcatttttaatttcgcatcccgcgtacgcaaaaataccccaaaggccgcccctgtttgccctatcactgcgggcagcaacagaggtgttaatgtatcgtgcccgagaaccgccaaattattgatagcaagaggaacgaatccccaatgaaggccgaaaatcacaaaaacctgccagactgcgcccataatcgccccagccagtgcaggagctaccccatataccgcctgataaccaccagccagcaattgactcagccatgtagccattggcccgataaccagaaacaccagtggaacaatcaatatgagacaaataagaggagtgacgaatcccttaatcgtggcagggatgtgatcattcagctttctctccactttacagctaacccaggaagcaaaaataatggggattaccgatgcactgtagttcaggaatgagagcgggatccctatgaaatactcggtagtgcttcccgcacttgttgatgccttaaaggcggagataatcatcggatgaaccaatgctcccccgatggccatcgtaataaaaggattgccgccgaatttcttaccggctgtataaccgagcaatagaggaaaaaagtagaacaaagagtcgctggcagcataccagacgtgataagtcccgctatcaagagacatccatttcagagtaacagcaaccgcaagcagccccttcaaaatacccgccgctgccataacacctaaaaatggggtgaaaataccggatacaacatcaataaactgattaaaaaggctgtcttttttattgttagcggagttcggaagctcagcggtatctgatgtttgctcagcagaagtcagttcttgctgaacagcctgataaacatcaccaacctgattcccgataactacctgaaactggcctccgctttcgataaccgtgataatacctgactgggcttttaacttatcaatgttagccagagcactattccgtaatttaaatcgtagccgggttgcacaatggataaggctgataatgttcccctgaccaccaacatccgcaataatttcctgagctaatagctggtatttcatactattttttccccattcttccatagcgtgttatttttctataccccatggatttcaagatgtaccgtggcagcaactgctcggtcaaaggcagagtccttttagcacaccataagtatagataaactatacttatgaaacgataaccagaatgagtagaatgcagcccacaaaaggacaacttgaaagactatgggtatattgaatggaatacaaagtggtgcgctttattcaggcgaaaaaaaacctgacaacctttccgacacagcaattcaggaaatcattgtcaggacttataccctaaagatctttaagtgaagcaactgacaataacttcaacttaaagaacaacaagtacatctgcgtaaatgtttaaaatagtgataattcaattttaaagcttagtttcttttgtaaatcactcaaatttctcgtcataaaaatgtgacgatgatcgcgatattacggagaactcctcctcggaacatagatagccatatatttataaaaccagtgactggggtgagtgagccagccaacaaagaggcaacttgaaagacgaattatataagcctgattagtcatcactttgcctagtgctcgaaccatcggaaaaactttgatatcatgatattcaatagattcattgaatatcatgatattgggaaccagatgtcaatgtttgataaacaaattcttgttgagattgccgaaatagccaaagtactgggaaatgtccatcgcctgacattacttgagtgcctgatgagttctgagcaatccgtcgaatgcctgtcagagctttccggtctgtctattgcgaacacatcccagcatctgcaacatttaaaacgttcagggatcctgcaatcccgtaaagtcggtaaacatgtgttttatcgtctgggggatggtccggtgatggatatcattaccgctatccagaaatatgctgagtttaatcgggcagaaatgcgcagattgattgatgatatggacaatcaggaagctatttcatgggatgaattgttggatcgaatcaaggaaaagagcaccatattattggatgtcaggccgaaagaagagttcaatcaggggcatttaccgaatgccgtcaatatcccgattgatgaactggagagcagattagatgaactgacttccaactcaaatcttatcgcttactgccgcggcccctactgcgttctttctgccaatgcccttgaattattacgcgccaaaggcattcgtgcccgccactttaaaaaagggttttccggctggaaagatgccgggatggatgttgaaagtatctcttaggttattataggtctgtaaaggcctatctcttatggttttctattctcaaaacacagcgcaatggcacgataacagttctgcgctgtgtgcaaaatcagaataataaaataaatcatattattagaaatagataatgcctatcgtaaatctcatatattgttttcttttataggaagcagtgtgtagattcatatattcaatactatgtttatggatcaatgtgattgaatcagataaaaattaaaggagatctatttcatagatggtaatgtctttctgctatttcaatagaattagatatttattgcataaagggtgttttacatcatcggataatcaatcaggctgttaatattttcaagaattattatgaagcaatgattagcgatttactcccacatcaagttgaaatgaaaagaaaaaatagagcgcacagcctgtaagataaaaatgtaattttgtctgatgacttgtcttttacctaaaaccgaagattaacatctataatattataatgttaccccaccttataaaaactacagattaaataccttttaatattaaattagatttgtttttagctttattagagtctgatagaatcatcagtatacctgctgtttttcaatatgtagtttccttaattacatattgagatccgtaaagtttta

SEQ ID NO: 85 - DNA, 13480 bp, Xenorhabdus sp.
tgtgctctaaagcaatatttggattatctggatcctactatttcatctggttctttcagtgtttcttgaggctctacctcatcttgaactccatcaattggagtatgtttatttgaaagaccggacactaccatcgcactaacagatttttcaactgcctgctttactaatggagtaatggattcaataaatctctgatttagctggcgctctacgttagatctacttgcaacatatctcacgaattcaccatctatatctctcagactagcactaatcgttttcgtaaatgcggataaataaacgctctcttctgcaagagtccttagtgcttctggtttgaatttatcgtgcctaaaacgaaaaagctgacttgcatcggcatcgctcacttcatccattttgatgcgcaaaaatggattaggatccattacgtttttctgttttaaatcagtgaaaaaacgccattctaagccatttgtaattgctgaaatggttacttctggagtggagttaaagtatctggataactgcgggcaatggttatccagtttttcgctgtatccttttgcctcgataaacatcacaggaaccccctgacaaaacaaggcataatcaactcgctcatttgccttaactcccgggaagtcagctccgtactccgctttaactttttgcggatcatacggactaaacccaagaatatctaaaaaaggcaatatcaatgcttgcttagttgtttcttcggtggtgcagtgttgtccaacgtttttaacgtggtcaacatgatgttttatttttatcttaaaattatccattccataacctcagtaagttaaaacttcagaaatctaaaacggaataccaaaacattttaccaataatgttcacttggttttcatcagcaacctcatcttcgtactcatcgcagttataacttcttatgagtatttttccgcctggtcgcctataaagacacttaagtcgtttcaggccatcttgttaaattatatacaatttaccatcaataactatcttgttggagatatcgattcctattacggttacgtccggaataactggttccatgctgtcaccctttgccggaaagcaaataattgtggagacatcactcggtgcgccaatttttcttaatgtagctttaataaatctcaacttaaaaccattatggtccacgccaatacaccttccattgccgcaggctaactcaatatcttttaagaacgggacttctatttcatcgccatctaataacgtttactatcccacggcgcaatgtttgaccactctccttcggacgatacttgacctatatcttttttgcgagtctcgcttgattctttcatgcatcgttttcatgtctcaaatatacaagcgaggcttttattttcatagtaaataaggcgttactttttaaagtagttattgtgtttttttataactattaacgaaaaaggagaatccatatgagtgcattggaagtaatgatcaagaaagctggaggtgttccagcattaactcgaatattgaacatcagggatcaggctaacagtagtaggtggtggattattactgttaattagctggttactttttgtgatgcgtctgggcgttattaaccgaaaagtaattcgctaggtaagaacagtaatcagtaagtcatccgcttaattcacatcacagaccctgtataagaaaaaacccgttatctcaggatagcgggttttatcttttctactttcaggcatactaccatacgttattctcagttcagatggcgataactaaggcgctaataaagctaaacaaataacagccgtaatctgcaatataaaggctattgctagaattctttttcttttcgacgggtttccacaggtacagcaattcaaaattagattcatttattcaatttacttttttaacctacttctcagttttagcacatagtgtaattatttctttacgatatatgtatcgtgaatttgacagctatacatcaatactttaccctgccagtcttattactattttatcaatatattcagagacgaggatcgcgtgaagaatcgcactactggcagtatttttatcgtcgccggaacgacgattggggcaggaatgctcgccatgcctctggctgcggcaggtgtaggttttagtacaacactggtcatgttagttggcctatgggcattgatgagttataccgcactcctgctggtagaagtttatcaatataataaagccaataccgggctgggaactatcgcaaaacgctacttgggtgtcggtggacaggtgttaacagggttcagcatgctatttctgatgtatgctctgacaaccgcctatatcagtggtgccggggagttgctggctgccagtttatctgcctggttagagaaagatatttctgtttctatcgggatcattatattcacactggtcgccggaagtgtcgtctgcattagtacccgatctgttgatttaattaatcgtctgctatttactgctaaagtcatttttctggtgctcgttcttggtgtgatgatgcctcatgttgataaaatcaacctgatatccatgccaatagaaaaagggcttgttctgtcagccattccggtgatttttacttcgttcgggtttcatggcagtgtgccaagtatcgttgcctatatgggaggggatacaaataagctccggaagatattccttatcggcagtgctattccgctaagtgcttatatcctgtggcagttagtgactcttggtgctatttcttccaatacctttgtcgggattctggcacaacagtcaggactgaatggattattgcaggctgtccgagaagttgttgcgtcaccaaaagttgaacttgcagttcatctgtttgctgatctcgcactggcgacatcgtttctgggtgtttctctgggtctgtttgactatcttgctgacctgttaaaacgccgcaattatgccaaagagcgtttgcaaaccggcctgataacttttgtgcctcccatgctttgtgccctgttctaccctaactttgtgatggcgctgaccttcgctgccgttgcgctgtcaattctggctctgttacttccctgcctgctggtttggcgctgccgcaaagaaaatcagggaggatatcgtgtgaaaggtggtaacccggcactcgtccttattttcttatgcggtatttctgttattgctattcaggttggcattgttacaggcatactgcccgagcttggctaatccattactccactgagaaaggcatatccgcatctttacagatgcggataattttagtggaaatatcagaaattcacgcctgcgccaatgtaaaaaccatctgacactttattactgcgatttccgccttttccttttagatcaattacgcgataacccgcttcaacactcagtggtctgaagaggagataacggacaccaccgttagcttctgtataagagtcaatacctgaagtaaaacctgatggagcaccatacgcttcaccatataaggacagtgatggtgttaccgctacgctgaggccaacaccagcagctaatgcagcgccatcttttccgacttttggcgacagatagagagccttaccgccaacactggcggtcagcggaccaacaggcagagcaaaggccagtcccaggctacccaactgaccattatgatcactgcgggcccagtttccgttaagggagaaccccgcatttttatcaccaattcccgcagatgtactggtatagtgctttcctgcctcaacatttacagaaattgcatttgctgtaccagtcataaagagcagactagcagcactgacagcaataaaacctttcatatcgtttccttcttctctaattggtaattgccactacttgttgcaagccattttactggaattcagtaaacgtcataaactataaaattaataaattatctagattaatcaagatatgcaggtaacgtatttttgcagcacccactgtttaacctgctgccgtggaatttttattccatcattctttagctgctcaggcagtaagtaacaggctacaggctgctgaaatggggcaagtttatccgaaagccagctagcaagtgttgttgtaagtttaggtaagtttgtttcgattaccatgacaggccgatgcccaaattcaggatcaggtacaggaacaacaaaactttgctgaatttcaggatgctggttaatgattcgctcgatatcttccggctggataccttctccaccgctgaaaaactgattgtcgagacgcccgagaatacgtagttcatcccgctcaaagacgccccgatcacgggtggaaaaccagccattttcgttaatcagaggctgtaactttccatcagaccaatatcccatcgccatgctgtctgccctaatctgtatctcttcatcctgcaaacggatctcttttcccggcaatggtatccccactcccggtaaaccatctgcacgctttgcacagactgttgaagccatttcagtcaggccataaccacaccagcatcgaatgcccagttttccggcttgttgaacaagctcctgcggtatcattgccccgcccagtaacacatcttttaaagtttgtttatattcatgtggctgagacagccagcgccacaattgcgttggcactaatgaggcatgagtacaaccggataaagccctatccagagaatgcatgttttctaatacaagttctgcgcctttcagcaaccagcgccagagtattccctgacctgaaacatggtataagggcagtgacaataaccagcgatcgtgtgaactgaaatctatacaggaaagaaccccctttgcactggcaaagtgaccttccatagaatgcacaacggccttaggtagcccggaagatcctgaagtcaggatcatactagccgggcgatgcttatcccataaaattaagtcccatgtaacacattttcctgacgtaactgtaaacttagttttccagttgagttttattgcctgaatagccgatgaaggaaaatcggtaaaatcagccacaaatgccatattcagccggggaagtaattccaccagcaatgattcgggaagttgagggttcagtggcagtactcttgccccacattgtagagtcgcaaggtaacagagcaataaatcggtactatttttccctctcaggatcaccccactaccttctgataccccctgttgccggaaacaatctgcaatagtattaatttttgtcgctagctgctgccatgtcaggttttttccatacaacaaggcagcctgtttttccggagcacagacagcccagtgatgccacggccattggttaaacgacgctaatgacattcatggctccatgttatttccagtttgtctgattcaaggcaagggatgtcactgtctggccagcaacgaataagttgtgactggatcagattcagagtatctaatcccgggagtgtatccggcgttaaccagtgtgctagacgggccagttgcgtcagaccaaaactggtttcaatgcttgagcttataaccgcttccaatcctgcctgatgagcttcagtaattaattgacagcaacggtcaatactgccaaccaaagttggcttgatgataatagcagcaacaccggtttcagcttttaccgtgaaaccgtcttcccgaacactttcatcccatgcgatagcaatacctgtttcgcgagcaaaatccagtgactcctcacgggttttacaaggctcttcaatgaaagcaatacgctggcgataatccggattgacatacttggcaaatccatccgctttagtgcgtgtccaactgcgattcgcatccagtcttaaccggagttcaggcacagcctccaacaaaacattcgctaccatgccatcccgtacagcctcgtataaccctactttcaccttcgcaattttctgtccggtcatttctcccagacgcaggatcacatcatcaggatcaccggtgcataatggtactttgcgatagtcagcttcttccggcaattcaccccgcaattcagccagcgcacaactgataccaaatgcaacagaaggtaattcactctgttccggttctttctctgcgcctttttctgcctgacaccagcgcgttaaccacgctactgcggcttgctctgcctgctcaagtgtttcatgactgaattccggtaacggagtaatttctccccagccgtgttcctcattctcctgtatatgaaccagaaaaccatcgcgggttttcaggcgctgatagcgcagaataacacctgcctccatcggcaagctgtagtgataaagaattgctttacgcatcatgggttacgtttgaatttactgaaatcagggtgacgtttttcattgaatgcgttacgcccttcctgcccttcttcagtcatataaaacagcatggtggcattcccggccaactcctgcaaacccgcctgtccatcacaatctgcattcagggcagctttcaggcaacgcagcgccatcgggctgttttccagcatttcacggcaccagagcacggtttctttctccagctcagcataaggaacaacagtattaaccaaccccatatcaagcgcttcctgagcattgtactgacggcacaggaaccagatttcgcgggcttttttctgtccgactatccgggccatataagatgcaccccaaccaccatcaaaagagccgactttagggccggtttgtccaaaaatcgcattatctgcagcaatagtcaggtcgcacatcagatgcaggacatgtccgccaccaatagaatatccggcgaccatagcaacaaccggttttgggcaggtacgaatctgacgctggaaatccagtacattcagatgatgtgttcccatatcatcctgataaccgccgtaatcaccacggatcttctgatcgccgccggcacagaaggctttttctcccattccggtcagaataattgtaccgatgctatcgtcatagcgtgcatctgccagcgcctgaatcatctcttttactgtcagaggacgaaaggcattacgcacttgtgggcgattgattgtgattttagcgataccatcggtagatttatgataaagaatatcttcaaatccattagaacagtcttgccagtcaatcggcgcatataatttttcttcgcatgggtagagcattattaaacgtccttagccaaaaagtgataaaaagtggttcactgcggctgaaaaacccgcaggattactactgtggacattatgtccggactgagaaattatttttaatggcaatgcaaactgctgtgctatgcccttaaatttctgatcatgttcaccgcataaataaagaaaaggcactgccagtttttgtaattccgggatcagatacggctggtgcccaagtgaggtattttccagcatatctgcaatactgttgcccctgttctggctacgaagatgaatgagcctgagacgttgcgccgcaggtaaatctgcaaatacaggctgttgataccaatccgctaaaactgccgctataggttctgaacggaagcgctgtgcccagtttttgtcatgtaataatctggcttcacgttcctcctgagataacagccccgggtttccaccttctaccagaatcccccttaaaccctgcactgcctgagtttgagttgcgtgatacatggcaatccggccacccagtgagtaaccaattaaccaataatcatggatctgatacgcaagtaaggttttgctcagtagcgcattcatctctgcaaggccatctttcgcaaaaacatccacaagcggcatatcggcagaatggccatgaccgggcaaatcaatgaccaaagaaggatactggttgcaggcactgataatgggctgccattcatagccacatcccagcagaccatgcaaccaaaccagccatgggccttgtttgtccgtattgaatgtctgacaggccagcttcataattccgccacttgtttcagtaacgtttgcaggcacatcgcaccttcattatctgtcacatttaattctacgaccgttgcagcattttgcagccatgcctgttcaacggactgttttaactcaggccaactttgtggagcgctataatgcaggccaaacatagcagcggcatggttaaaacggatattttgcggcatacagtaaaactgctggcgtgcttcctgtggtgtaggcagtaatgaaaaaatctgaccgccattattattgacgataatcagtaccatcggtgatgaaacttcccgcaataaagccagactgttcagatcataaagtgccgaaatatcgccgataattgccagcgtgggcttaccggttgcccgttgcactcccgctgaagttgcaattaacccgtcaatgccactggctccgcgattactgtaaaccggataaccgacagggagttgccccagcgcatcaatcagacggacaaccagactattgccgacaaatagttgcccctcttccggtaataactgatacaactgatgggcaaccgcagcctcactgaatttacccgacagtttttcagccacgcattccgatgtcttttctgaccatattttcagttcattcgcccaaaaagcattagggtgatccgcatgtgcagagtgcgcttgtaaccacgccgcgatatcacaggtcaatttgcgtccctgatgattggcaggatcaagccttcccgcaatagaatcgataacccagtattcctctggctgacattccgcctgccactgcaataatctctttcctgtcaggctggagccaaactgaataaccagctcaccttttgccagaatttcctgtgtacgataatgattcagccacaaatcagcacaaggcaaaggctggcctgtctgagacaagacatcaccaattaatggccatcccatgcctcttgcccactgtgcaacaagctgcccctcttcagcactcattcttcctgccagaacaacaccccgtttttgccgccaataatcccagtcagtcactttggttgtcactgtcaccatcgattgccgaagccacggctgatctccctgccaccagtctcccagcgtctgtaaccatgactggtatttatcatcattaccatacaaaggctctgcaaaagggcagttaatatgcaaccctccctgcctgagattagacatcgcattatcaataacagagaccagccagctggctgaaatatcggtggttgggcgcggcaaagtgagtgtttgtgacggatgtgaggcaaaaataccctgctggcgaatagcctgacttgcaccacagtcaatcagctccggaggtctgtctgcagtgagaaataccagccgttctccggttaaacctgcttcaatcagggaaggatagagattggcaactgcggttcctgatgtcacgatgacagcaacgggctccccgctcgcttttgccagccccagcgccagatggcctaaccctctctcatcaaagtgagtatggcagatcagcttaccattctgggcagcagctttctttacaacggaaagtgtcagtggagtagaacgggatccgggagcaatacacacatgacgcaaaccgtggcgggtcagtgcttccagtaaaagttccgcccaacgacggttcagtgcgctgtttgacataggatgttcaagacttatttaaaaagaaaactcattatttaatgaaatgaattatataagatattcgccattctcattcccttaaaaacactttccttgtgatagttcaaagaaatatcattttattgacaatactccatgcatcatttcatgcagctattccatagataaattactgagcaatgagcgtaaccctgctgccttattctcaatttctatccattcctgttcggggtctgagccggaaacaatccctgccccggcatacaatgacaataaagcgccatctatatatgcgcaccgcagcgaaacggcaaattcactctgctcaagccccaaatacccggcagaacctgcataccaaccccggcgaaaaggttcattctcagccaaaaactgccgggcggcttctcgtggcagaccggcaacagcagcggttggttgtaaacgactcaggcaatcactgtccgagacctgatttaaaaaaccattaatatgtctgcgcaggtgttgtactttacgtaaacgaataacatcaggcggagcaacatcaattgcggtcacaccgccctgtaaacgctggcagatatcatccaccacaatcaaattttcatgctggttctttttatcctttaataaccattgccctagctcttttgctttttgatcatcgtcagaatttattgttgttcccgccagagcttcagtaaataactgtaactggtgacggtaatagagccgctcaggcgtggaagcaagaaaggcctgcgtatcactgaaagccagcatgaagtgataacagtgatgattcacctcacggctggccgccataaattgtcctgcctgcaaaggcatatccagcatgagttctgttttgcgggccattaccactttttccatttttttgcgggtaatggcatccagcgcctgctccagcagtgtattccactgctcactttcaggccgatgcgtggtatttaaaatcgttactcgtgatgattgaaatggctggtggggtgcaatttttcggagaaacgcgtaaatattatcgatgtcagcctgcccatcaatattcagatataaataagtggccttatgacagcgacgtatttctattcttggcaagaacagataactttcttcattatctgtattttcttccttttcccacgcgttcaagccccaaatacgcatttgaggaaattgagcatgttgatttaagaaattttctgcctgagtggcatccctgaagaggcggatttgcccacaggcaacaacttcttcttgtccatcacgatgttgccagtaaaattgagggtaatgcggctgagcagccaaccattccagccagtcagtatcatcggttacagaaagaggaaaactgaacgattgaatacccacttcgctaatatttttggcaccgagagtttcgcatacattagcgatgatactggcaatctgatccacaactttcctcactaacaacataataaaaggcaggattatacgaaccagccggaattattaaagcacttattgtttgtatggttgctgctgaggttaatttcgagggaaggtatttaatgttaaattcgctattctttaccgattctctgtgttttttgttcaaaaaaatcgcacacaatatcattcattcaaatggataaaaccatcgataatgcatcatccctcgaagataaaaagattttttattttaaaaataaacaacacaaagcctaaacgccacatttaattataaaaacggatattttttataaaataaccgtcataaaataatatagaccacattcaggaaattgatgaagataaaagtaggaaaaatacagtcacgatttactaaaaacagtaaaacgaatcatcaataaagaatatcaatactgttaataaatatattttatcagctcttaatttaatgaatatatttaattaaaaaacaccataagaaaaatcttaaaataacaacgcattgattttaatattaatttaattattaccaataaatgtaacaatacgatattacttattctaagtgtaattatattttatttattacttttcatgaattacccattgatataaagtcacacaatacgtattatttcgcctcttcaaaaatgaaaaaacaaaaattttctcttaatctaaattcaattttacttcgtctgattctgctgttttctaaataagcagtataaaaggggatgtcgtgctatatctttattttaagccgataggctttcatagatatcggtataaactattatcgttattcatatcactaagttgtctaataacgtcagaagccgcaaaagcggattatgacgagttaatcctgcaagccagaaatggcaataccatccccatgcttgaatatattcgtcaagaagaaaagcggcggaaactttcgtcttctcaagttgctgactggttacaaattgcaggctgggccgggcgagataatgaagtgattgaactttggcaacgctatcattccatggaattacccgccaggggtattgctgccgtggcgcggtcttatcgcaatcagcgccagtggacacagtccgtccaattatggcatctggcttctgtccttgaagagcaaaaccacgatctaaaagcaggcctgattatgacgctggcagatgccaagcgagacagtgaggctcggcggctggcaaaaaggttactggcacaacatcccaatgccgctaattaccgcttaatggcctatgttgatgaagcagccgggcgtacatgggatgccatgcaaatgctctccaccgcccatgagcgtttccccaatgataaaaataccactcacgattatctgttcagtctgaaaaacaaccgtgtcaatagcccggcatggcttttagaacaacaatatgcctcgaaattgcagttatcgccgggccaacaacgcaggctggaagccgatgcagcggctgaattagttcgtcttgccatagtccctaatcgcagtgaaacagagcggtttgatattgctgacagagcacttgtccgttatgagcagatgctaaatgagtggcgtgaacagccagatgcccagcaggattaccgacgtgcccgaattgatcgtcttggggcactactcgcccgtttccggacacaggagcttattgaagaatatttactcctgcaacagccttcatcaacagaagaaaacacagaaataccggattatgcccacaaatgggctgcggcagcctatctgaatcttcgccagccggataaagcaagaaacattctgcgcccgctgagttacccgaacgggaaataccctgataaagaaactccgacttcccatatcactctggaagatgacagcgttcttttttattccgatgtggaaagcgagcacctaaatgaagctcaaaaactcgctgccaatatcaaacaacgtaatgtttatatggtgaatgtatacggttctccaatccgggttcctaatgacggctggctgcaagggcaacaatttctggcggaatcagcacaacttaatgaagatttacctgaggcagaaaaacgttttacgcatttagcccgtacagccccctccaaccaaaaattgcgtctcgatttgggcggaatctggctggatcgaggctggcctcgtcgggcagaaagtgagttaaaacaagctgaagggctcgatcaccgtaatttatcactggaaa

SEQ ID NO: 86 - DNA, 12019 bp, Xenorhabdus sp.
tttcacatcaggccaccgttccctgacctgtttagccaccgtcggtaaattgccttcatcaatcgcagccagtacccagccctcatacaattgactcaccgttaaggcggttgcatagccctccgtaatgatgattgtgtctggtattccgattacaggtgataaggggataacactcccctttttttgagtaccagcgacaagacgtttttcacccttcggattgataatttgcgcaccggtgattgtgccgtccagcgtctgagtgaccagcaacaacgaaccgtcattcagcagtctctgattggggcatggcagcccctttctggtcagataatcagattgcccggtagtagcctgagccaccagcttgttcactttctcagttatcagaagagcctctgattttggcgcctcctttctggcaggctggggttcaggtaatggaagtaacaaagcatcagcaacgattttaatagcctcagtgagcgtaattcctttgactttagtcagtaaatcaaagccatcgccatgatgcgggttatcacactggcgacaatgccagttgccgtctccgtggtcgtctatgaagtgaaaacggtcattcccgccgcagatggggcaagcaccatgcttaccctttgctggaacgtccaccccacaggcagacaataaaccttgccactgattttgcgctgccgctttcaccgaacgaatatcaacatgacttaccatttcgggaatccctcgcggtgatggagttcaaactgagcgttttgttccgtatcgttcagcgcttcggcgatccttggtaaatacatcaatgcttcaccgatacggcgtaaatcttcccttgcctgacgattgtcatagttttcgttatcaactgaccagaacgccatctcccccattgccgacatggccgccatcacgctgctcaatgccccttcggagtttttacgcagatctttgagttcttcggtgctcatggcgtcgaaattagtacgtaccaaatggttatagatatcagacataatcaggctctccctgcgtaggtgtattcgttagtgaaacggcttaatggcatgatgatcgggctttgataaccctcacggacaaaggtcacacgattaaaggcgactgacagcacctgtacggtttccccgtttttgtgagcgtaatagtcatggggttcagggttgcgcatggttcaccccctgaacagtagacatatcgctatagttgaaaggggtattgataccgatattccatgactgacgggaaacgaatatcagggaagagataccagccagtagacgggcttcaccttcgctgtctgccagtaccgtgataaggcgcaccggatgaatatgcaccagccgctgagtgccggatataattaggaatgtaaatttaaggcgagtttggttagactgtgtatcagccatagcattagctccgataatgttgtggtcagacgcctcgacagtgttagcgcacttcggggcgttgctatttgtatcacctgaataaagcatggtgtcagccaccatcgtatttttaagtgtcagccacgtcaattcttttttataaaaattttttgcgtatactgtcagccaccaactactaatggatgcagatatggcaacgaaagcagtaaacgcaaagtcaaaaaaattagaagcccgtgtaccgcatgagcttgttgattcaatggaaaatcttaaagaagaaggcgaaagcactgcgcaattcataatttcggctatgtcgagtgaaatcaaacgccgccaacgtaaagccaaagtatcatctgagtaagaatcatcaattaaccctcttaaagagggttgtctctcaaattgatggttattaagtatcaaagaatttctataactaatatctaccatcacgccaattattcccgaaattaagctgcttttagggtgaatttgaccgctgccaattaaggcagttagttttttatgacgttattatttaattggtagatttgcggctatatgggttattcacgttttctactgtgggcggattacgtacccaatgcagcagatcgctaagcaaccaagcacacgaattgcggcctagtggtttacgggcagggaagcggccttcattttccaatttccatgctgacgttctggaaatagaggtgatgtgctgacgttctttttcacggataagacgatcataaggttcgccatattaggaaagggtagagcggcgttcttctggtgtaggagtactgtattgcatgattatgttaccctcactgtttaattgtttttgtgagggtattttacttaatagaaattattacgaaagaaagccacatttgttacgtatatatcacaatgatcatgttcatcatcaagctcattagttcccactattgagctgcttttaatataaccacgttattgtgattagccgccaatagatctagcctttcgcaccattggtttaaagcaactcgtttctctggtaggtattggctcttgttgtatatcgccatgacgcccggcaaaatatggcctaaaagttgatcaacaatatgtggggctactttcatatcatttaattttgtggaaaaagtgcgccttaaatcatgcagagaccatttatctacatggcctaatcttctccatatcttcgttccatactcagatactgtttcggtgcttttaaattcccctaataggtaatcatttttattattttgataaacaaggttttctaagaatgatttcatgtgctcagatatcggacgaataattctttcacctgtcttgctattttcttttgggacagtccatagcatagaattcaaattccattctgaacatttagataatctgatctctctcgtccggcaaccaaatacaatcaaaattttcaataaattattataatagggcaggtagcttcctgatcttatagattcccataattgaccaagttcattatcttctaaataacgctggcctttagtttgtttttttccgacatcagaaatagtcaaatcatccaatacatggctaattgcatatcttcttacacggcaaaattttagagcttgtttgcataattgaagcatcccgccagcagccaccggcgcttcctttttcattttatcaaagcattgtagccaatatgttatttcacagtcagataatgccatttcaccaatatagagataaatatgcttttctaattggcgaatgagggcatcaatattggctcgattgtctctgccatagtgttcaatccaatactcaatggcgtcttttacggtgactggttttaatgattcctgcatcgttaaattaaattgcagctttggatctttaccggatgccaaccagttacggcatttatcccgcgtttcacgcgcttgcttgaggggcatatcaggatagcgcccaatggtgagacgatttaacttttttccatcaagtcggtaggtaaagacccagctaataccaccaactttagatgcttttgcactcaatccagcgccatcggcaaaaaattcaattttattcctttcttttccgtgtagggttttaagttttttatcactgagcttgtttaattcgccagccatgttcattaaagatatttatataattgtttatacacagtgtgctgcaagagaggtaaaacgtcaataagcactggaacaatatacaggtaggtaaataattaatcatttgattttaaaataaaaacaataatcatagacaaacatcgaaacattaaactaatatatattagctatattcatttctgctttcattctggttagtttatggctataggcagtatacctgttagtatcaatgaacgcattttcatattgattccgaaatgaaagtagtgattattgacattaaactgattgcttattaaacaggctggctaacgatggaaattagggtatttcggcaagaagattttgaagccgctatcacactttgggagcgttgtgatctgattaatcccggtgatgatccggaactcgatattgagcgtaaattaactcatgatgctgatttatttctggttgccgaagtggcaggagaagttgttgggacggtaatgggtggctacgatgggcatcgtggtcatgtttattatttaggtgttcaccccgaatacagagggagaggtattgctaatgcattggtttcccgtcttgagaaaaaattattagcgagaggttgccctagtattctaattatggtcccagaagagaatgatgccaccatttgtatgtgtgaaaaaatggaatatgattattggggacaggaacatactgtctttaataagcgtctgattattgattgaatatttaaggtaaatggctgagaaatattatgttgttcggccatgagctgtacctttatataaaaaactcaataatttcctcgctgttttttttatcacatgatgaagtttgaatttatatttactttctgtaaggagattttttgatattaaatagtttttacgttcaatttctggcgtaatcaaaatctgaatttttccattgctatctttaaggaaataataatgatatttaattggtaattcaggtttgtttattaagatacgccagttgattaaaggaagattgcagactttactctccttaatattcccgggagtcttttcattttcctgaattataatgtctttttttatatcatttgtcagatatagcatttgaggtattgctgtttttgtcatatcccttgttgttacaaaattgtttgttacagtagggatatccagaaaatcaataaatgttgggatcattgccgccaccacgcactttcaccattggtttatatttattccataatccgatatgatatctatctatttgtaaataattgctcaatggacttataaaactgtatttttatctgtctttttatatgcctctgtattaaggcagttattcattcttaacttgctgtttttgaatgatatcaataataagatgttaggatagacaaaggtaatgaattgtaatgaaaagatattttttatttagcctgttatttaaaaaaagaattatggcgttcagtggcctgataggtggttcattgttattaactgcctgtgcaggaacatccgggctttcatggtcttccctgtctcctttaaattggtttagccgtactctggaggtatctgaacagggggtaggggaaatcaataaacaaacagatatgaacttatctgccattcagcaggggttggataacagatatcgcctgcgcagtggtatggagatgaaaaatggcaaatttttcagtgtaatacagggtatagagggagatcaggtcaggattgaattatcgggtctgaataatggaaaggtggcccatattatcattctggatgaagggattaagaccgcttggggaacaaaaataggtacatctttctctacgctgtatgacaaagcttatggtgcctgccagcgttccgacgacataataactatgcagcaggagattgtctgtattgctccccaaagccgaaatatcagttacgtatttacgggaatatggaatggttcggaagagttgctgcctcctgatgatgtgctgaaaacatggaaaatttcccgcattatctggaaagctaactaaaagatatatctaataaatttcaaattattgtggcggcaagggagcgctgccaataaagaggtaatttgaacgatggaggttatgcaggaagtattttaatcaagtcaatattccggtcgacaaaatcagctccagtatgtcaggtgtcaattcccccagccctcagttaataaccctttattttttatagcttatctcgtttcatcatttctcataaaaattcggtatataaaacaggtggtagttaactatcctgttataaatattctggatacagtatggataaattattgttaaaaacagtcgataaaaaattcttgctgaatagcttgatgggtaaggtttgaatgaagcttgtggtcgagttactgggtaattctgataaaaatttacttcaacactggcaatgtgtgggagcaactttgagaaatgggtgccaataatgtttgttgcatccagtaaacgagtattacccggatttgggctgagtctgggttgtagcctgctttatacttgcctgatcctgctattgccgctaagcgcattagtcatacaactttccagcatgacatgggaacaatattggcaggtcattgcgaatccacaggttgtcgcagcttatcaggtgactttattggcggctgctgtcgccagcttattcaatatgttttttggaatgctaatggcgtggatacttacccgctatcgttttccggggcgcaatttgcttgatggattaatggatttaccctttgcattaccaacagcagtcgctggactaactctggcaactctgttttctacaaccggatggtatggttcttggcttgctcattttgatattagagtcgccaatagctggctggggattgcggttgcgatggcatttaccagcctgccttttgttgttcgtaccgttcagccggtactcgaagaattaggccctgaatatgaagaagctgctcagacattaggagcgagtcgctggcagacttttcggcgggttattttgcaggaagtctctcctgcattagtggcaggcacagtgctctccttcactcgtagtctgggagaattcggcgcagttatttttattgcgggtaatattgcgtggcagactgaagtggcttccctgatgattttcgtccgcttgcaggagtttgattatcccgctgccagcgcgattgcttcagttattcttgcggtatcactgttattgctgtttagcgttaacttattacaaagtcgctttggtaagcggattggggggcgttagtggctgatttttctgaatacacgcagatgatgcgtccctcaataaactggggaaaatggttcctgattggggtgggaatggttatttccatcctgtttctggtcattccaatagcgtggatttttctgactgctttttcacagggaatcgatattctcgcccagaaccttgttgactccgatatgctccatgctatctggctgactgtgttgatcgcgcttattacagttcctattaatctgttttttggagtagtcactgcatggctggtaacccgcttccaatttcccggcagacaattgttgctgacattaattgatattccattcgccgtttcacctgttgtggctgggttgctttatctgctgttttacggtgctaacggttgggtgggggaatggctgggagactatgacatccagctaatgttttcatggccgggtatggttctggtcacggtatttgttacatgcccattcgttgtccgtgaattggtgccggtcatgctgagtcagggtagtcaggaggatgaagcggcaatattactaggggcttctggctggcaaatgttctggcgtgtgacattaccgaatattcgttgggcattgctgtatggcattgttttaactaatgcccgggcaattggtgaatttggtgcggtatctgtggtatccggcgcaatcagaggggaaacatacactttacctttgcaggttgaactgctttatcaggattacaacactgttggcgcatttgtggcggcagctttactggcagttatggcgattattaccctgattgtcaaaagtgccttgcagtggcgtttgagtcatttgaatcgccagtaaatgaaggtcgggagcaggatatgagtattgaaatcagcaaaatcagtaaatcttttggtcgtgttcagatactgaatgatatatcactgaatattgaatctggtgaaatggttgctttgcttggcccatctggctccggcaagacgactttactgaggattattgccggacttgaacagcagagtgcggggcaacttaagtttcacggtaaggatgtcagtcaggtacatgcaaaagatcggcaagttggttttgtttttcagcattatgctctgtttcgtcatatgagcgtgtttgataacgttgcttttggtctaactgtacttccccggcgccagcgacctgagcgagaggcgctgcgccgcaaggtcatgtcgttacttgatatggtgcaattatcccaccttgccgatcgctatccgtcacagctttctggtggccagaagcagcgagtggctttggcaagggcattggctgttgaacctcagatcctcttactggatgagccatttggtgctctggatgcacaggttcgaatggaattacgccgttggttacgccagcttcatgaagaattgcaatttaccagtgtgtttgtcacacatgatcaggaagaggcaatggaagttgctgatcggatcgtagtgatgaatcaaggggctatcgagcaggttggcacgccacagcaggtatggaaagagccggaaagccgttttgtgatggaattcatgggcgaagtgaatcagttacatggtgagattaaaggctctcagttgtgggttggcggaaaaacttttccattggaagtggcaccattgcatcagggaagtgttgatgtattcctgcgcccgtgggagatgaacctcagtaaacaacaaacatcatcctgccctttgcctgttaaagtgacggaagttaatccacgagggcatttttcactgttgtctgtccagcctgttggttggggagaggagagtttatcggttatctggtcggatagttcatcaattccagttcgtggcagccagtattttatgggaggcaaaggtgcccgcctgtatgaaggagattcaccattaaaagtattaaaactcgctgaatctgcataattttccattattctcaaaccctgggtttcccctgctttctacaagaaaacaggggttttttatttagagcttgcgacagttttctgaatacgattattctgttgcctattctcatatgtgattcaggtaatgcagtggcaagcttagaaaattttatcggtaatactccgttggtaaaattacaacgggttactgaaagtattgatgcagaaatttgggtgaaacttgagggcaataatcctgctggctctgtaaaagacagggccgctctctcaatgatccaacaagccgaactacggggagaaatttcaccgggggatgtcctgattgaagccacgagtggtaatacgggcattgcattggcgatgattgcagcagtaaaaggttatcggcttaagctactgatgcctgaaaatatgagccttgagcgtcaggcatcaatgcgggcttatggcgctgaattaattttagttagtaaagagctgggtatggaaggtgccagagatttagcacagcaaatggagctgaatggcgaaggaaaggtgcttgatcaatttaataatacagataattcgctggcacacttcaagacaacagggccggaaatttggcagcaaacgcaagggcgtattacccattttgtctccagtatgggcacaaccggcactattaccggagtgagccgttacctgaaatttcagtcggataatatacaaaccataggcttacagccggcagaaaacagccatattcccggtattcggcgctggtcaccagcatatatgcccggaatttaccaaaaagatctggtggatcaaatactggatattactcagagtgaggcggaaacgatgatgcggttgctggcacagaaagagggaattttctgtggggttagctccggcggagccgtttccggagcgttacgtattgcggctgaaaatccgggagccgttattgcggtaattatttgtgatcgcggcgatagatatttatctacaggcgtttttaattaacttttttatttactgaatctaacttagtgagtaaaggctatgtcctttttttcaaaaacgatcactgactattggcagtcttcattattaaatggagaaattatttatagtgatgatgttcttactgtcgctattaatgcaagactggcagaggaggagcgtgtgatggtgctggaaattattgatggtcaagttatatcagtgatgactccagcactggctgaaaaagcagggctttatcatcaggacgaaatgactgaatccacttttcgccagaaattacatgaagcagctattactctccatggcgcagattatattttttatttttcagaagaagaaaagaaaaaattattgcaggaaaatattggtagtacgttacgtcagctaatggaaaaagaagatggagaggttttcttaacgtttcagtctgctgcttctgaggaggatttggataatgcttatgttgagctggaacactgggctgtgttcggctcttttgaacaagacgatctgatttgtgctgccagtatgtacccgtgggacgatgcgcttattgctgatatgggggttctgactttagaacctttcagaggaaagggccatgccagacaagttgtacgtgcaatcagtaaacatgcttatgttcagggatatgagcctcaatatcgatgtcagattgataattttgcatcttcggcattggcaaagtctgtgggattgacgctgtttggcaaatgggaaatggtttctcctgattcaattaactaataaagaaatcgcctctgttttatcatttaacccgataaaacagaggcgacccacaacagcttaccagtgatgtattcagctacttcttaattcgcatgataacagattcaccaacgaccactgatccactgactttagataattctttgatttcatccatgttagagataacaacaggagttaaggttgacttggctctttcttccaggaatgctaaatcaaactctaaaaccaaatcacctttctgtacccgctggccctcttcggcaatccgtttaaagccttcacctttcagttcaacggtatcaataccgaagtgaacgaaaagctctatcccgttatcagattcgatggaaaaagcgtgattagtttcgaagattttaccaatggtgccatcaacaggggagacaatcttattacctgtaggcttgatagcgataccatcacctacaattttctccgcaaaaacaacatccggaacatcttcgatattaactatctcacctgataatggggcgataatttcaatactgccgctgttctttttatcatctgaaactaatgatttcagtttatcaagcagacccataaatcttctcctaattgttttaatgggaccgtgtactggctaaggtgctgtcttggtcaattaacttagcagagtgttttttctctgataaaagtatcaaccaattccatcaactcctgtgcagttggctgagttaaagcttgttctgctagcgcttttgcatcaccgtaattcgcattacgaatgattttcttgatgcctggaatggatattgcactcatactaaattcatccagccccatgcccagaagcaatagtgtagcacgctcatctccagccagctcaccgcacatgcccgtccatttaccctctgcgtgtgaggcgtcaatcacctgtttgatcaggttcaacactgctggtgacattggattatagagatgagaaatcagctcattaccacggtctaccgcaagagtatactgagttagatcgtttgtcccaatactaaaaaagtcaacttcttttgcaagatgtttagcaatggttgcagcagcaggcgtttctaccatgatgccgacttcaatcgactcatcgaacgccttattttcattacgtagctgatctttaagcatcaacagctctgttttcagttcccgaatttcttcaacagaaataatcattgggaacatgattcggagtttaccaaatgcagaagctcgcagaatagcacgtaactgagaatgtaatatttctttgcgatccaggcaaatacggagtctttag

SEQ ID NO: 87 - DNA, 13159 bp, Xenorhabdus sp.
cgtgctctaaagttataattgggtaagctttaatgaaaacttttacagctaaaccagaaaccgtaaaacgcgactggtatgttgttgacgcagatggcaaaactctgggccgtcttgcaactgaaatagctcgtcgcctgcgcggcaagcacaaggcggaatatactccgcacgttgatactggtgattacatcattattgttaacgcagagaaagttgctgtaactggcaacaaacgtgctgacaaaatctattatcaccacactggccacatcggtggtatcaagcaagcgacctttgaagagatgattgcccgccgtcctgagcgtgtcattgaaatcgcggttaaaggcatgctgccaaaagggcctctgggtcgtgcaatgtaccgtaaaatgaaagtttatgcgggcagcgagcacaaccacgcggcacagcaaccacaagttctggacatttaatcgggattataggcaatggctgaaaatcaatactacggcactggtcgccgcaaaagctcatccgctcgtgtcttcattaagccaggtagcggtaacatcgtcatcaaccaacgcagccccgaagattacttcggtcgggaaactgcgcgcatggttgttcgtcagccacttgagctggttgacatgctgggcaaactggatctgtacatcactgttaaaggtggtggtatctctggtcaggcaggcgcaatccgtcacggtatcacccgtgcactgatggcttatgacgagactctgcgttctgatcttcgcaaagctggcttcgttactcgcgatgctcgtgaagttgaacgtaaaaaagtgggtctgcgcaaagcacgtcgtcgtccacagttctccaagcgttaattttttgtcactacggtggcattggattaatgttgaaacccgccatgtttatggcgggttttttattgcggagttttatttccttagtgaatacgctttttttgcagaaaaaaagagcatattgcagagataattccctgaactccgatatatcatcattaattctcaatctacttccccacaaaatgttcaaaatctggtagactagtgacaattttttgccttatccatgcgtttgcctgacttgtcttaataatcctcggataataagtgcgaaaccggatgagaatatgagcgagaatagccattgttcattgaagggctgttcgttcctttttttagataaacttggaggttttcatggctgtcgctgccaacaaacgttcggtaatgactctgttttccggcccgaccgacatttttagccatcaagtgcgaattgtactggcggaaaaaggggtcagcgttgagatagaacacgttgaagcaggcaatttgcctcaggatctgattgatctgaacccttatcaaacggttcctaccctcatagatcgtgagctgactctttatgattctcgcatcataatggaatatctggatgagcgtttcccccatccaccgctcatgcctgtataccctgttgcacgtggctccagtcgtctgatgatgcaccgaattgaaaaagactggtattccctgatgtataaaattcaggaaggaagtgctcaggaagctaatgctgcgcggaaacgccttgctgaagagttgctggcaatcgcaccgattttcagagaaatgcctttcttcatgagtgatgagttcagtctggttgactgctatctttctccgttgttatggcgtttgcctgtgctgggcgttgagctgtctggcccgggagccaaagatcttcaggtttatatgcagcgtgtatttgagcgtgacgcatttctggcttcattgacagaagcagagcgtgaaatacgtttacagtcacggggttaatgtatggatatgactcaaatgtctccccgccgcccttatttactgcgggcacactatgagtggctgctggataatgatttgactccgcatatcgttgtggatgtgactcaatatggtgtcaacgtcccgatggaatatgcgcagaatgggcagataatcctgaatattgctccacgggcggttggtaatctggaattggctgatgacgaagttcgttttaatgcccgttttggtggtgtcgcgcgtcaggtatctgttcctatgtctgctgtcattgcggtttatgcccgtgaaaacggtgcagggatgatgtttgagccagaaatcgcctatgaaacagactccgagttggagatttcagagtctccggtagccgataatctggtattgattcgtgatatgaaaacatctcatgatgataacccgccggatgatgagccacctcagcctccaaaaggtcgtccaacgttacgtgttgtaaaataaagcgttataaacgtaatacgaaaaaatagaggagaaattctctcctctattttttataaaaatgcaacataagacttatttaacgcgaactgacacaattctatattttcttcatcttttctgcttgctgatgttttggctttctttaaacttacagttacatcccgaacaaatttttctttgctttgtgttcctattagtgttgatgggatattgcagatgttattgattgacgatggctggtatttatctgccatcgctaaaacttcaatcggattattaattaaagcaaaggataatgaattaaagatctggttggaaaaatcgtggtggatgttaggaactaattgaaaagcgacttctaaccactcagtctctccggtagtaataaagtcagctatttcttctctttttcttctctcacctatctcagcaacaacagaatttacacccctctccttcacctgttgaataatttcttttggtgtagataaaccggcgacagaaggtgaactaatcaagaatatgaaagagagcagggatattttagttagtaaacgcatttatctctcccaattattatatccatatttttcaatttacggctttgcttgctgcacgttgaaatccacagggtatatcatgtaatgaatttttaattggttattatttaatgttgtgatatgcattttacttaaaagtgggaggggcaaatctgtaatttacgtatgaaatattatcttatttcactcataccctattttctgaaatatctctttaagaaaaatttttatatgttgaattggaaattagcttttaaagaagtgagaaattatttgaagtgatttctttttctaaaacagtaagaatgatcaggattgaaactaaactcagcttcaatcactcttatgtggcggggatagaaaaatggactaaccagttagaagtatattaaaaatatcttggatatacttggttcaacttcaaaatacacctttctatattttctttatcttttctttttgcggatttttcagcgttctttaaacttgcaactatgcctttgataagtttatgcttgtttttctctgctataactgtcaatgaaagatcacagatgctatttgttaagttaggtctgtatttgttggcctgagctaagacttcaaccgggttattgagcagagcaagtgccaaggagtcaaagatctgattggagaattcccgatgggtattgggcgtcaaccgaaaggcaacttctaaccattcaggatctccggtagcaataagtttagcaatttcatttcttttatttctttcacctatttcagcaacagtggaattcactcccctttcggtaatttgctgaataatctcctttggcgtggataaaccggcgatagaaggaaaactaatcaagagtacgaaagaaaacagggatgttttagttaataaacgcatttatttctctctattattatatcttccggatttcaatcgagcgctttaccttctgcacccagaaatcctgttcaattaattattatgtaatcggtttgagatggcagatgttaaatctgttgtttttgtaataaacggaattttatttcatggctacactgtattcctgatgttttttttaggaaaaatatttatttggtaattttcaggatattaaatttaaatatttgtttttgggatataggaataatcgcataatgtaaaaaaacataatcattatggtagtaaaaagataatgatgcgagtgtcgattatttggcaggagtttctccggccaaaagaccggagaagagttcgggagaaaatgaaatcagacttcaaggtagtcgagaataccagaggcagcttttctgccttcagcaatggcagtaacgactaagtctgagcctcgaacagcatccccgcccgcgaagattttagggttactggtctggaagggtaaaatactggattcgggagcgataatgcgcccttgtctgtcaagattgatctgatggtcatccagccatgtcatagaatgtggcttgaaaccaaatgccataattacggcatcggcgttaatgacaaactcagaatcggggatgagttccgcctgacgacgtccttttgtatccatttcacctaattgcgtccgagccattctgaccccattaacatgcccattatgattgatttcaacgctgataggctgaaggttgaactggaaatcgacgccttcttcccgggcgttcttcacttcgcggcgggagccaggcatattctcttcatcccgtcggtaggcgcaaatcacatgacttgctccctgacgaaccgcagtacgtacgcagtccatcgcagtatcaccaccacctaaaaccagaacccgcttacctttcatatcaatatagggctgttctggtgattcttcatagcccattaactggcgagtgttggcaatgagaaagggcagggcatcatatactccgctggcattttcattttccagaccggcatgaatagactgataagttccgactcccaaaaaaacggcatcaaattgctttgtgagctcagcaagatcaacatctttacctacctccgtgttcaagcagaactcgatacccattccggcgaaaatttcacggcgacggctcatcacttctttttccagtttgaatgccgggatcccaaacgtcagtaaaccgccaatttcaggatgacgatcataaacgacagcctgtaccccattgcgggccagtacatcagcacaggccagtccggccgggcctgctccaatgacagccacccgtttaccggtcgggagcacctgtgacatatcaggtgtccagcccattgcaatggcggtatcattgatatagcgctcaatattgccgatggtcacagcgccaaaatcgtcattcagcgtacaggcaccttcacacagacgatcctgcggacaaacccgcccacagacttccggcaggctgttggtctgatgagatagctccgcggcttcaataatgcgtccttcattggctaatttcagccagttcggaatatagttatgtaccgggcatttccactcacagtagggattaccgcagtcaaggcatcgatctgcctgagcttctgcctgaatttcagaaaaaggttcataaatctccacaaattctattttgcggactttcagcgcttttttcggaggatcgacacgctgtagatcgataaactgataaacattctgactcattcctgactcctactgtgcctgaacccgtaattctgcgctggaacggctgcgatgccccaacagcgcgctgacatcactggatttaggcttaaccagtgcgaatttattgacccactgtgaccagttttccagaatgctttcaccatgcggggagctggtcagacgaacgtgttcagtgattaatccgcgcagatgttctttatgaatggcaagggtatcgattgagagaacttcgactaattctggattaacccgtttgcggaagtcatcggattcatcgagaacataagcgaatcctccggtcatgcctgcgccgaagttaacgccagtatcacctaatacgcagactatcccgccggtcatatattcacagccattatcgccgataccttcaaccacagtgatggagcctcaatttcatacggcagagcgctcaccggcacgacccgctgcaaagatttttccgccggttgccccataaaggcaggtattgccaataatagttgcttcattacttttgaatgctgaaccacccgtaggcaggatcacaattcttccaccagccatacccttgccgacgtaatcattggcatcgccggtgagtgtcagttcaaccccgccagcattccagacgccaaaactttgcccggctgttcctgaaaaatgcagttttatgggattacccgccagcccctgatcaccgtgcatggttgctatgatgccggataatgctgcaccgacagaacggtctgtattctggatatcgaaatagaatgacttactctgcgatttttctacgtaaggcagagcctgtttaacaatcgctttattcagaattcccggatcaaaagacggattatcttctgtacagtgttgctccttgccttcgtggggctgcacggtttccagcagaggtttaagattgagtttactttgtttggcagagataccttccagtatttcaagtaagtctgtgcggccaatgagatctgttagcttccggactcccagttgcgccagaatttcacgcgtttcctgcgcaataaagtggaagtaattaatcactcgttccggtagcccgtgataatgggactggcgcagtttctcatcctgtgttgctactccggtagcacaattattgaggtggcagatcctaagatatttacagccgagggcgaccatcggccctgtgccaaagccaaaactttccgcacctaaaatggcagccttaataatatcgacaccggtttttaacccgccatcaacctgaagacggattttatggcgcaggccatttgcaaccagagcctgctgggtttctaccagaccaagttcccagggacagccggcatatttaactgaggagagaggacttgctcctgttccgccgtcataaccggcgatagtgataagatctgcataggctttcgcgactccggtggcaatcgttcccactcccggctcggaaaccagcttaacggaaatcagtgcgttggggttgatctgtttcaggtcgaaaattagctgagctaaatcttcgatagaataaatatcatgatgcggcggtggtgaaataagtgtcacaccggggattgagtaacgtagtctggctatataaggcgtgaccttatctcccggtaattgcccgccttctccgggttttgctccctgagcaattttaatctgaatcacatcggcactacttaggtaagccggtgtaacaccaaagcgtccggaggcaacttgcttaatgcgggagacttttttcgtgccataacgggcaggatcttctccgccttcccctgaattggagtaaccacccagtgtattcattgcttcagccagcgcctcatgagcctcgggactcagagctccaattgacattgcggcggtatcaaaacgcttaaacagttcttctgcgggttcgacgtcttcaatgggaacgggttcaccttttggtgagatagccagtaaatcgcgcagtgtcgttaccgggcgtccattaacgagttgtgaatatttttggtagtcgctgtaattaccgctgtgaacagccgcctgcaacgtactaacaacatcagggttatacgcgtgatattctccatcgtggacatatttcagcaaccctccctgctcgatagtatggcggtggagccaagcccgtttggagagattatgcagatcctgctcaaaatcactgaaatcagccccttcaatacggctgacaacaccattgaagcaaatatctgtgacttcggaatgcaaaccgacggcttcaaacaatttagagcaacgataggaggatattgtggaaatccccattttggacatgatcttatatagccctttattgatgccattacgataattcagcatcacgcgggcgtatggggtcgtgagcgtgccgtcatcgatcattttgcctaaggattcgtacgccagataagggtaaacagcggtagccccaaatccaagcagcacagcaaagtggtgaggatcgcgggcactggccgtttcgactatcaggttggcatcgcaacgcaggcttttttccaccagacaatgctggatagccccaacagccatgggggcagggatcggtaatttttcaggagaaatatggcggtcagacaacaccagcaagacggcaccatcacggacaagtttttcggcctgttcgcacagggctgagacggcatttttgagagtgatctcctgtggattaaaggttaactccagtgtttctgcccggtaataagattcctgctgctgtgtcagttgcacaaaatcaggataaagaagtaccggtgattcaaaactcaggcggtgagcctgaccttctgcctcacaaaagacattcatttccctgccgatgcgggtggagagcgacatgacatgggcttcacgcagcggatcaataggagggttggttacctgagcaaactgctggcggaaatagtcatagataatacgcgggcgactggaaaggacggcgaacggcgtgtcatcgcccattgatccggttgcctcctgaccattctcaccgagtacgcggataacctgatccagctcttcattactgtaagcaaactgtttgtgataggttgccagcatacgatcatccaaatctcgtttgccaacctgcgcttccggtaatttttcgaatggtgtcaggtgcctgacatttttctccagccactctttataaggatgacggttttttaaatcgttatctgtttccgcagagtgcagaatccggccttttcgggtgtcgatcaccattaattcgcccggcccgacccttcctttctctacgacttcatcgggctgataatcccatattcccacttctgaagcgcaggtaatcagtttatccttggtaatcacataacgggccggacgtaatccattgcggtcaaggttacaagctgcgtaacgcccgtcagaaataacaataccggcagggccgtcccacggctccatatgcatggaattaaaatcaaaaaaggcgcgaagatcatcatccatatctgggttgttctgccatgctggcgggacaagtaaacgcattgcgcggattaaatccatccctccgttgagaaacagctccagcatgttatccagtgagctggaatcggagccggtttcattgacaaaaggagccgccgtttgtaaatccgggatcaaaggagtgcgaaacttataagctcttgctcttgcccactcacggtttccggtgatcgtattgatttctccattgtgagccagataacggaacggctgagccagtggccagcggggaacggtgttggttgaaaaccgctggtggaacaggcagatcgcagattccatccgcaaatcggctaaatccggatagaagcgtggtaaatcagccgccatacatagccctttataaatagtgactacattggaaaggctgcaaacataaaaatctttatcagtaatacgtttttccacgcgccgccggacaatgaacagcctgcgctctaaatcctgtgatcgccatccggctggggcgttgacaaagatctgttcaatacggggaaggctcgacagggcgatactacccaaaatatcctgattggtggggacttcccgccatccagcgatagacagggtttcatgttctaactcctgctcaataatattgcggcatgcctgagcgatttggctatcctgacttaaaaacagcataccgacggcgtagttttttgccagtcgccacgattgttcattcgcgagcatctggaaaaaacggtcgggtttttgcattaataaaccacagccgtcgccggttttcccgtctgccagaattgctccccgatgttgcattctggctaatgcgtgtatcgctgtacgcaccactttatggcttggttccccttcaatatgtgcgattagcccaaagccacagttatctttttcctgtaatttgtcatacaacatggtaaatccctcaagttctgtccgactctcacatcaattacgtgatgatataaatcattatttctacaggcgtctgaattgcgccctcagtcaaatattgcttgtcttatcggcagtaccattcaccgctaataacagacagcaaaatgatgttgtgtttctgtataagggcactgcataaatatgagctagataaaaaactagcaggtgattttcagtgaattcccaacttagcgagaaaaataaagtaggtcaaattgtgtttaaaggtgttcttagagctggtaattaggttaattaattgaatatattgtatatattagttaatggtccgttttgtgacctgtgtcatgtcttggatgtgatgtgatttatatcaccattctacacctaaagtgcgttttaaatgtgctttaaaatcgatttttattggtttattcatctttttttattgattttgtaagaatgtagttatgtattttatgtttgttaagtataaatgattgtttgttttttagtctgctgtgggtaattaaattcagatttgatttattattctgtttttatgcttttttattctttttgagaattggaaataatatcccctaacgaagtcaggctttttttaggctatgatgcaatttggtgattttacttggagctgttatgaagtttatcagggggcttgcccaatattacgttgatttaatgatgaaactcgggcttgtgcgtttttcattactactggcgtctgttctggtaattctggcaatgacgatgcaaatggccgtaacgttcgtcttgcatggggaagtgcagcgtattgacttaatccgttctattttctttggtttattaatcacaccgtgggctgtctattttctctctattgttgtggaacagttggaagagtcacgccagcgtttatccagtctggtggcaaagctggaggaaatgcgccagcgtgatgccaaactgaatcaacagctaaaagacaatattactcaactgaatcaggaaatcagtgaaagagaaaaagcggaacaggcgcatctggtcctgctggataaattgaaattagaaatggagcaccgcgaaaaaacacagattgaacttgaacaacaatccgttttgttacgttcgtttcttgatgcttcgcctgatctggtttattaccgcaacgaagacaatgaattttccggttgtaaccgcgcaatggagctgctgaccggtaaaagtgaaaagcaactgattggcctgacaccgacagaagtctacgataaagaaattgccaacaaggtaatggagacggatgaaaaagtctttcggcacaatgtttcactgacctatgagcagtggctggtttatccggatgggcgcaaagcctgttttgagctgagaaaagtacctttttatgatcgtatcggcaagaggcatggcctgatgggattcggtcgcgatatcaccgagcgtaagcgttatcaggatgcgctggagaatgccagcagggacaaaaccacttttatctctacgattagccatgagcttcgtacgcctttaaatggcattgtcggtttaagccgtatcctgatggatactaacctgacaccagaacagggcaactatctgaaaacgatccatgtcagcgcaatcacgctgggtaatattttcaatgacatcattgagttggataagattgaacgacgaaaagtccagctagacagtcagcccattgattttaccagttttatagcggatttagagaacatatccggattgctggcgcagccaaaagggatccgttttgtattggaacctgagctgccactaccggccagaatactggctgatggaacccgcttgcgccagatcctatggaatttaattggtaatgccgtgaagttttcccagaagggagagatcagggttcgtatctggcgtgaaaaaggggatcgcctgctgtttgaagtgactgattccggtattggcatccctgctgatgaattagaaaaaatcttcgccatgtattatcaggtacgagacagtgctggtggtcgcccggcaacagggacagggatcgggctggcagtatcgaaacggcttgcacaggctatgggtggcgatatcacagtcaatagtacagtcggaaaaggctcctgttttactttatctatcatcgctcctgcgattgatgaaaacccggaaggggcggaagaagaagacgcattgccattaccagccctcaatattctattggttgaggatattgaactgaatgtgattgttgcccgttctgttctggagaaactgggtaatagtgtcgatgtggctatgactggcggcgatgctctggatatgtttgatcctgatgaatatgatctggtgctgcttgatattcagttaccggatatgacgggtctggatgttgcccgcgaattacatcaacgttatccgaatcacacgcttcctcctttgatcgcgctgactgccaatgtattgaaagacaaaaaagaatatcttgatgcaggcatggatgaagtactcagtaagccgctttctgttaaggaactgactgcggtaatggaaaaattctggggtaagtcagcggaggctgaaactgtattaccggaattcattgagccgaagaaagaggaagagttactcgatactgagatgcttaaccagtatatcgatctggtcgggccgaaaatggtcatcgataacctgaccatttttgaggacatgatgccaggctaccttgctctattggattcaaatatgacggcgagagaccaaaaagggattgcagaagaggctcataaaattaaaggcgctgctggctctgtcggattacgtcatctgcaacagttagcacagcagatccagtcaccggatttgcccgcgtggtgggataacgtacaagagtgggtagatgagttaaatctggaatggaaaaatgatacggaaacattaagaaactggttaacgggcgctacaaaaaaataaccccaaccgaagttggggtgcgcgaatactgcgccaacaccagggaaacttggttacccgctaatctaaaaattttttt

SEQ ID NO: 88 - DNA, 16822 bp, Xenorhabdus sp.
agttttaactacagcacgggtatgtccgtatacgatagtctgggtaatgaacataacgtgaatatttcttcgtcaagaccgaagataacaaatgggaaattcatgcacaggatacttctgtagcaggttctgcggcccagaaactgggtaatgtagaatttgacaataatggtcgtattaaaggcaatgacaacgcatttgcatttaatatgccagcactgaatggctctaatcctgcggcgatcactatcgattttaacggcagcaaacagcagagcattcagcaggattctgtttccaacctgcaacaagacggctatgaagctggtcacttcactaattaccgtgtagatgctgacggcaaaatttacggtatctattctaaccagcagactcaggttctgggacaggtggttctggctaacttctctaacccggaaggtctggcatcacaaggtgataacgtttgggtcgaaaccggcgcatccggcagcccggttgtgggtacggcgggttccggtaacttcggtaagctgatcagcggtgcgctggaagcctcaaacgtcgatatgagtcaggaactggtcaatatgatcgtcgctcaacgtaactatcaatccaacgcccagaccatcaagactcaggatcaaatcctgcaaactctggtcagcatgcgttaataatctcaggcggatagcttttttggagatcgctttatggatcacgttatatacaccgctatgggagccgcgcgccagacactggaacatcaggctgtcactgccaacaatcttgctaacgcttcgacgccgggctttaaagcccagcttgctgcgctgcgggctgtccccattgaaggtgaaaccctgccaacccgtactttggttgttgcttctactcccggaatggatagccgtcaggggccgatgaattataccgcccgcccgttggacgttgctgtcggacaaggcggttatctggctgttcagcttgaagacgggacagaagcctatacccgtaatggtaacatccagatttcaccggaagggcaactgacagtacagggacgcatgttgatgggtgagaacgggccgattgatgttccgccacaggctgaactgactcttgccggagatggtgctatctctgccctgattgccagcgatcctccgactttgttggggcagattggcaaactgaagattgtcaaaccggaagcggggcaggtcgtgcgcggtgatgatggattattccatttaacgccacaggcgcgggaacagcagggcgacgaactggcagcgagcaccgaagtaaaaatcatgccgggtgtactggaaggcagcaatgtgaatccagtggaaagtatggtgaatatgatcgctaacgcacgtcgttttgagatgcagatgaaagtcatacacagttccgatgaaaacgctcagcgagctaatcaaattctcgcaatgagctgagccggaaacagaggataaattcatgatccgttctttatgggttgccaagactgggctggatgctcagcaaacaaatatggacgttattgccaacaacctggcaaacgtcagcacgaatggttttaaacgtcagcgcgcggtgtttgaagatttgctttatcaaactgaacgtcagcccggtgcgatgtcgtctgaacagactaacctgccatccggtttgcagattggtactggggttcgtccggtagcgactgaacgactgcatagtcagggtaatctggctcagaccaacaacagcaaggacgtggcagtcaaaggacagggtttcttccagatccagatgcctgatggcacaaccggctatacccgcgatggttcatttcaggtggatcagaatggtcagctggtaacagcgggcggctttcaggtcatgcctgccatcattattccggacaatgccaccaaaatgagcattgcccgtgatggtattgtcagcgtcaacgtacaggggcagaacgcaccacagcagatcgggcaactgacactgacgactttcattaacgaaagtggtctggaaagtattggtgagaacctgtatctggaaaccaacagttccggtattccggtcgaaaacgcgccgggcatcaatggtgccggattgttgtatcagggttatgttgaaacctctaacgtcaacgtggcggaagagctggtcaatatgattcaggttcagcgagcctacgaaattaacagtaaggcagtatcaacatctgatcagatgctgcaaaaacttacccagttataatctaatcattaatcagtagggatttatacccagagggtataaacccttcatgattactgcgataaacataagagcatcgaagatggatacaatgcccgttgctgaaagccatactgaaaatcctatggctgatagctgtgccggtttacggaaaaaccggggaaataagcggcgtatcagcagaactgcggcggtactcgcattgtcagtactgacattagggggatgtgcttatatgccgcacaaaccactggtgaaaggggtgacaactgccaagccaaccgaagcacctgcgccagcgccgaatggttctgtttttcagaccgtccagccagtttactatggttatcagccattgtttgaagaccgtcgtccacgcaatatcggtgatacgctaactattatcctgcaagaaaatgtcagtgcgagcaaaaactcttccgccaatgccagtcgtagcggtaaaacgggtttccttgctgctgtgacacctcgtttcttagagggcgtgattggtggaggtaaaaccgatattgagatggaaggtaacagtgagtttggcggcaaaggtggagcgaatgccaacaatactttccggggcaccattactgtgactgtggatcacttgctggcaaacggtaacctgcatgttatcggcgaaaaacaaattgccatcaatcagggaacggaatttatccgcttctccggcgttgtgaatccgcgcactatcagcggcagtaatacagtcagctccaatcaggttgcggatgcccgcattgagtatgttggcgatggttatataatgaagcgcagcatatgggctggttacaacgtttctttatgaatatctcaccgttttaaaagaggatggtcaggatgaaaaaattagtcgccagcctttttacgttggtgctggtactgttcaatacgttcgcaccgaccagcgcttttgctgaacgcattcgtgatttgacgacgattgaaggtatcagggataacgcactccctggttatggtttagtggtcgggctggatggaacgggtgaccagaccatgcagacaccttttaccacgcaaagcctgaataatatgttgtcacagctggggatcactgtgccccctggcacgaatatgcagcttaaaaacgttgctgctgtgatggtgacaggcaagctaccaccttttgcacgttcagggcagaatattgatgtggtggtttcttcactgggtaatgccaaaagtctgcgcggcggtacattgctgatgacgccgctgaaaggtgtggataatcaggtatacgcactggctcagggtaatattctggttggcggggcgggtgtcagcgccggcggtaacagcgtgaaaatcaaccagctggcaggcgggcgaatttctaatggtgcagttattgagcgggagttaccaacgcgattcggccagaaagggacactgaatctgcaactgaatgaggatgatttcagtctggcgcagcaaatcagtgatgcagtcaaccgcctgcaaggcgtgggtacggcaacagcgctggattcccgcacagtacagttgcgtctgccgatagaaaacagtgagcaggtgaaatttctgtcacaagtgcagaacctgaatattcgcgttgatgcgggtgatgccaaagtgattttcaactcccgtaccgggtcgctggtgatgaaccgcaatgtcacactggatagttgtgcgattgcgcatggtagcctgtctgtaattgttgaacgtcagaccgcagtcagtcagccggatactccgttggcgggtggtaatactgtcgtaacccggaataccggtgttggtattcaggagcagggcggtgtgctacagaaagtcaactccagtgcgaatttgacacaggttatccgtgcactgaacgcattgggtgcaacaccgacagacttaatgtcgattctacaggcgatggaaagtgcaggctgcttacgggcgaagctggagattatctgatgaatgattttctgtcgatgccgactgcggcttatgatgtgaattcacttcattcactgaaagccaaattatcacaggaaccacaacaggggctacggcaggtagcccaacaactggaaggcgtatttgttcagatgatgctgaaaagtatgcgttcctcgttgccgcaggacggcatgttaagcagtgaccagacgcgtttttatacttcgatgtacgatcaacagattgcgcaggatctttcccaaaaggggctgggatttgccgatatgatcgtcaaacaggtttccggtgccaacagtgctcccagtgagctggccggaactgtgccgatgccgctgggcaatgacatcctgcatacgctgccgacacaagcgctggagcagtttctacgccgggcgatgcccgaaaaaagcctgtctgataaatcctcttcagggggcacacagtcaaaatctctgccaataaacagttccagttttgtttccatgctttccataccggcacagatagccagtcagcaaagcggaattcctcatttgttgattattgcacaggcggctctggaatctggctggggtcagcgggaaatactgacggaagaaggtaaaccgagccataacctgtttggtattaaggcgggtaaaaactggaagggcgcggtcaccaatatcatgacaaccgagtatgtgaatggtgagccgcaaaaaatgcgtgacagtttccgggtctatgattcttatctggaagccgtcacggattatgtcaggctgctgacggaaaacccccgctacgccaaagtcgcacagtcagtgaccgccgagcagggggcacattccttgcaggaagcaggttatgccacagaccccggttatgcgcagaaactggtctcactgatccagcaattaaagagtaacggcactcagatggtaaaagcctatacctacgattttgatgatttgttctaagtcaccgtccaaatcatttttgttcaaggttcaggttcttctgccgataacttttacagagaatttataccgataacgatagcagtcatgtctctctgaatagaggcagagcgaaaacgtaaaaggatctacacatgtccaacagtcttatgaatactgcgatgagcggtattaatgccgctcaggtggcaatgggtgtagtaagtaataatattgccaactccaaaagtgagggctacaatcgacagaacaccgtcatgacgcaaaataatggaactatgtccccggtgggttttataggtaacggaacaacggttacgacaattaaccgtgaatacagcgaatttattaaccagcagttcaattcagctcagaccaaacactcggcgttaaagtcatataacgaacagataactaagatcaacaatctgttggccgataaagacaccagcctttccaattctttcgaagactttttcaaaagcattggtaccgttgagagcaatgcagaagacagtgcggcaagaaccacggttttaggcaaagcggaaggcttggtcagtcgttttaaagaagctgatgaatttctgcgccagcttgatagtggcatcaattctcagattgagcagaatgtcaaagaaatcaacaaatatgcagaagaaattgccaagctgaataacgaaatcatccgtatgcgtggtactggcacgggtgaaccgctggcattgctggataaacgtgatctggcggtcaataaattaaatcagttggtggaagtaaatgttactcagcaggatggtggcgtttataacgtttcattcggtggtggcatgtcgctggtatcaggcagtaaatcctaccgtatggaagccattccatccagtgctgacagcggccgtattacactgggttataacaacggcacagtaggtacgagagaaattgatgagcgtttcatttctggtggcgcgttgggtggtgcattgcgtgttcgcagcgaagtagttgactcgacccgtaatgaactgaaccaactggcactggtgatggcggatcagtttaatcaggtacaacacggcggttttgatctgaaaggcgagaaagggattgatttcttcaatttcaaatcgtcagaaattatttccagcagcgataacaaaggcacggctgagattaaggtggaatatgcggattccacgaaagtcaaagccagcgattacaccctcaaatatgaaggtggagactggaaagttcagcgtgtttctgatcgtgaaatggttgctgtaaccaaaaacggcaatactctggaattcgatggactgaaagtcgaaatcacagcgactgatgcacaggaacacgataaatataccctgaaaactgtcggcaatgttatcgcaacactggaagtaaatctcaaggattcctcccaactggcaaccgccagcgagaaaggtgccggcccaagtgataaccgcaacgcgaagaaattccttgaattacaggataagcgtctggtggatggcaaggcttctttttccggcgcttatgcctcattggtgagtaccgtgggcagtaaagccaacagcgcacaaatcagcgttgaaacacagggccatatcgttgataaattgaaagaaacccgtgaatcaatctccggcgttaatatggatgaagagtacggcgaattgcagcgtatgcagcagtattatctggcaaacgcccgtgtgatccagacggcgacgacgttgttcgatgctattttaggcattcgctgataaaaggaataataaggagtgatactgtgcgtgtaagtacgaatcaattatacggccagaaaatggatggaatttttggcgctcagtccaaatggatgaaatatggtgagcaactgtccagcggacgccgggttattaacccatctgatgatcctctggcggcatcgcagaatatcatggtttctcagtctgaatcgaaaaaccagcaatttactactgcgcgtatttttgccaaaaatgcaatgtcatcccagctgagcattacagcgaacgccgttaaggtaacaacgaatgtgtttgagactttagtggcagcagcagatgaacaaagtgatcaggatcgttcatcctatgcacagcaattgcagggttttaaagatgagctgttaaaccttgctaataaaactgatggcaatggccgttatatttttgccggctataaaacagatgtgccgcctttttcggcggataaagatggcaaagtcacttatgttggtgggtctgaaaaaatcacccagaaggtggatgataaccgctcaatggtgattgctcataccggagaacaggtgtttttatcctcgcctcctaatccaatcaaagaacctgatggcaaaactgcgagtgacgatatttttgccactatcgatatggctatcaaagccttaaaagaaccatacagttcagcgactgaagaagaaaaaaaccaagcagcggagcttatcaacaaagctaaccgtggtattcgtaatagcctgaataacctatcttctgttgaagcagtactgggtttacagcttcaggaactggaacagctggattctctgggtagtgaacgcagtattgccaacaaagttcgctcaggggagttagttgatgtggactggacttccacgatttccaactattatcagcaacaggcttctttgcaggcttctttcaaagcatttactgatttaaaaggaatgtctttgtttgagatgtatagataatacattctaatttaattctgtgatttccggctcttatctgtttgcgataagagccttttatttatggctttagccagtttaagtcgcgttagcgtcttaaacataaaaccacccgctttgcgggtggagttcaaaggttataccaagaaaaacacctttccgttacgatatagatgttcaagctaatattcgtaactcaaataaggaaaggtgtttatgggcattaaagcacaaagctcagcgcatacaaagtggctgtgtaaataccatatcgtcttttcgtcgaaatatagacggaaagtgattgcactatccatatattgtttaagctaactcaaatgagttaagtgatttcattaattgtgtttattgtttgaatatgctaaaaatagagcgcaatcagttacaccactaatatgagggttcgtagtatattacacagtgatttccgtgtgatgaaagaataaaacatcatgaatagcgccaaaagcgtaaaaatccaacgtagtaccaaaattcaaagcaatacccacgtcttattcctctcagctattttatccagtgaacactactggtgtggtgcactttagctcctttttctcctattaaccggtttgttccggaaaattctagcgactttttagccaattattagtcaactaattatgtgccaaaatatcaggcttcttttgatatcgcatttttaggtgatgttattggcatgaatagtttgatgtcttggcatgcctattcggtatgtttgggagagaaaaatgatttattggatatttcttgcactggcgattgtgacagaggttattggtacgctgtccatgaagcaagccagtatttcaggtgatttcaccggtatgtttgtgatgtatttcatgatcacaacgtcttatattttattagcaatagcggttaaaaaagttgctttgggtgttgcttatgctttgtgggaagggatcggtatcctgtttattacagcgtttagtgtgttgtggtttgatgaatcattgtcacccatgaaagtaggtgggttgtcactgctaataatgggtattgcacttatcaaagcaggtgcaaaaaaagcaccaaaactccagatgaaagagaaggaggcataatatgctggcgcattttgaatggtggcatatcgcttttctgattctggctgtttgtttagaaattgtggcaaatattttgttgaaactttccaatgggttcgagcgcttctggattggtattttatcgctggtggctgttttaggtgcattcagcgcactggcacaagcggtaaaaggtattgagctttccattgcatatgcgctttggggagcattcggaattattgccacagttgcggcgggctggattatgtttaaccagcgtctgaattttaagggatggggaggaattgtgttattgttgatcggtatggttatgatcaaaatggcataaattcagcttaaacctgactgctaaaatggcattgaataagttaacaattttcaatgccataaattttatttcagtattagaacaatattagagcttaacaagctgcaataattttgatttccactttgtattttggatgcatcagcccagcctgaacagtgcaacgtacaggagcatggcctgcaacaacccagtcatcccaagcggcattcatgcctgcaaaatcggctttatcagccagaaaaattgttgcatcaatgattttacttttgtttgaacccaaacgttgcaacatagcatcaatgtcagacagtgtactggcggtctgcgctgtgatatcaccatccagattttctggcacactggtataataaatggtgtcgttgtggataacagcttctgaccaacgggtatctgggtcaatgcgtttaatagtcatttaatttcctgtcgattggtacaattttgatcctgaattggcgggttattgcccctgtaaaaggtctatggaaataaacccgtagcacattttatcctgataggggggtgttcattattgtgatgtcataacctattgtccagttccgtctgcaagctctttattattgggatatatcaggacgtaatgtttgcgagaaatgtctgggattaaagttaatatttatccattccctgagtgataaaagagagctgctaatacatactgtcattttgcgctgtgcatctgcagactagcggcatttttaggtgaaatgaattatcctgatcttaatttctatgtttatattgtgatttttaaatcaatcttattctattaaaaaagagacgatctgtgtcagacgattttgcagaaaatggcatacttgccaaaaccatacagggctttaagccccgcgatgcacaacgggaaatgtcttctgcgattactgcggcaattcaaaataagcaacagttagtggtagaagcagggacaggaacggggaaaacttttgcctatctggtgcctgcattgcgatcgggcaagaaagtgattatttccacgggttcaaaggcgttacaggatcaactctatagccgggatttgcctgctattactgattcgctggcattttccggtcgtctggcactgctaaaaggacgttcaaattatttatgccttgagcgccttgaacagcaatcaatcggtggctctcaacttgagccagaaacactctcagaaataattacgctgaaaaattggtcgtcacaaactgaagatggtgatatcagtacctgccataaaattgcggaagacagcactgtctggccgttggtaacaagcactaatgataactgccttggtcgtgactgcccgaattatcaggagtgttttgtattgaaagctcgccgtagggcgatggaagcagatattgtcatcgtcaatcatcatctgtttatggcggatgcggttgtcaaagataccggatttggcgaattaattccgcaggcggaagtgatgatttttgatgaggcgcaccaaattcctgatatcgccagccagtattttgggcagcagttaagcagccgacaattactggatttatcccgggatatcatcatggcttaccgcacggaagtcagggatcaggctcagttacagaaaagtgcggatcgtctgagccagagtacgcaagattttcgtttagaactcggagaaaacagttatcgtggtaatctccgtgaaattttgcagcagcaacatattaagcgggcattggtgcggctggatgatgcactggaactttgttatgacgttatgaaactgtcactggggcgttcagcaatgctggatgcagcttttgaacgggctacaatctatcgtaaccgtcttaaaagactgattgatgtgactgtgcctgattatagttactggtttgaaagttatgggcggcactttttgttggcattaacgcctctgtcagtctctgataaattcagtgaaatgatccgtgaacaacccggttgttgggttttcacatcagcaacgttgtcagttaacgaacaacttgaacatttcaccgcgcgtttggggctaaaacaggctcaaactttgctccttcccagcccgtttgattatcagcggcaaatgttgttgtgtgttccgcgtcatttaccattacctaatcagaatggtggggcgaaatggttagcgggtatgttaaaaccactgatcgaaagtaataaagggcgctgttttttcctgtgtacttcccatcaaatgatgcgcagtttggttgaagaattccgtgcaagtatgacattacctgtattggtacagggtgaaaccagtaagggaaaattattgtcacaatttctcgcagcgggtaatgctttgctggtggctaccggaagtttttgggaaggcgtggatgtgcgaggtgatgcactatcctgtgtcattatcgataaattaccctttacggcgccggatgatccgctacttaaagcgagaatcgaagactgtcagcataaagggggagatgctttcagtgaagttcagcttcctgatgccgtacttagcctgaaacagggagtcgggcgtttgattcgtgatgttgatgattatggcgtggtagttatttgtgataatcgactagtcatgcgaccttatggtgaagtctttctcaacagtctgcccccatctccccgtacccgggatctgtcgaaagcggtggaatttcttaaatcccgccaatcacagtcgcagtatacccaatgaatttcaagttgcatcgcggcggcaagggagcgaatccccgggagcatagataaccgtatatttataaaaacggtgaccggggtgagtgagtgcaaccaacaaagaggaaacttgaaagacgaagggtataaaatctctgggggtatgatagcatagcccccttatttcgaattctattcttgccggagttaaggcatgtccacacggattttagctattgatactgcaactgaagcatgttctgttgcactttggaatgatggtctcatcgaggcgcagtttgagatttctccacgggaacatactcaacgtattctacctatggtggagacggtattgtccaaaggtggtataaagttgcaacaattggatgctctggcatttggcattatgtttctggcagttttactggtgtgcgtattggagtggggattgctcacgggctggccttaggagctgttctgccaatgataggtgtttcttccctgaagacaatggctcagggggtattccgccttaaaaatatatcgaatgtcttggttgccattgatgcccgtatgggagaggtttattgggcacagtatacccgtgatgagcagggtaaatggtcaggggatgaaaccgaatctgtgttaaaacctgagcaggcacaggccatcatgtctaatttaacaggggaatgggcaatagctggaacgggatgggaagcttatcctcaattactggaaagtcacttaactttaattccgggagatatggcgttacctcatgcagaagacatgttgccgttagccgttcagatgtggaaagagggggaggcaaccgcagttgagctggcagaacccgtttatctgcgtaatgaagtcacatggaaaaaattaccgggccgctaaaattgctcaggtaactttaggggagaaagttgcataaatttaatgcaacttgtagcggaagctggtgtccatgaaatattgatatccataaaaacaggactagctatacccaccatctttcaggttgtatcttagccaaagaagaggcaatctgaaagacgaagaagtcgcattctctgatttttcctgtatgggaggtatttattatgctcaatggaacatactgtcgggtcatattgcaatctattgtatttatgggggcaatggcactcatcggttgtgcatcagttccggactcaataaaaggagcgactaaacacccggaggaaaacctgattagtgtcaaaagaaaacccgatttatatattgggcatgaagggcgctttggtggaaaagtcctaagcgtcttaaatgaaaaaggacggacacggttagaaatttcaacaatgtcactggcaagtaatgctgctcctcttattggttccccttcactcggccggctttatgcttacgtgaattcttttctggaacccactgatttcaaaaaccattatgtgactgttgtcggcttgattacgggaatagaaaaaggaaaagtcggggatagcccatataactatgttgtgatgaatgttaatggttttaaacgctggcatgaaataagacgtatttcattaccaccttcagtaggaaatatgtggggttattatggtgatccctattttaatgaatggatagaacgtccagaaattcagtctgcgcctgttgaaactatcttgactgaaaaacatccagtcgagtgataaaggtggtctcatatttgtaacaaatatggggccatttaaaataagcactaaattttattattacaagactggagtcgtaaagaaaaatatattacaaataaaagaatagtgaaaatcataaaaatattaattaactgatgaaactcagttatatgaaataaatcaaagcacatcataaatacgccggtgaaactcatttttaatgcaccctgtaaagcactggcagcacctttgttcttagttacattctccatgcacaaaatcaatgataaaggtgcagtaacacctgatactgtggctaataaaaaagagaatatcataatattaatcggtgtttctaagttttgtaatgagaaaaaaacaagaataaagctataaaatatgagtgatagtaaatagagttttttagacgttattcttataaattgccttcctaacaaccatgatccgaaaataattccagcagaataaataatgaagaataggctgttttctatcgggctgtaaccaagtttatggaaaatataaggagaagtggagtaatagcctattgtataagaaaagatgagtgatgatgcaatgctgaatgcaataaattgtatattttttgccaattgaatatatggtgtcaggaacgctgatggttttagttccttattcctcgtttcacccattgtgagtaaggtaataattagaccaacaaaataaataacagccagtgtaaaaaaggatatatgccagttatatttcatttgtagccagcctccaaagacaggggcaagagccggagatagctggctggacattgaaaaataagaaaatgctttttttaattttaaatttccctgaaagacatcaacgataatagcccttgagataacagtaaaactagctgcaccaaatgctgtgattattctggacaaatagaggtaattgatttgttcgctatagcctgataaaaacagaccaataatagaaatggtaaatccgataacaacagcaggctttctgccatagtgatcactgatactgccataaaataactgagaaatacccagtgttgccatataaactacaattaaatttttgatgctttcttgtgaagtattgagttcttttaaaataaaaggtagtgaaggattaaaaaaatcaacagccattaaaccaacaacgagtaaaaagcatgaaaaaagaattgttttttgttcgttcattaatatacccttatttctaccgactcgcacatataaattttattgctgatgacaaaatacccgtttgattacaccagggttatccatgaataaaatgatcttctcctaatatagtgaaaaaattatcaatacaagataaacaacacagaagcgtttgttaggtcaagatgtgtacacaatggatttcagaatacgtggcggtggcaagggagcccatcctcgggagcgtagttaatgcattattttgtttggatactaaccagtaacatgcgaataacccttaataattatcgggcattggtttacattgtttataactatttggaataatgatatgggttttcggcaaaaatagctaaatcagtgtataattagtcaattatacatctaaatactagttatggtattaactatttgataaataataaaaacatataggcggcataagctgccttattttttagcagcgataatgaagtattaaattagtgatgtgtatcgccaacctgaacaatgttccttttcaaactggtacgctgagttaataatttgttaaatacgcaggtctggtttttgtttcatggtcaatggttacacagcaattagatttcaggagtactcaacttggaaaaagtctggctaaaacattatccggcggatgttccggcagaaatcgatcccgatcgttattcatcattgattgaaatgtttgaaaatgccgtggcgaattatgctgatcaggtcgcatttattaatatgggtgaggttctcactttccgcaaactggaagagcgtagtcgcgcttttgctgcttatttacaaaatggattggggcttaaaaaaggcgatcgtgtggcattaatgatgccgaatctgctgcaatatcccattgccctttttggtattttgcgtgcgggaatgattgtcgttaatgtaaacccactgtataccccacgagaattggagcatcaactgactgacagtggtacttcggctatagtcattgtctctaattttgctcataccttagaaaaaatagttttcaatactccggtcaaacatgtcattttgactcgcatgggtgaccagttatcccgtccaaaagggactcttgtagatttcgtcgtaaaatatattaaacggcttgttccgaaatatcacttgccggatgcaatttcatttcgcagcgttatccacaagggttatcgcatgcagtatgtcaaaccagaggtaaataacgaagatttggcatttctgcaatataccggaggtacaacaggtgtggcaaaaggcgccgtgctgacccaccggaatatgttagcgaaccttgaacaggttaaagccagttattcatcgttgttacgtcccaaacaagaactggttgtcacggcattgccgctataccatatttttgctcttactataaattgcctgctgttcactgaattgggtggccggaacttattgattaccaatccgcgggatgtgaactcaacggttaaagagctttcccgttataaatttaccgcactgtctggtgttaatacgttatttaatgcttggatgaacaatgtggaattccagaaactggatttttttgcattacgtcttgcttgtcgtggtgggtttggcgtgccaaacgcggtttgcgattaatggcaaaaacttgacgggtgccattta

SEQ ID NO: 89 - DNA, 15801 bp, Xenorhabdus sp.
atgtgctctaaaggtcacagattttgttatgatcaattgggaaatatattaacctgtacaactttcctctccgatgggagcaaagatactgctacttttacctacaataaaaatgatatttgccagctagaaacaatcaagcatacacatcctgcttatccagctaccatcaaattgtcttatgatcgcgcagggcgtttaattcaagatgaatccggacgtcatttgacctatgatgcgctaggacgtttagcctctgtgagtatcaataatcagatcagcgattatctttatgacggcattgaccgtttagtgttacaacgaattggctttgataaaacccatgaaatttattatcaaggtgtaactcgtgtggccgaagttgtacgtgagagtaatgacgccatgcgtttcttacgggcacatggcgaatcagttgcaactgtaacagccaatgatacgcatttattgggttgtgatggaaatagtagtgtactgttaagttgtcaaggagatggtagtcaaactcattatcgttattctccgtatgggcaacaggcaccggatgaacgtaacccagaattgccttcttataatggtgaacgtattgatccaatatggggaacatatcatttaggtaatggttatcgtacctatagtcctgtattgatgcgatttactgcaccagacagtcttagtccattcagtgttggtggtattaatgcttatgcttattgtctgggagatcctattaatcggagtgacccaagtgggcatgtaagtatatttggaattatagggcttattttgggagctattggtgtagcagccagtgtagcaacagctattgctagtggagggctgtctctagttggaataggggctattgctgctgaggttaccagttttggattggtagctggtagtgaagttacagaaggcagtcatcctatactttctggaatacttgatgggctttctattcttgctggaattatcggtataggaataagtgtagcagtagcaagaggaatactgaaggtagggaacaaggttataatcagatttaatagaggactggagcaatctgaaaactctctcagaacagcaggttcagctaatatcgctgaacacaatagttggctacaagattataataatgtaaggatgaatggcgcaattagcaaagtagaaggcactgaaaatttagaggcagatattagcctgatacgagaaaaaaattggaacatgatggttaagttaggttttaatataaaaaggaagaacaatactagcctattatttaataatatagtgaaaattgagggagagtcaggtagtcgttcttacactttaggggtcaatgaaacaatatttgaaaatttatatgtgcaatatattgggaaaggatctataaacaatgcatcttctgtcattaatgaattaagacttataacacatggtcttgttgagaatgttgaggctgagctcaacggagctgaacttatgaagtatatgtcaggtttatgggataaagggaaattcaccggaaattttgaagattggttgcgttcggctcttaactcaaactggactacacatgatatgccagaaatatttaaattttataatcgattgatttaagtctagcttattagctaatgttatgatcgcctagcctgaatactattttttgatcgaaagataaagaaaagcatgctgaaatttaagatattttttatgtttttcataaatagatttcccgccgcaagcggcggggttgtctattattcatccacattaatcgggcaaacaaaaccttcgggtttaattgccaacaaatcacatttcaatcggccaatcacatgttcggcagtattaccaagaaatgcggcagataaaccggtacggccaagaatacctaaaacgaccacgcctgcattgagttcatcacaaatttcgggaatgacattttccggtaaaccttcctgaacgtgagtttgctcttcactaatacaaaatttttgtcttagttctttcattgcgaccaaatgctgaccacgtaatgctcggttatatacattgggatcaaaatcagggagttctgttgcgatgttcaaaggagccgcagggtaggcgctgaccagatgaatccgaggttctttcacaattctgttggcaagatcctgtgtttcattaactaacttcagattaagttcattatgataggattcttcatttgataaattgacagcaacaacagcagaacctttctccggccatatctgatcttttaccatccagacagggcaagggcatttacgcaacaaatgccagtcaagcggcgtaaagattattgattccagcagggaatgttgatgtgccatctttaataacaaatcatgcttcccggagataacttcctgaataatcgcttcatagaaacgattatgccagactaccttgatttcaatatcaatcccggattcaagatagtagtgcgcctgttgttttatccaggcgatccgttgaccaataacacctttacgcatagcgtttctttcttcaggagaaagtaacgtggtcatatcatatgaaagatcataaatgggtaagaaagctttaatccggccaccattacgttgcacgatatataccgcgcgtcttaacgctggctgatcatcctgattcggatcaattgcaactaagaggttttgatagtttgccatattaatccctcgcagaggctggatgtaatttttgtacggaagataaactatagacaactataacaggggatagggtagccagatcagtaaaatatagtgatctggcttaaattttgaaacaacgctatgttacatttgtatgggctttgcctgccagttcagtcaatttttccatattttcgacagcgatatacttacctttaacgcttaaaataccatttttctggaatcgtccaagcaggcggctgattgtttcaacggtcaaaccgagataattaccgatatcaccgcgggtcatggtcagacggaattcgcggggagaaaaaccgcgttgggcaaaacgacgggataaattataaacaaacgctgccagtctttcttctgcgttctttttggatagcaaaaggatcatttcctgatcacctttgatttcaccactcatcaaacgcatcatctgttggcgaagatttggcatttttccggaaagatcatccaatgtctcaaacgggatttcacataccattgaagtttccagagcctgagcaaagctggggtgttcagtatttataatggcatcgaacccgactaaatcaccagcaagatgaaagcctgtgatctgctcgtcaccttcttcggtgatagtgtaacttttaatagtcccagaacggatagcgtaaagcgattttagtgcgtcaccagctttaaaaagcgtttgccctttttggattggttttttacgctcaataatattatcaagctgatcgagttcatgttcgtttaaagtgaaaggaatgcatagttggttaatactgcaatcctgacagtggattgcacaaccacctgattgaattcgcctgataatacgtttttccgggaccataggaagcgctcgttagaaattattgatgcctgtcaatttaacatatttcggttgctctgataagagcttgctttttatgttaatcactcccagttattattgaagaagaaaaaaatgaaattttgctgcgattcatgcataacttgcgtaaaatcttgcatactcgatataacatttcaattaaacttaaattacattaataatatatacccttggtctttcaagtcgctattttgttggatgaactcaatcaaattgctgactatgcacccggaacacgctttttagccgcgatgcatcttgaaatccattgagtataatacgttgtaatggcggtggttttacaaataaatggatggattagcatgagtgaatggctgttgattgcatttacaatgatagtgcaaagttctattggtctggtattgatgagtgcactttatactcatttttttagtcgcaaagcagggccagggcagaaaacagaagctgtacctgttcgcagaattttagccatcagtagtattctagccggaataggactgctctcttctttggatatcataggatacccattcagcgtatatcagttattacaattacataacataatgcaggagtggataaatacagaaacagcactggctgctatctattttattactctgagtttatatacgctttttgtcctgcttaccaagcagagccatgcatatattatggcgggaatcagcgttattggattagttgatattcactacatggtcaatatttactctaatagtgacataattacctggacaaatgttaatacttattttctgttttatggtgcagtctttactctggggccggcactgtcattatcacttattggtcagtctggcaggcaattcatgcgggaaaaaattccgactaaattgcttatggcagcactaatcattgtctttatcagtgtgacaacgcgcttaattgaacagccagcatacatgggttggttagtagaggcagtcactgatggtgaaactgaaaatatcatttttccccaccaacccgaaattaacctgaaaagcgcatttggcttcaggatgataacttggtgtttatatattcttgccatgacgatatgggcctatacattgtggaaaagcagaaataaaacactcattcgcataagttgtcccatcttatcaggaacaatgatcatgctggtggctgaaataattaaccaatatatcttctttgcaatgagtaacgtctaattattactcaattaatgagtgcataccctccatttattccattctgcacaataaaaaatgtaacaccaatacttatttttatgtgcagaaatacaccttttatccataaagtcatataagtagataatttcagctactgatctcttttttcattcatttctttgttcccgtgcacaaattcaaagtatttgttaatttcttattaaagttttcgatcgtatgttttatatctgtatccgtagtttgattcatataatgaatggttaataaataacaaaaaataataatcagtgaggatattgtaattatgcctaagctatttaatcctaacttaaatattgatgctctgtttttaggtccaaagtcagaaaatgctgtgttcttcaaagaaatgatagattatgcagtcagtgaacacatgcactggcgttcgggctttcatcctgaagacgcggcattagtaacatctgttgatcgctatgagcataactacagagaaacactgtatcgaactgaagggatacttaatcagttgtcagcaaaactaaaaaattcctctatccctttcttttctccccgttaccttggtcatatcaacgctgatactctgatggtttctaacctcgcttatgtcatggcgatgatgtacaacccgaataattgttcttatgaagtatcaccaacaaccactgaacttgagatcgaatcaggtttagatctctgccgcatgtttggctacgatccacaacgagcctgggggcacattacttcaggcggtacagtagcaaactacgaaggcctttgggttgccaggaatttgaaaacactgccttttgctatttctcaacatcctgaaactaaaaatttgctcagtcacaaatccccaaaacagttaatgaatatgcccacgacagaagtgcttgatttaatcagtgagttaaaagaacaggggatatttaatgaaatccgtgatctaacgtgtcgtggttcaggagttaaaccagaagttataggtaagctacttgttccacaatcgaaacattattcctgggtcaaagcagcggatatcttcggtatcggtcaggagaatattattcctctacctgtgaatacagagtatcagactgatgttgccaaaatgcgcgaaattacactttcccttattgagaaaggagaagccattttagctatgattgcaatggtagggacaacagaagtcggagctattgattgtattgatgaagtcattgcattaagaaaagagtgtgaagaacattatggcgcatcattttatattcacgttgatgctgcctatgccggatatgcctgctctttgctactggatgagcagggaaaatttatggaatatgatgagttggttaagaagcatcaggaacttggtttgactcctgaaaatattatttggcctaaaccggcagtctaccggagtttcaaggcattgaaacatgttgattctattacagttgatccccataaaatgggtttcatccaatattctgccggggctatctgtatgaaggacaagagaattcttgatttaatttcctctcgggcagcttatgtttttcaggatagttcccctcaaagcgattcattaatcaataacttctcaaacaataataagaatatattaggctcttccattatggaaggctcgaaatcaggggcgacggccgctgcattatgggcagctcataggttattgcctctaaatatcagtggatatggcaaagtcatagccgcagggatcgtcacagcaaattggttattaaatcatataaagaatatgcaaccgataaaggttggaaaataccaatttgaaatacatatcatgccatctcctgattttcatatgattaacttttcttttaaggaaatcggaaatgatagcctgctgaatcacaatgctctcaataaacggctctatgaactctgttcatattccaccgagcgtgcttataccaacgacttcatcacatcatcgacaatgttgggttataaagattacggagatactcctcgacattatgctgaacaatgtggttttagccagagcgaatgggaaaaaatacatcatatatatgtattacgggcagcagtaatgacacattgtttacgtgatcaggaacacttcgaagaatattgggagcaattaaaatccatttttgtgaaaaaattaattcagcttgttgatgaacaagaaaaatcattatatcaaaaatcagatttcaacatttcatttcttagctgatgcgcgaagagaatatacccagtaaaatttcaagttgtatctcagaagtgaggatactgaaaactcagttgacccggtcaaagtcgggtcttctatgacaggatatgtgagcagagccaacaaaggggcaatctgagagcgaagagctatacacttcgtctttcacgttgcccctttgttggctgcgctcactcaccccagtcacatagttatctatgctcctgagggttctctcccttgccgccgcgatgcaccttgaaatccattgtgtatatatcctttgtcagttagagatagttcgatagatttgttatgtcgatgaaatattctgctatttcactattcaaaccttactttttcataatttaatatcttgatttttaatcataataagaatgcccgaatcgcttgggcattggttaaccaaccatcggtttatacccctcgaggagggattatgtgaatattattatgtggttgaagtccgtaagtagtagatgtactgacaggcagtaccgactctctgtgaacctggcaaatagctcagtctaccaagactgttgaaataatgaggacagagagggcggattttcatcagggctctttgaagccgaatatatttttgcgactacttttgtcagaaaaatatttttatagacttgaattaaggtcggtgtccatatagttatttaggccattagaaaaaggagatgaattttggagcggtcgcttatatcctgataaacttattcttcccacaacagcaacaattccagaaaactacccaagaattaataacagctacctatctaatttagaactggatgagattaataagttatttatcgatccggttaaaaccaatcaagaaatcatttcttcattctcacctttagccagccccaaaatgtgtggagtatctgatacacgccgttgtgcccaaaatacttaattaataaaactcacctcagtctcgttttatctttttgattagtgacgaaatcgtttaattgataaagtcgagactgagtttttggtgacatatatatgttatttatttaataccagtccaaatagtccaataatcattttcaacaatattggttaaagagggaagggtgttctctatataatcaacaaggtaagctatttctttatcactcagttcgtgcaaaatagaacgtccttttcgtaatcgaaaatcatccgctaattgtgaaaaattattatacgtagtgcgtttttctaaaaaagaaagtgtgtttacatgcctgaatccgacttccttaaacccattaatcacattgtcggtatcaggtcttcgttggttttcaaaatcgcgtaaatgtgggtaaacatcaaaaatataaccacgaatgtgttcaggtgagccgggcaggttaacgtcctgaacagttcgatcctgtaagatatatataccccctgatcgcaataaacgattggtttcggcaaaacaaattactctgtcttcttcgctgatatgatgaataagtgcacgctcgaatataatatcctgactgtttgcgggaaggccggtatggagagcatttccttttttgagggtgatatttttcaactcctgagtattctcagccgcatcagccagcatttgatctgaaaaatcaacacaagtgatgctctttgctcccagattagcccatgcccgagagtaaatcccgccgccacagccaatatctgcgatatctttacctttaggctcagtcaaactatgaattatatcgtaccattcctgttgtgcatcgcgtccaagataagtatgccggttctcttttgcattaaaatcaattgccatttgagtttccttcattaatggatttactaaatgaatttcaaacatcggcctcaattaagtgacggtgtcactaaaaaatcttttaatgtcagcccaattcccgcgatcagacagcttcccagagtgatcatcgtagcgacaatactatgttgagttaactgtacagtcgcaatagggagtaagaataaaattgtcaggttattgaagctttctgatactgctaatatctgacctttattctgtttggcccgatttgccagaatagaggtactaacaggggcggcaattccttgcgcataaccccataacattagacaactcaggctgaaaagcagggataatggaattagcataaataccgcataagccacgaaaagtaaggttattgtcaacagtagtatgtattcatcccgaatacctctacgcttcacaaaagttatggataaattgccaatgccaagtccgataccaaatacggatacagatataccaatcgtgtctgttgctagctcataataacgccgcaaaacttctccagataagataaaagcagatactgccgttccattccaaagtccttttgcaataagagggcggattaagtcgccctgagatatccattgaaactttatcaatgggagttttattttttctttttctgaaggttggtgtgaattgtactttaggtgtaatacttgtttttggcttaaaatgcagagcaaaaaacatcctgccccacttatcaaaaatggcatctgccaatttaacttctcagttaaaataccggcaaagacagggccggtaacaattcccatagtcataccgagcataacgatccccattgctgaagcttgcctgtgaagaggaaagatctctgcaatcaaagcaaaaatagttggaatcaatgcagccgctgcgatacccccaaagatacgcagcccaatagcaactactaaattgggcgctatagttaatagcagcccatccagtgaaagaaataataaagatgccagcagcaatttaggccggtttatcctatctgacaaccagccaaaaacgggggccataagcgaataagagaaagcataaccagataccaaccaggcagctttatcagttgttgtgttaaatgcctcagctaatggttggagtataggagctaacataaactctgtcgtaccgatgaaaaatacagcacacgaaaatatcagcaaaataaagggtgaagcgacaggcgatgtaatacgtggtgacatatttaagtctccttagtaaaaaatagattgtgtagagggaggccaataggtggttgagttttaagctaatgtgtttcgtattgaaaaataaatatggatgaacagggggatagtttgggtaatgcagatattcaggtgagttagttcagattcactgccagcgattgccggcagtgaggttggtgattattacttatttagcagaggctgcttcaagatcaagtacgctaatcggactttcattttttgctacatcgtggctgaatgcacaaacacgccatggtgcttcagatttagccagattgacaggtctccataaaggagcataacctgatttatcttcacagtccgtggttgctttaggaccgtattttacttgtgtcagccctgaaagttcatatggcagagcttcaatcgttacaaaccaattgtcagttccatggtcatcataacgaatagttggcttagtggttggtggagtattatcaatttcccgcaacatcacagatgcatcttttgcgttctgccacttaccagaattattctgatgaatagcacagagcttatagataccttcgccttcaggcaccagcaggttttccagtggcttctggctggccgaaactggagcgccatatccgcttacatctttacagtcaatttcactgattaatccgactttatagcggatatttttgacatcagcatcttctttaataaccacatcccatttagctttctcgccatcaacaacactttgagtaacccaaggtgaccaaaactggcttctttctaagaaattaccgctattattttcaagtttagacagatccagtttattatctttggttattgcattagcaatagagtctacaggaataaaatagctggcaccttctgccgaaacacctttattgtcttcaatcgtacacggtctgccacttccgcaaccattcattcccggctcggtagtcgtgtttagaataccgataacatctgttttgcctttttcaaaaacaggggaaccagacgttccgccaacgacacctgcacagttaacagagaaaactggggaccacagccatggaattgagctttcatagagtacaggcgcttttccggtaatatcacattcagatttcctgagataagtggaatcatagtcaacattattgacaggaatgtgagttaacacgataggctgttgttccatcgcaagatttttcttcagcttcagtggatgatagcctttttgagccaaatcaccataagttgctttcaattgtaagacagcgatatcttcatatttcatggttgaatataaaatacggtcaacctttattggtgaaaggctgtcttttttatcaatgaagtaatctggtgtaaactcccagtattcagatgctggttgatcaacaatgacctcatttgtattgctgctattttcaacacagtgaccagctgttacgattagtgctggtgtatctttagccggtgtattttcgccagcaatcagggttgcggtacaatgtgaaccacccataaatttaccgacggttttgaatttatcagcaccaggatcagtggatttcattagtggtgcttcattagccaaagcatttgagcatgttgcgatagaaattaaactagccaatagagctttacgataagtcataattttcctcctttaggttatgtcgatgactcggaggttattatcaggattaacattaataagttctatttaactgttttgtgtccttgcatatacaaatccggtaaatgagaaataaataagaaataaaagaaaaactcactgccagctagcgccaccagtgaatttgttgatttataataatttttattgactagaatttccaattagcattaaagaacacaccgttgtccttatggctgcttgataatatgccgttatatcccactgacaattgagtattttcattaatactcagggacgtgccggctttcatgactgccgcatcacgcgcagcggagacgctgttaacagtaaatgacacatcgctgttgctgaaactcaattgactgtcgcgtgcgacattaccgaactgatgttgccagcctaattcgccatacatgccgaccgtcagttgatcctgcgtttgccagttttgatttacacgtaaacctaatgtcgagagggtggcattctttgattgttttttaccggtcagggcagcggcaccgcctttttcattgatgccatcattgcggaaattaacctgggacaggttggcgaaaggctccagattcagccagcctgggttgaccccgtaagcggcttccgcaaataactgcccggtttgtgcaccgtatttggctttcagattgtcagattgacgaccgaaggccactgaacgctcggtatcaaaccggtgccagctataggctacgccggtacgcaaggccagagcatccagctgtttgctgccataaaatgccagatggaagttatcactgcctgcggaagtattatcaccgccacgcagggaagagcgggtaaaaccggtagccatgccgagacgcaggtcattggctacttcccgatctgcgcccagaaatacgccgtagttagacatgcgataaccgttggcttcactgttgctgttggtccgttgccagttactggtgatctgtgcccagaccccgttttgatcagccttgatatcctgactggctaatccagtgtcagcctgacgtaaacgggtattcagggtatcgcgcagataacggctgccattgatttgtgctgacgcgatatcagcgtggatctggccggaagacaattgctggaaggccttgcccgcctgtgccactgtatccgacatcagaatactttcataaaccggatggcccagatgcaatttttccgccgcgttggcgatggcgcgctcattggtggtttttgtcacactggcaaatggggtggcgttacgattgatatctaacatgacgcgattaggctggtagctcagttgagtcccaatgaacaggtagtcaggtgaagcggcagtaaactgaccattgatacctttgtgggcctgtagaatattgtattgctgacccagcaggctgcggacttcgggttttgaaagcaggttactgctgttttcaaacttaacctctaccgagccgcctcttaacgtagctaaaccatcagcataaatacggtcacttaacccagcggtatttctggcgatttcaaccaggtaatttgaacctgattcaaaagtcacatcgttgttaactttcagtgtgccgattaaatcagtattcatggggcctacattaccgggggcaatgtaagaaccgctcttagcgatgagaaagccaaccgtaccgtttccgctgaatgtagcacccttatgtatcgtcacctcagaagtgatgccgccactgacctgcaactgaccctgatcaacgattgtcgggccttgatatgtgctgtttttaccggtcagttccagcatccctttaccggttttagttaatccgccatgaccggagatatcatgactccagtagtcataggtacattcaatgctgttgcagacgcgttctaccgttgtgcctgcttctactttttcccccatgccgacgatattggcgacaaactgcgtatcggtataggaattttcaatataaaattcagcgggaatatcgtccttcgtgataaacattttcgggccatcaatggcatctttcaggttaagcatgccccagccggaaagttcatggatccttttgccttctttattaatgatggttgcggtagttttgaggacatcagaaatttgtcccgccgtcatataagggaaacgttgcatcaggacagcggcggctccgacgacatgaggcgctgccatagatgtacccgtcttgagaccataggaagagtcaatttcaagctcccctctattcagtgcaccttcgtttattgcaccacctgattttggaacgaattcaccggtgctactgtaaactagggtgcccggtgcagataaacaatagctggcggtatatccacaacgggttgatgacagagccagctccttgtcctgtgttatgttggcgacactgagatagtttttcaaaacgtcagggaagaaaaatggtatgcctgcatctatccaggtcacgttatagttattagcatttccggtggaacgaacaactaatttatgatggcgtgctgcacgtaataaacctgctgtaccggagagttcatcgtatatctcagggattggcgaatggcttaaatgatccagtattcctttaatcggttccatttcgttaataacatgatctaatgtcacctgcttatattttactgttccattcggccagcgtttggggtttccccgttcatctacttcatagccaggcctaacgccccaactattattgatgacccggacattactttgaatcatcgcttctgtgcggttctgataactccccaaaaattttgcagtaaccaagtcggcatcaaatgcgactccatgcatctctttgccatcccggtttgcgacaatagtaccggcgacatggttaccatggttaccgaaagagatattgccagatttatcgtcattatatttatagctcacaatatcttccgggcctaatcttctcagtttgtttgcgaactcagcatgaggcgttacggcttgatccagcaccccgacagtgatcccttttccggtgtaaccacgggcataggcataatgcgcaccaatggctgttaatccccactggcgtttaaactcttctgataaccagctatccggcgaatttagctgacctttttcctgatacccgttatccgcgatggaagcagtagcaggtaaaagcccacacaataatgttatccacaaaacaataggttttactgagttgttttttttcatagtgataagcctgtttttcatataatggatttatacacaaagaaaaactcactgcttgccagcagtgagtgggattgtttattgactagaatttccagttggcgtttaagaatacgccgttatctttgtgaccacgtgataagacaccgttgtatcccactgatagtttggtattttcattaatgctcagggaagtaccggctttgatgactgccgcatcacgttcagcagagacgctgttgaccgtaaatgacacatcgctgttgctgaaactcaattgactgtcgcgtttgacattaccgaactgatgttgccagcctaattcgccatacatgtcgacagtcagttgatcctgcgtctgccagttctggttcacacgtaaacctaatgttgagagagtagcattcttcgattgttttttaccggtcagggcagcggcaccccctttttcattgatgccatcgttacggaagttaacgtgggacaggttggcgaaaggctccagattcagccagtccgggttgatcccgtaagcggtttccgcaaacaactgcccgggttgcgctccgtatttggctttcaggttgtcagattggctaccgaaggccactgaacgctc

SEQ ID NO: 90 - DNA, 17314 bp, Xenorhabdus sp.
acgatattaatgtaccaatggcaggatataacgcagaaatagttgttgtataccttataccaatattttttatggttaaaatataaaaagacattcccatgggcccaccaaatatagcagcaatggaaatgataaggtttttttggtccttaaatattgataaaattatctgatgttttttttggtatattagatataaaaaaacatagataagtgaaatagagtcgttcaaaaatgcaattactataggaatgataaaataagaagaaagagtattgtcttttaataatagagccagaataacgccacttaatccccaaaatgtaccagagagtagtccatagaagtttgcagatagtttttcattaagtagcataatcagttatatcttacctgagtgaggaggtatcataatggacaacgactgaattatagcgcgttgcccaaatgagtataataagtcgaaaaataaactattttatgagtttttaaactcatattttactgtcttttcaatacctttttctagtgttgttggtggcataaatcccgtttcagaaatagtattagatttgaactgtgttcgagcacaaaatttttttactcgaatactactaactggaagctcttttcttgtgattttagataatagatcaaaaaaatagccgcccaatattcctactgagtatggtattcgaaattttgaattttttttatctaaagagttgcaaataacttcagtcaattcattcattgtaaagtcaggtttatcaacataattaaaagtatgccgacctgatttaaactgagtagagaactttaaaaaagcagcaacattttcaacatatgccattgactttttgttatttcctgatccaatcattaagaaccgaccagaagctatttgtttaaacaaattataaacatttcctctattgttttcaccgaaaactacagttggacgaattgtgactaacgccctatccaaaattttttcttgccaagcattatatacatgttctgcttctaattttgattttccgtagtcattgaaagcattaaatctaccattctcatcagtttctttttctacgaagccataaactgctacagaagaagtaaaaataatatgttttatgtttagtatttcagcaatgttacaaacattcttagctccaccaacgtttacatcgtaatatagtttaattggagtgacattatccttatgctcagcagctaaattaataattactgttgcgccttctaaaggttttatcagtgtttcttgtttggtgacatcgccatattcccagctattagggaaggattcacttttatatatatctattattttaaatggaatattctctagctttaattgagttgcaagacgagtaccgatgaaaccagaaccacctattatgttaatcattttttataaccttactttatagcgtaaatagtttatatatatattaaataataaactatgtttttttgagaattttttttattaattcttttaagattttttcttttgtgagtaaaaggataatagcatagagaatagaagagtatagtatgctgactgcagtaaaaatagggatgttgtcaaaataccttctaataagggggattcctattgttggcaaagaagcaatgatataaataaatatactttcattaaatattttaaattttattttttctattatatatatatatatatatattgagatacataaaatagagagaagtatcatcgttataaatatactattctgagctgttaaatgctcccttaaatataacttaacacatatatttaaaaaactgaaaaaggctaataactttatgaaaaatttttctttatttagggcgaataatatttgactacctagtatttttagtatggaaaatagtaatatgtaaaaaacaaaaatcttaattacaggagtagcatttgtatattcatttgcgacggttttgaatttatcttcctcagattaaaagaaaactccaaataaggactgatttaccaaagcatttatgctggaaaaatgcgtagtataagttagacatactcttttctatcggaatgtgcaagtatataaagactaggtaaggtcacttgggttaaagttgaagaaaaaacaacaattattaaaatcattttttctacaaggctatagaaagcaacctcttcaaccgatgagtatgaacctcacatgattttatcaaaactgaaaaagaaaaatcctatatctataataaataatgtcgaaagtatttttttaaaatgtttttttaataaacttttttttattaactttatcgaaaaatagattctttttttatataataggatataaaaaaatgaaatcaatacattgcttgcatcaaaaagaatattcaccccacatatataatataatcatctttttctgttaccagtaaatacattaatatcaacgaaatagcccggcaacacattgtttttattgatatgaatttgtattcttcataagcttcatttacccattcaatatccaaagctaaaagcaataatttaaaaataagtatagttgatattatattggctttttggttagttatgaaaaaagtaatgataaggatatatattatcaaagaaaataaaacagcaattatatttattaaatatatgttagaaaatagctcggaagatttttctttattgttccttttttttcctaattccctgattgcataataagagagccctagtacagccatagtatgtatgtatgaataaatactttctgcataattaatctcaccaatattatctggagatagtgtgcgatagacataaggaataattaaggcaggtagagtaaatctaaataaatttaaagcgagtttatatattccatttatagtaattgatttattcatcttaacgtattctaaacattttctttaaaattctatatgcatttcttgctagtgaataaatatctttatttattatttttaggtcagtgatttctaatccttttgatgagttatatgtatgcattgcgattgcatttttaggtaaatctaattttaatacaagttcttcagaataacttttttccgatagtttggttattttcatgatattaactttatatccatacctgcgagaacaatcttgcgaagctctatatatagatcctgtttcatccatataaattgctcctgcattacgagctaaagaaacatcattgataaatggaaaatttgacattcttttaaatggttctgttagtggatcttttgtagtaaatatagttaattcatccccataagaggcaccagatagtttttcacttgtgaatagataccatatatcttccttcttaaacaagattgtatcaactgcttgaatgttatcaataagggtttttactttatcccattggtatggaaagtcaacacacttatataaatcgatagtattattttctgatgattcaggaatcatatataagccatcatcaattttaaatatataaggaaacgatagatgatattctttatctattattggctttacttttatgagcttgtttttatttgtatccaactcaccaacagcgatatatcctcgatttatatcataatttaaagcttcgtaaaacacataatacttatcattatggtaataaataaaagggtcagccattagttcattttttttgtatcttagttttatccatttaatatccccaacttttcggtatgcaaggatccattggtttggcataaaaaatttagttatgatatttttagaaactaagcatgaatagaaaaaaaagttctctataaaaagtagtgttctattagaattggttataattattttttcattaaatcttttttcgaataaatgaattttttcataaagtaaacttttattttttgagaaagaaactctattaggtagtaaggatgtctcaattctttctccattagataatgaaaatattaaagttagcttatcataaaaaaggcaggagtttatgatttcagagttaatcgatctaccttggccaattgttacgtgtatcaactttactccttaatgttaagtttttatttattagatattatggttatttgataaaacacttaattttattataacataagaatgttactataataatatctattgatttttatttttcataaagttatcttttcttattaaagagtatatcttagaaagtattgatgaaggaattaatctaataatagctctaaatgaaaaacatacaattgtgctatatcttttacctatacctaaattcaatattttcattagcatattaatttctgacttgaaatacgctaaacctcttcttcttttaagcatattttctcctgtacgtgctaatacaagtactttatctaaattttctagtttaaagccttttgcgtataatctaatccaaaggtaataatcttccatgtagagtaaatgtttatatccgccaacactaagtacgtgtttttttctgaaacaagtagtcatgtgattgataggatttcgtttgtttataacacagtgaatttcatttcctaaagggacacgccgatagctttttatatttgaaggatctttatcgaattcagcaatatgactaccacaaacagttatctgtggatttttttccatataaatatattgattttcaaatctgtctggttcatttatatcatctgtatcaactctcataataatatcatgggtacatgagttgagtcccacatttaatgcttcacctagtcctttgttttcgctaagaataatatcttttattggtaatttttttttccatttatctataacttcgtacaactctggagttaattccccatcttgaacaataataatttcattagatttataggtttgttcataaatactgagaagagcactatcaaagaattcgggtttttctttaatatagacagatattaatactgaaaaattatacacttatattcctttttattggaaaatataaaatatattatgcatgattatagactgctatttttctaagaatagaattaattcattaattttaacgattctttaaactcattaaaaattttatagtaacttgataaaatatttatatcatatttatcagggtgctgttggtaccaatttgaccaaactttgcattgaaacattacaagtatacttataaattttaaatcaaactctttagaatctaaatcagagaaatcaatggtaccattaactatgcatgaagctatatccatttcaaaaggagctaaatcagcatactcccaatcaataaatttaataccattttttgttttaatgatgttttctctaacaagatcgttatgagaccagcaccatactcttttttcattgaaaatataatcgtagaaatcatattctttaagaaagatttcgttttcagcatcaatatatttcataagagttggaaagggatttcttatttctttctttactgtatatgcagggataaaattattgttaattttctttttttctctgaaatattctataagttccttacttgttacatggcctacgatcccatctatgtactcatacaatgcaaatgttccgcctaatataatacagtcatgccttaatacgaatgattcaacactggatgattgtaaatattttaatacatatttcttattagagtttggagatactactttccaagtcatattggaaataccaccatgcagtggctgaacgataaaatcattgccaacaatttcgcagagttttgagatacatgtagaggttgattctattgggtctcttccaataaatttcataattccaatatcttttccccctttgtagtaatcaatttcacctgcatcatcgctaccttggacatgtaaactaataccaaaaaaatcataaaattgtttattagtaaaaagaggggcagttataactttattaacaaaatctaacgattcaatcatttttattctttgttcataaggaatcacaggttttcttttataagcttgagtatcttcgtctgtagctacgcctacgatcaaaataacattatcatcatcacattgagatttcgcagattgtaatgctctgacatgacttgcatgtaaaaggtcaaaaactccagaagtataaataatatttctcataatcaagatatctttaatttattaattggaaactcataacagaactcaagaaggtctttttctataatttttatttcatttttatattggatatatttactttttaaatctgtattgtttatagatatttttggatcaaaaaatttgtacttattgatgtgttcttcattttttataccacaaaaatttattattttttgaatagtttcatgatatttataaatgaaatcttcaaatggtaatcttaatactttatttttatcttccttatcgaattcttgatgtttcctaatggatttgaaccaattaatgtatttatgaatatcgtcagtggggatccatttttcattccacctgcatttatttaatagatataaatcacgaggatctctatcgattataacaacgcttaaatcgtcaaagtattttaagtaatgattagtatcattgggaggaataagctgatcaaatactacatattcttttgagccatagtttgatgcattaattagtttccttaaatatttttgagtttctttatagaagttttctcttgggtaagcataatacatttttttattgaaaatcttgccataaatttcagcaccgcactctttttttcttaatatttttttttgataaaatctttcaatatagtatattagttttttcattcgattatcatcaataatatcttgatgccaaaatccatcccattctacatcaatgatattttttatatattcatatgtgatttctaagaatttattattaaaaaatttttcatagggataaatgttgctcttgcttagatattctacatattttatgtaattgttaatatggtaacttgaagttagtctattattgttttgaacgattccataatctaaatctctaattccatgaggatcttgtaaaaatctaaattcgaaatttccaaatgagcaaatattagagaattcatttaataaatcagaaacaacgcttgaccctgtaccaccataaccagtacatgtgattatttttggtcctaacatttatttatttgcctcggaaattgtctttacaatatcaaaaatattatgaactgatttttctaattcttgtaatttttgaggtgtaatgatagaaagtttattcttgatttttgtcgttgatatatgttctgtacgctttaaataaataacgtcacatatgtctttcaaatcatcaaaatgaccagaccaatcatctcccatacctaatatacttacattattattaataatatcatctcttttttgttcccaagtgttttcgggaagaaccatatctacatatttgcaagattctacaatttcttttcgttcttcataagagaaaaaagactttttccctttaatttgattaaaatcatcagtggagattacaacaataagataatcaccaagagctttcagcctttttaagaggcgaatatgtcctacatgaaataaatcatatgttccataagttataacttttttcatgatatttcctttgtctgtcttatgatgtgatttttcctaaaaattgatcagtgaaccacgggcgacttaataagtaataaaggtataacatagtgtaaattgagaataatgtactaaaagttagtttttgttttatcaatgttgagatgtaaaaataaaggataggtataagatattgtattagaatataatatcttaaggctatttctcgattaaaggataataaaattgagagtgataatattaatccatacatttttaatatattaacatatgaagtattttctattaggttttttctaaaagataaaaaatataaaaattgagatgaatacaggataatggtcatatagatagtttctatcgagcgacgctcattaaagtctatatgcctagccaatgttctctgtattatatagctatcactacagctatggattatagcctcgcctgtattaaagaaaaaagttattaaagatataaaatagataataactatccaccttatacttgaaatcctggatataattaatagtgctattaatattgagtttgaattatgaataaatattgatgatgtgaataaaataaaagatatgggacttaatctttctttgcttaaataaaatgaaagacctaacaataaaaatgaaaatccaagggcctgtctaaataaattaatacttcctgtgagcattccttggctgaataaaacagcccaaataaatatgataacgtagtatttattttcttttccagattttccatattttatatatgatatgtatatatttgttccataaattaaagataatattgttagatatattgtagagctgttagtaaacaattttattaaatatgttattgctgtaaataaaggctcaaaatcccaattatcataaataaaattctcaacatatgcttcagtatcggatccaatggtgtaatcccgaagtccaaaaacgactacatatattataactataaataatgcaattgagtttgaaatagctgtattttttaaacttgcaataaaaacggttattatgaatgaaaatagagcgaaagttaataaaaagtttggagtgtattcagatatcatcactgaaaaccttgtcccaatctttagctatataggtaatttcaaagaattttatctctgaataagcttggcttatcaacttgtttcttaattttttgtctgtaattagacgctctatcttatcagctaaatcttttgtatcagatatatcaataagtattccattttccatttgtctaattattcttttacctccatttgtttttgttgaaataactgcacatccttgagactgtgcttctattaaacttaacccaaagccttcaaatagtgaaggtaatacacatattgttgattttttaagatgtttttctatactatttgttgaattataaaataaaatattttttaatcttaattgtttgcttaatgatatgaaatgatttttatcacaaccatcaccaataatttctaatttccaatcatgatgtttatattctattaatgcccatgcttttattaaatcatcgacacctttttctttagtgactcttcctatataagttacaatattactatattcatgtttctttcttatataggttggaattggacatggattagagatgaatgtgattttttcatcttttactacatcaggtgtagtttctgtattcttaaagaggcatataacatcatcaaaaacgtcaaatatcatcttcactcgatgctttgttgactttctagccatgtagaatttttcgaattcattatttccaccgtgggcaaaatatactaactttacatctttgaaaaagcctaattttctccaaagatatattggctctatataagctgatttattaacaataagatatgaatttttagcttctttaagaattggtaatataagaaaaaaatttattggtaaagataatatttttttcttaaaaaaatatttttttattttaaaggatatttctttatctaaagaaaaatatggttcacctggaacaacagatattattttacaactaaaccctatttttgaaaaataattggcccatgtgctgattactctgacaacaccaccagcaccaaccatactttcagttaggaatactaattttttattcatactttattttttaagcctgtaattataatatcataaattctttggcagttattatattgaacttcattaaaaaatttatttattttcattctttctagctgaaaatactctttttctaataataatttagatatttcataaataaattctttttggttagttggtttgggaccgggagtgactgtttggtaattaaaatttagtcctacatttttttcatataaatctaaatcatatggtaaaaataataatggcttatttaatattaaaaagtcgaaataaatacttgagtagtctgttattaaaagatcaaactccctaattatatccataatttcattacagatatctgatgataaattttttatccatttagagttttttatttttattttttgtaaatggtgaggccttagacatagtaatattttatttttttctaaatactcttcaagcttcttttggtcaaagtcagaaaatgggaaaaattttgtatcttctcctgcccattcatctccgtaaagacctgatcgccacgtaggtgcatataagattgctttgtcatattcgggtaaattgtaaatgtattcattaattgtactattactttgaaataaagcatcgtttcttggctgacctaatggttttatcttatttttattaattagaaaactctttgaataaatagaggagagatttgaacttgttgaagatagtagtgaatagtgccttgaaaacatttttaatgttaaatatactcttattttcgataatccagagtaacccattatacctattttctttaagggaatgccatgccacaaattaattagagttctttttttgtgcccaaatggtgtttttagtggaaaacctccatctgtaatccaaatttttgcatttgatatttctattatgtctcttgtttttgttgttgttatgaaataatcaccatatttctttattaactcttttctttttgtatcattgtttattatatattttactgctattaaattttcttttaatgagtattcaaataatgctttagaattgaactttatattttctttatcaaatgtgaatataattaattctttctttggcctataaaataatggcaagaaaaaacaaaatagataatttaataattttttcattttataacatatgtttaattagctttggattataggtttagactaaatttttatttagtaagttgggtggggtatctgtttttaggtaaagctattaatatatttgttggaggttttatgaacctcaaaaataaacattattataagctagttcattaatgtattccaatacttttcgattgccttagatggtgttataaggaggaaagaagtgcaaatcaacgttaaaaattgctatttttgtctaaaactcttctataaaatggtgaggattctttgtggtagagaacaatgaatataaaatatagataatatatttattgtgaacgtataaactcatataaaaatatacttgatagcataataaaatgggctgtgatgactgtcaatttcttgactgtattgtgtatacatgtactagctatagtttatatttattatgcggatttatctgatattaatactgttttttattaaatatagatttattactgagtttcatgtttttttaaaacaattgtgtgagtattcatccgaatataatgtgtataaagaatatttatctagtttttctttggtaaagctaccgccctaggttatggctcccagagtgcctattatttttggaattggtaaagactatcttattaagataaaacaagtttatcttttaacaaaaataatgatatcaacaattcgtgttaagctgcgacgagattagtccctcaacgcctcaaggtcaagtataataaccttttttctttaattattacatgctgttattagctatattttagtcaggtcactatctatctcccatgcaacggcaaccaaatcactaacctcaatccacctaaagggctatcctctgcctttacccagccccgatgttgttccaccgcagtttcaactatcgccagtcccaaaccagtcccccctgactcccgatctctagcctcatccgtacggtaaaacggtcggaagatatgctcacggtcttcagggctgactcccggaccatcgtcatcaacggtaatcgtcactccgtgattatcggctttaaatgcaacggcaatatggcttctggagtagcggacggcattgcggacgatgttttctagtgcactaccgagtactgccgggttacagtagataacccaagggccgggaggtgaaacgatatccagcgttttgtgcatctgttcgacttcaaatttggcattttccagtatgtcattccatatcttgttagccttgatgttttcgcgcagtagttcgtttttatgctggttacgggaaagtaccaataggtcgttaatcatgctgtccagtaactgcgcttctgtttcaatacgctccagctctttgctttctccgtgacggcggcgcaataatgctgtggcgagctgtaatcgggtaaggggagtacgcagttcatgggaaatgtcggagatgagacgttgctgagcagttaccatcctttctagtgcactaatcatctggttaaagctgctgccggctgccagaaattcctgtgggcctgattccagttctgggtgttgttttaaattaccttttgctacctgatctgctgcattttttagtttacgtgcgggccttgccaaactccacgccagccataagagtaatggcgcgctgatgagcatagttgctgctggtaacagaagaggacgatcaaacatcagattgataaagtctgattgtggactgtttgtcgggcgaagcagataaaggtgatagtaatcttcaccatctcgtattgaaaatggtcccattatttcgacacgaccatattttttctttttagggtggtcggagttatctgattgtcccataaaattgcgcacgagctgcgtatcgcgcttctcagtgctgataactcgtccttctccggttgcgagaaataaacgttgatcgggtggtacccatttgacaatggcgcgatccagccttagccaccagaacagatcactggggggatggcgggtcaattctgcttcaatatgtctagctaactgatttccctgatggtactcactatctaatagcggagttaattgccgggaatccagcttgggcaccatcagtgccaccatcaggacaagtgccagtgttagccagaagattgcaaatatgcgcgctgttaaactattaatcatttctctgaaaccattaagtatccgcgcccacgtagtgttttgaaccagggtaattcatcagtccggttaggtaatttacgccgaagattagaaatatgcatatctatggctctgtcaaaaggtgttaaccgttttcctaatacttcctgactcaaatgttcacgagaaacaacttgcccaatatgttgagctaacaaatagagcagtgtgaattctgtaccggttaaatccagaatatcgccgtcaaaactggcttcctgacgtccaggattgagttgtagcttatcgatttccagtataggtgtgctgttgtcggcttgttgttcactccagttggaacgacgtagaatcgcgcgtatacgcgctaccagttcgcgatcgttaaatggtttgggtaagtaatcatctgcacccagttccagccccagaacgcgatctaggtcgcttcctctcgctgtcaacataatcacgggagtctgatgatattgacgcagctctttcagggtttcaatgccatttttgcgcggcatcataatatccagcagcagaaggtcaattgaagagtctataaattgtaatgcctgttcaccatcatgtgcgataaccacattgaacccttccatctcaagaagttctttcaataaagctgtcagttcgcggtcatcatcaactaataatatcttatgcattcattcttcctccgagagcaaaatacgataacaaattttgctattccatgactttacgttcttttacatgctctgacgctagtttgcagccgtggggctatattacccgcactgaatcgaatagtgctattcgataaagtgaggaattaccaaaagtgcgtaaaatagcaatgttagctttagcgtcaatacccgttcttggaacgatgatggctctagccgaaactgttgggtacgtgtaacgactctgaggttgattcatcgctttgtctgccatatgacaacagtgattctggcaactttctgcgtaactataactatagttgtgtctttgggggaatcacattaactgaaaagcagcggtaggtgatgtgggttctggtgaaaaaacggtatctgtatgagcaattaataacggatattcagatagaagatcagaagatatacggccttttggtagcaaagaattttgattaagttgcgattagagcgcagcttgaaaaaatagcaagatataatgttgatatcggtgcagaagtttgcgcgtattcgcaatcagatgtatcaagtgctgacgcctgagcaagaaaaagagcttcatagatgctgtcaggtacgaactgcccggtatttgtactgatgttgttataactatctatagaacagcatcaataacgattttccttgccatagacaccatccctgtctttcagccccgtttcggggcttttttttatctgcccttaaacattaattccctttaaaatcaaagtgataatttttcattaagcaactgtagatgatctgaaattttccaagtgtggacactcgcgtggacactttagttatctacagttgcttttggttactcattttctatttctgttttactcattcagccttttctgacagagtgcgagcagcaagccgaaataaatacccaaggtgtttagatgaacggtttcaaagtttcctctcactataaaatatccagtgaaagagatgagtaaaatcagtgcagcttgcttataactgccgttatcatgtctccattgcttacctgattgtttcaggaaaataaatatcaagaacagaaaacctcctaatcctaatatcccggcagcaaaccattcggtcagaaaaatattatgtggccctagggattctttgaatgtccagtttgggtagtttttaacgttatcattataaatttggtcgtagatcttaccgcctgcaccataacctttgagagggttttccagaattaggttgagtgctgagccttgtgtgccgttggtgtaccgatagctgctatcagtttgagttagcttataatttaaagtagcttctttagcgaggtaaccatgtttaatagcaaataaagctgcacaaataataatgatactaacaaacgatgttttccagtttttattcatcaatatcattatgaaaaacataacaaaaacagccagccaagctcctcttgccagtgttcccagcagtacaaaagataccgatagaatcagtaaaattgtcagcacgaggcgaatgtaattctggggcttctgaaaatgccaaagagcaactaatgcggggaagaagaatacaactccatgggctatattacggtgattgtagttcgtgaaaggcataatgccgttctgatagtcctgataaaatagatacatctctttcattgtgataaagagtaatccgagtaaaaatgagccgatgatcattttctggattttcaatttatccgtctggcttagcgctaaagtaatcagtacggcagaaaggaccacatctctaaaaaaaggtgtttttatctcatggaagctgagttttgggtcaggagaaataatgacagaataaatagtggttagtgtgaatattcccaaagccaacacaaggttatttttcagcgcagcgaggcatcctttagggttttttatgatccagtagagcgcagccagtgctatcaaagcaaagaataagtttttataacgagtaacacctgtaacgtagacgagtgaaatataccctcctacgaaaaacgtactccaagataaatgatttctgattgtttctttaaacataaccatacctgaacaaacacggattttagcggatattctctattattttagggtttgaggcacgaataaataacaggacgatcatgtaagttccgtcaggcaggtatcgtaagccgtaaattagggggtatttcagttcttgttataagctatacacttcgtctttcaagttgcctctttgttggccgcgctcgctcaccccagtcacatagttatctatgctcccggggattcactctcttgccgccgcgatgcatcttgaaatccattgtgtatataggcctgttgttatcttagccaatcttgattatcttaccttcccagtctgttcaattaaaaaatcttatcactgttactctatataaaaagggatagggataccctatatgggaaaaattcataaaatcagtttgctgtcgagaagcatgggggcgatgttatcgggcctgtgtcgtgtcctgacaggggtacgtgtgcgatgggttggttgccagccatcgactaagagccggatttattatgccaatcattccagtcatctggatggattagtcatttggtcaggtcttccatctgtattgcgtcatttagtacatccggttgcagctcgtgattattgggataaaaccaaactgcgtcgttatcttattcataaggtattttgtgctgtcttgatcgagcgtcagggagaaaacagtaacagaaaagaaattctggcaccgttggaacgtgttctggcgcaaggggagtctttgatcatctttccggaaggaactcgtgggaacggtgagcaaatcaatccgttcaagagtggtctgtatcatctggctcgaaaatatcctgatgctgaacttatccctgtttatctggaaaatttaaatcgcgctttaccaaaaggaaaaaggatattaatccccgttatttgttcggcgacatttggtcagcctctggataaattggcggatgatgaaagtaaggaagcctttttacaacgtgcccagactgcattggaggagctggtgttatgacagggatagatcatgatttgatgttgttgtttagcggaatttttggggtgctgattattgccagtgtgattggcggtattctgtcactttgttattcaggggaaaaacggaacgcaaccatcgataatctgaatgcccgtattcgtggctggtggatgatgtgtatcgtctgtgtgctggccgtagttatcgggccaatcgggtctgttgtgttgttttctggtatggccctt

SEQ ID NO: 91 - DNA, 16322 bp, Xenorhabdus sp.
taaatggatagttcttcatgatgactggtgcaccaaagtgcttctctgccagataacgctcatgctcagatgacaaatcaacgccccaataaaccgggttttcgaatttatgaccacagttttccagaatttcaatggcatctgtgtaatccaattgaacaaagtcagaatcgacaaatttttccagtcgggtaataacttcactgtcaacgcgctctgcaaagaaagccagatcgtcagcacgctcttccaaagccactttaaagacatatttcagcatttcttcagcgagtttagcgatatcgttcagatcagcgaaagccacttctggttcaagcatccagaattcggccagatggcggctggtattggagttttcagcacggaaagtcggcccgaaggtgtaaaccttacttaatgcacaggcataagtttcaccgtttaactgaccggatacagtcaggaaggcttcacgcccgaagaagtctttactgaaatcaacttcacctttatcagtcaatggcaggttttgcatgtccagagtggaaacgcggaacatttcacctgcaccttctgtatctgaggctgtgatcagaggtgaagatacccagaagaaccctttttcgtggtaaaaacgatgcagtgcttgcgccagtgtgtggcgaacacgtgcaacggcaccaatcaggttagtacgtgggcgaaggtgagcgacttcacgcagatattcgatactgtggcgttttgctgccatcggataagtatcgggatcttccaccataccaacgaccacaatgttggttgcctgtaattcgaaactctgacctttaccctgtgattccacaacagtaccggttacttctacagagcagccggttgtgaggttcagaacttcatcctgataattaggcaaattattattaacgacggcctgtaagggattaaagcaggaaccgtcatagacggcgaggaacgagataccagctttagaatctgtccttgtacgtacccagccgcggacggtgacttcgctgccaaccggaacacgggcttgcagtacatcgactacaggcgctacgctcataaatttctctcttctttataataggtaattaatatagataactagacttactgtaagtcgtgccaaacggcacgatgactccttatcttacttgtcctttcacaggaaacaagtagaaattaagggggttaaggcggaaataaagggaaaagttgttttttatcggcgtaaccagaaagacgttgattacgccaattaaagattggtaaaaactatcctgaaaattacacggcttttttcatttccgggatatcaaatgccctgcgtaatctgttgacaaattcgacatcttcacagatggtttttcccggactgtcagacagtttggctacaggcttaccgttacattcaaccagtttgatcacaatattcagcggttttatccctggaatattgcaggtcagacgtgtaccaataccgaacatgacattgattcgttgatggaaatgacgataaagagccagtgatttttgcaggtccagactatccgaaaataccagtgttttagtcagtgggtcgatacccagtgacaaataatgagcaatcgctttttcgccccagtcaacgggatcaccggaatcatggcgcaggccgttataggcaacagcaaaaggtttatcgaaatcccgtaaaaaagcgtccatagtgatacaatctgtcagggcaatgcctaactggttcggatactcattcagccaggtctgcaacgccgcgcgctggctgttagcgagttcggggctgatttgctgatgagcctgaaaccattcgtgagcctgcgtaccgagcggtgccagatcaagttgttgtgccagctggtagttactggttccaatcagataaggaaaactctctttcagttccttaacaatggcatattgcacttcgtgtgaaaaacggcggcgggtgccgaaatccatcagtttgaaacccgataaatcgatatgttctgctgcggcatcctgatagaacagctcaattaattttctgagctggctgacagccgcttctgctttaatctcaggcgagcgatcgcggtgtaccagttcactaatcagggcaagtaacggtacttcccacaggataacttcacgccataaacctgaaattctgatagcaagctgtcctttatcagtaacagaaacttctacttgttcagggttaaaacggaaggttttgaaccagtccagataatcttgtttaaaaaatggtaaaccagacagatattcagcttcttgttctgtcagagtcagatcagccatcatgttaatctgctggcgtaatgccccggcgtatttaccgagtagttcatcaccacggcagcggaactctgcaacaacatgaatatcgttgtaatggtggtacactgcttgttgcatatgaaatttataagcatcagtatcaagcagtgatttgataatcggggtagcgtctaaagtcatggcgcgtcaggcatcctcgcggagcatttgtgtctgctaaatcgataaagtccgaagagtataccgcgattattctgttattaaagctacataatcgcatatatttttccggacaatacagattaaggttgatcaatttatagatgatatcatgttaaatacaatatgagatggcaagtagcacaaaagtaccaatattctcaaaacaggttttatacctttatttagtaaatgattaacatctgaaaaaagagatttccggattgaaaggatagagtctctgtggcagcgttagcttctcacattaagtaatgaaaaaaggtttcttatgacacaacagcggcttgttaagcatcgtctggattataaagcgccagactatactattacagatattgatctcgattttgaactggatgcagataaaacaactgtaacagcaaccagccaagtaaaacgtctgattaatgatattactccactcattttagatggagaaaacctgacattaaagagtatccatattaatgataaggcatgggagcattatcaggagcaggatggcaaattaatcattgaacaactgcctgctcagtttaccctgaaaatagtgaatgaaaataatcctgcggctaacagtgcacttgaagggctgtatgtatcaggtgatgctttgtgcacccagtgtgaagctgaaggtttccgcaatataacttattatctggacaggccggatgtattggcccgttttaccactcgtctcactgcggataaatccaagtacccgtatttattgtccaatggtaaccgtattgagcagggagagctgagtgatggccgtcattgggttaaatggcaggatccattcccgaaaccctcttatttgttcgcgctagtcgcaggggattttgatgtcctgcatgatacttttactacccgtagtggtcgcaaagttgcgctggaattgtttgttgaccggggcaatctggatcgtgctggctgggctatgacgtcgctgaaaaattcgatgaagtgggatgaaagccgttttggtctggaatatgatcttgatatttatatgattgttgccgttgatttcttcaacatgggagcgatggagaataaagggctgaatgtctttaactccaaatatgtcttagcgaaaacggaaacagcaacagacaaagattatcttggcattgaagctgtaattgggcatgaatatttccataactggacaggcaacaggatcacctgccgtgactggttccagttaagcctgaaagaggggctgaccgtattccgtgatcaggaatttagttctgatttgggttcacgctctgttaatcgtattaacaatgtgcgtattatgcgcgcagctcagtttgctgaagatgccagcccgatggcgcatcctatccgccctgagcaggtgatggaaatgaataacttctatacgctgactgtttatgaaaaaggctcagaagttattcgaatgatccacactttactgggtgaagagcaatttcaggcaggtatccagctttatgtacaccgtcatgatggcagtgcagcaacctgtgatgattttgtacaggcaatggaggatgcttcaaacgttgatttgacactattccgccgctggtacagtcaatcaggtacgccggtactgacagtacgtgatgaatatgatgcagaaaaacatcagtatctgttgcatgtcagtcagatgacaccaccaaccgcagatcagaaagagaaattgcctctgcacattccgctggatattgaactatatgatgaacatggtcgtgtcattccgctacgtcgtgatgggcagcctgtgcatcatgttctgaatgttatcagtacagaacagacatttgtatttgatgatgtaccgtcacagccggtgccttctttattacgtgaattctctgcaccagtgaaactggattatttatatagtgacagccagctgaccttcctgatgaaatatgcccgcaatgaattttctcgttgggatgcggcacaggcactgttagctaattatataaaactgaatgttacccgttatcagcaatcccagccggtagaattgccaatacatgttattgatgcattccgtgctgtattgctggataaagatattgacccagcactggcggccctgatcctgacactgccgtctgaaaatgaagtggcagagttgtttacagtgattgatccacaggccattcatgaagtgcttgatgtcatcacacgtagtctggcaaacgaaatggcagatgaatttgcggctgtgtaccatagtattcacacaggggcatatcgtgtggagcataaggatattgcaaaacggtcattgcgtaatatttgcctgcattatttagcctttgttgaagaccaagcacaggctgataaactagtcgccgctcagtattatcaggcagataatatgaccgatactgttgcagcactatctgcggcaatggcggcagaattgccttgcagttatcaactaatggatgagtttgatcaacgctggcatcaggatgggttggtcatggataaatggtttatgattcaggcaaccagcccggcatttgatgtacttgataaagtacgtagtttgatgagccatcgctctttcagtctgagtaacccaaaccgcacttattcactgctgagaaccttctttgccaataacgcagtcgcattccacgctgagaatggtcgtggttatcagttcctgaaagaagttctgactgatctgaacacgcgtaacccgcaagtggcttcacgtctaattgagccattaatccgcctgaatcgttatgatgaaaaacgtcaggcgttgatgcgtacaacgctagaagaactgaaaacactggaaaacttatcgggtgatttatttgagaaaatcacaaaagcactggaaagctgagtaatgacatttcctccggcttcagccggaggaaattaataaatatcttctgcgttacatttacattttgacaatatctctttaagatgctccgcgcttatttcacagtcaccacaacctgtcattatgctcgcagcgcaggagattgcatgtattatccgcttctaaagaaggcattgttccagcttgatccggaacaggcccatgagcttacttttcgccagctcaaacttgttaccggtactcctttcgaattcctcatccgccagtcagttgccactaaacccgttacctgcatggggttgtcatttaagaatcctcttggcttagccgccggtcttgataaaaatggtgattgtattgatgcctttggtgcaatgggctttggttttgttgaaattggtacagtaactccacgtccgcaggcagggaatgataaaccgagattattccgtgttgttgaagcagaaggtattattaatcggatgggctttaataatctcggcgttgataatttggttgagaatgttaagaaagcaaaatacgacgggattatcggaattaatattggcaaaaataaagatactccggtagagaatggtaaagatgattatttaatttgcatggataaagtgtatccccatgctggttatattacgattaatatctcttcacctaatacaccgggcctgagaacattacagtatggcgaagcactggatgatcttctatctgcgattaaaaataaacaaagtgaactacaacaaaaatatcaaaagtatgttcctgttgccgtaaaaatttcgccagaccttaccgaatctgaattagtagaaatcgcagatagtttaatgcgccatcaaattgatggagtcattgcaacgaataccactttggacagaaagattattgaaggattaaatcactgccagcaggctggtggtttaagtggtcgcccggtgcagctacgcagtacagaaattattcgccgtctttctcaggaattaaaaggtgaaatccccattattggcgtgggtggaattgattcattagtttcagccagagagaaaatggaagcaggtgcttcattgattcagatattctccggctttatctataaagggccgaaattaatcaaagatattgttaatcatatctgaatattttctgcaatctgatgtttaaggttttgtattaaaggcgttgggggtttatttctgcccccaactcatctatattttgtttgacagattaaaagtttatcaactttttaaaattcccattagggcggtgcttatttttaaacaaataaactattttgagcagaaaagggtaaccaatgaaaattagacctgatgatcaatggcgctggtattttgatactgagcataaccgtgtcatgctcgatcttgctaatggtatggtttttcgttctcgttttcctgccagaatgttgactgcttatgtcacgacaatgaaagaaattaacttttctgtcgatgatgcagcgctttattatactttcgaagaatattcccgccgtattaatattgccccacaactcagggctgaattagctttaaatggattggttgcctttcgttttatgaaaccacagatgcctaagagctggtatttttctatctgttctttaataaacaaacctgaacagggtgaaattattcaggttcgtttgcaggaagatggcacagaggcgttatttatggttgctgaagcaggtgaaaatgccagtgtttgtttattagtagagcaaaaactagatctcggagatcgtgtaatgaatttctgtgatccgataaaaataatgaatgaccgtttaatgccttatactgaaccaactcaggcccctatatatgataaggcgatttaaagaattattaatccggctctatgattgatcccaatacacagatccagaaatcagctacaagctgacagttttttctcaatcttaattaactcttaactcactcctgtccattgaaaaccgccggcatttttcgtacataagcgcctcaacactgcgccacaggctatttttcacctttatttttacctgaagcgagcaatcttatgacatgttgctggtattagctataatggcagcaattttttggtggtacattttttagtaaataatagtcttggtgaataatacatgaactctctctttgccagcacggcacgtggactggaagaactgttaaagaacgaactggaaacgctgggggcacaatcttgtaagattgcccagggtggggttcattttaaaggcgacgaacgggtgatgtataaaagtctgctctggagcagattagcatcccgtatcctgctaccgcttaatgaatttaaagtttatagcgatcttgacctgtatcttggtgtccagtctattgactggactgaaattttttcagtagatagcacatcgcagtccatttcagtgggacaaatgaagaaatcagaaatacccaatatggtgcactgaaagtcaaagatgcgattgttgactgttttatgcggaaaacaaagcagcgtcctgatgttgccaaacaacagccggatgtgcgtattaatgtttttcttaataaagaaaaagcaagcgtatcactcgatctgagtggagaagggctacatattcgaggttatcgtgatttagccggtcaggctccactgaaagaaactctggcagccgcagtcgtgttgcgttccggctggagtatgggaacaccgatggttgacccgatgtgcggttcaggaacactgttaatcgaagcagcgatgatggctgccgattgtgcgccgggtttaaaccgtcagcgttggggcttcacatcatggctgaaattcgatgaagctatttggcgtgaagtcaccaccgaggcacaggtgcgtttccgtagaggattacaggaaacttcatcacgcttttgggggctggatattgatcgtcgtgttatggatatggcgcgttcaaatgcacgcagagccggcgtttcgcagctgattgaatttcagcagggtgatgcgagtaagctagaaaatccattgcaggaaggggtaacaggtacgatattaagtaacctgccatatggagagcgtctcgaaagtgaaccggcattgattgctttgcacaatgtattcggtcggatcataaaaaatcgttttccgggttggcgcttatccctgttcagcgcttcaccagagttgttaagctgcctgcaattgcgtgctgagcgcgagtttaaagcgaaaaacggccctttagattgtgttcagaaaaactattctattcaaaaaaatgatgcgattcagcaaaatgaacaagcatcaggcaaacctcagccactggatggtggtattgctgaagattacgctaaccgtctgcgtaaaaatgaaaagaaactcagtaaatgggcgaaacagcagggaattgattgctatcgtttatatgatgcagatttgccggagtataacgtcgccgttgatcgttatgccgacaaagttatcgtacaagaatatgctccgcctaaatcggtagatgccaataaagcccgccaacgcttgtttgatgttattagcgcaacaatgaatgtgctcgggctgcaatctaatcagctgattctgaaaacccgccagcgccagaaaggcaaaaatcaatatgaaaaacttgctgaaaagaaagaattctttttggtgaatgaatatggcgcgaaattctgggttaacctgacagattatctggatacggggttattccttgatcaccgtattgcccgcaaaaaactcggggaaatgagccagggtaaagacttcctcaatctgttttcctataccggatcagcaacagttcatgccggactgggtggtgcgcgctcaacgaccacagtggatatgtcccgaacttaccttgagtgggcggagaaaaatttacaggtaaatggtctgtctggccgtcagcatcgtttgattcaggcagattgtctggggtggctggcccaaacacgcgaacagtttgacctgatttttattgatccaccgacattctccaactctaaacgtatggaagatacctttgatgttcagcgcgatcatatcgatttaatgaagcaattaaagcgcttactccgtcgcggaggaacattaatgttctccaataataaacgtggtttcaaaatggattttgctgaactggagaaattaggtctggtagcagaagatattacagaaaaaactttgtcgcaggattttgcccgtaaccgccagatccacaactgctggctactgcgtcacgctggcgagggaaaataatattatgtcattgattaatctatcgggtgcctggttgtcattcggtgattcgccattattggatgatactgaactccatattgaagaaaatgaaagagtatgtctggttggccgcaacggtgcagggaaatctaccctgttgcgtgtgctggcaaaagagcagccattggatgacgggcaggttatttacgaacaggatttgattgttgcccgcttacaacaggatccgcctcgtgatgtagaaggtacggtctttgattttgtagcggaaggtgtcaaagagcaggcggagtatattaaggcattccatcatacttcacgactggtggaaacagatcctagtgagaaaaacctcaaccgactggcagaattacaggaagtgttggatacccgtaacctctggttactggacagccgtatcagtgatgtattaaagcaacttgctttacctgcggaggcgaaattatcttctttatccggaggctggttacgcaaagcggctttggggagagctttagtcagttcaccgaaagttcttttccttgatgagccaacaaaccatctggatattgagacgattgagtggctggagaatttcctgaaagactttaatggcagtctggtttttatttcccatgaccgttcattcattcgcagcatggcgacccgtattatcgatttggatcgcggaaaactgacgtcttggccggggaactatgataaataccttgaaggcaaagaagaagcattacgggttgaagatctacagaatgcggaatttgataaaaaactggctcaggaagaggtctggatccggcagggaattaaagcccgccgtacccgtaatgaaggacgggtgagagcactaaaagcgttgcgagtcgagcgctcagaacgtcgtaacgttatgggtagtgccagaatgcaggttgaggaagcaacccgttccggcaagattgtatttgaactggaaaacgttaattaccagattggcgacaaaacgttagttaaaaacttttcggctcagattcagcgtggtgacaaaattgccttagtgggaccgaatggttgcggtaaaacaacattactgaaactgatgctgggggatttgaaggcagatagtggacgacttcattgtggtacaaaactggaagttgcttactttgatcagcaccgtgctgcgcttgatcctgacaaaacagtgatggataaccttgccgaaggcaaacaggaagtcatggtaaatggtcgcccgcgccatgttttaggctatctgcaagacttccttttccatcctaagcgcgcaatgacaccggtacgggctctttcaggcggagaacgtaaccgtttgttgttagcccgcttattcctgaagcccagcaacctgcttattctcgatgaaccgacgaatgaccttgacgttgaaacactggagttactggaagaattagtggatggctacacgggtacggtcattctggtaagccatgaccgtcagtttgttgataactcagtgacagaatgctggatttttgaaggcaacggtgagatcaacaactatgttggtgggtatttcgatgctcagcaacagcgggcgcaaaccgtttctttacgtcagtcttccgcaaaaaaagagaaagcagagagtaagccggctaaggttaaagaaaccacaaaacgttcaaataataagataagttaccatttactcagagaattagaacaactaccatcattattggaaacgttagagcaagaaatagaacagttacaagctaaggtcagtgatcctgattttttcaatcagtcacacgaagtcacacaaaatgttctacaggatctggcaaataaagagcagtcgttagagaaagcttttgatcgctggcaggaactggaaatgatgaaaaatggataatgcttgccggtgatatccgacagtgtacagattaccgctatacccgcggtaatctgacaacctgatgatataaagggcagcattgattttgtttatgggagaggtactttgtgttctgacaatcatcagcatgacaggctggttttatgctaccaatgcgatatgctggtggcattgcctgatctggaggaagggaaaaaggctgtttgtccacgatgtgatactttactgactgcaaagtggaaagaaccacataatcaaccgacaggttatgcagtcagtgcattatttatgttattcctcgcctgtctgttcccttttgtcagcatgaatgttgcggggattgtcagtgaaattacactgacagaaatccccaaaaccatgttcagtgaggattattcgagtctagctgtattcttcctgatctttgtgcagcttgtacctgcattctgcatgctttctatcatccttttatgccagaacataaaaatggcgcttcggctgaaaattgagttggcgcgcattttatttcagatgaaaacctggtgcatggccgaaatatttttagctggcgtgttagtcagctttgttaagctcatggcgtatggcgatattgcggttggtctcagttttctgccttactgtcttttttgcttgtttcagatcagagcctttcaatgtctggatcggtactggatctggaatgatataaaatctgcgccgaaaatacgtcttcctctacaaacgggtaaacccggcctaattcagggggtcaggctatgtcagtgctgcacagctattctaccagcgcagaaacatcaatgtccccgttgccactcaaagggccatgcccgtcgccattacagtcttcagtggacaatggcactattgattacatcagccatactttatattccagcaaatatgttgccgattatggtgacacaatcattaggaagtgacattaattcaaccattctggaaggtattattttgctttggagcacggggtcttatcccgttgctctggttatttttatcgccagtattatggtgcctttactgaaaatgctcgctatttgctggttatgctgggatgcaaaaaggcatggcagatacaactctgaaaccatgcattttatttatgaaatagtggagtttgttggtcgctggtcaatgattgatgtttttgttatcgctgtattatcggcattagtacgcatggggcagtttatgagtatctaccccgcaacgggagcaatcttgtttgcttcagtggtgattttaacaatgtttgcatcaatgacctttgatccgcgcctgacatgggacaaagcaaataaaaaatttgagttacggaataatggggaatcataaggtgacggataaagaagaagctttggctcaagccaagatcagcaaacttaagagttggtcacctatatggatcgtaccaattatcactgtactcatcggtgcctggatactattttatcactttagccatcaggggcctgaagtcatattgataacttctaatgctgaaggtattgaagctgggaaaacaaaaataaaaagtcgcagtgtgaatgttggtgtggttgaaagagtatcattaagcgataacctgggtgaagtgattatcaaagctcggctgaatgatggtatggagcgcctattacataaagacaccgcattttgggtcgttaaacctcaaattgggcgtgaaggggtttctggcctgagtacattgttatcgggagtatttattgaattacagcccggtagcgaaggaagtggagaaagaaaattttcactattggattcaccaccattagcctcacctgatgcaaaaggtatgcggctgatcttaaccagtgaaaaagcagggcgattatccgcaggcgaccctgttttgtttcggggttatcgtgttggttcagtggaaacaagtactttcgatcctaaatcccgtctcgccagatatcagattttcattaattcaccttatgacggactattaacaaccaatattcgattctggaaagacagtggtgttgcttttgatgtgtcatcacagggagtcagggttgaggtcgcggcattatccactttatttgctggtggagtcagttttgatgtgcccaaaggctgggatctaggcaaaccggtacaagaaaaagaaatatttaggctgtacgataacgaaagaaatatagagaactcactgtataccgagcaccgggacttcttgcttttcttctctgattcaatcagaggcctacagccgggagcacctgtcgagtttcgtggtatacgggtgggcacagtcgccaaagtgcctttttatgccgacgggatcaaacaacgccttgataacgatttccgcattcctgtcttaattcatatggagcctgaacggtttgagaaagaaattggtgatggcttttacacagataaagaactggaaaaaattatttcccggggcttaagagcttctctgaaatccggtaatttactgacaggagcactgttcatcgatctggacttttacgctgatgaaaaggtatggaaaggcccgagagaaatagcaggttatgagattttacctactacaagtagcggattggctcagatacaacaaaaagtcaccatggcgctggataaaattaatcaaatgccgattgaacctctctttattcaggcaacacaaacattaaaagaaagtcagaaaaccatcaaggctgcgcagaagacgatggatgagttaaatcgtattcttgcgagcaaagaagcgcaggggctgcctaaagatctacataataccttgaatgaattaaaccgtagtatgcaggggattcagccgggttcacaggcttacaataaactggttgataatatgcaacggttggatcaggtcttgcgtgaattgcagccgatattgaagaccctgaacaataagagcaatgcactggtatttgaagcggaagccacacaggatcctgaaccgaaaaaggcgcataattaatgaaaaaactgatgttaaggttggcattttttatacctgctggtttcttactgatagggggaatgttgctttcaggatgtagcagcagccagccacagaaaacttattatcaactacctgttgtcacaaaatcctcagaggtaaaacgggtaaatatcgaacatgaacctcaactatggataaaaaaggtcagtcttgctgattacctagcatcaccgggtattgtttatcaaacaggggatgttagttacatcaatgctacgaatcatttatgggctagcccgctggaacagcagttacaacaaattctgactactcagttgagcgccgcatttccgcaaaggctggtctctgaccagcttctggaaaaaaatgccgacatattggatatcacaataaccgcttttcatgggcgctatgatggtcgggttatcattcagggatactggcttttatctaatcaaaaagagacggttaagcgggcatttaatttagagttgaaacagacagaaaacggctatgcgcaattagtacgtactttatccatgggttataaccagttaattcagtctattgccagccagatatcttatacaaaaggataatgtatgaaaaaagccatttttttcttattgaatgattatgctgattgggaaagtgcgtatcttgcttccagactgaatataaacaaagaatggctggtggaaaccgcttctttagagagcgggacgtgtaaatccataagaggttttagcacagttattatctatcctttagaaaagatcccccgtgatattgaatctgttgtcttaattggcggtaattcatggaatatagaaaataatgagctgaaaagtcttataacgttctatctcacttcagggataattgttggtgctatttgtggtaccgtagattttttagccagaaatggtttattaaacaattttcaacatacaggtaattctcaatatctatggaatgaatataaggagtacaaaaatggagaaaatttcatcaaagaacaaaccgtcactgatagaaaccttattactgcaaatggaacagccgcgatagagttttccgaacaaatcctgaaagccatatatagcgagaaaaaagaagaaatagagaaggaacacgagctattcaaggtaggttattataattattgtaataaatatggcgatccattttcttaaataaaagatgaagaattttatattcctcaggtcagctattagcacgaataaaagttgatacccgatgtcggcactgtatatgccatggaattgattgattaacgtggcaatccctccctgctaaacttaatgacctgtaaagatactgattaccttgcagtagcatgattgcctttgcttagtatgtggtgtagttgtgagcacacttttttaatctgttgcaccacggcatgagtaatgaaaataactatttgattaaaataaatttgtccggtgtatcagtatgatatacgagagctgtttatttgttttgatttaagttttgacccctttaaacaaaggccggtattttcatttttcaagataaatgtagtt

SEQ ID NO: 92 - DNA, 25590 bp, Xenorhabdus sp.
  unsure (1)..(25590): unsure at all n locations
ggcactcaactttgccgctgttaaagccctccgtagctgagcgagttctgctggtggcaggatattgagggaatgaatatcctgttccggcatttcctgtaaggccattaccagcgctttcagtgcggtatccatataagcgttaatgcgagccggattaatctggcggttgcattgtgcagtcagggcaaagccgtcaccaaaatcatcgacatccaatgatagtgggtaattactgcgctcctcactaccggaggtctgaataccctgccatacggctgagtcagcctgttgatcgttatgctggctatgacggaaattaagcaggctgctgaaaaggggctgaggtgcctgaataccactgcaacgctgggcgatggctaatggagtctgctcatgctcaagtaatgtgctgagctgttgataagtttcctgtaccacctgttgtgcagtacgctcctgcaatattatgcgcacgggcagcgtattgatgaacataccaagaacctgagaagtatctgcaccttttagtgatcggcctaatagcacggtgccgaaaacaacatcttcccgtccgctgcattgtgcaagaacctgtgcccatgcgacatggaacagaacggcagcactgacaccctgctggcgggcacagtcgcgtatctggcgcgataacttatcatccagctccagaccggcttcctctatcttatggtgctcatcatggttcccctgcacatcaagtaagttaaacggcagagtgggttcatccacatcgcccagaagctggtggaaatagtcctgatgtttctcaaccggaacggcccggatctgagcgataaagttacgataaggcagagaaggcggcagaggctcattttgcccgagctgtaatatctgcacttcattgaagatcatttccagtgacagatggtcacaaaccagatgatggtaaagcaatgccagatgccagttttcggtatgcggatctttggcaatgctggcggatagtaatggagcattggtgatatccatgcgtatctggcgcgggtcggtcgcatcacgtaattgctgcgctgtatccgtaccggcgcatagctccagttcggtaacgggcaggggagcatgacgataaaccacctgtaccggctccggcagattatcccactgaaatgcgctacgcagaatgtcgtgacgattaataacctgttgcagtgccagcaggaatgtatccagacgtgtccggctgtcgaaagtcatcagcagattatccagataaatatcgccttttgtttccagcaagtggtggaacaaaataccttcctgtaacggccctaatgggtagatatcctgaatattcgccacgccatcaggaacgttggcaacaatctggtcaatattattctgggtcagcgtgatcagcggcagcatgtccggtgtgatggaatggctgtcatcagtaatcagattaggcggaaccatgaaagtgacattgtcactgattgttgtatccgttatgcgtgatgccattgccatcagtgtcggagaagaaaagaccgtactgacttctagtgtaaggtcacgctggcgaagttcttcaatcaaattgacaaccagcagggagtgcccgcctaattcaaagaaattatcatgacggccaacctgttccaggccgagcagtgtctgccagatagctgccagctgctgttctgcttctccctgaggagcctgatattcacggctgataagggctgaactgtccggcgcaggcagggctttgcgatccagtttgccattcgggttgacggggaaggcctccagaatgacgtaagcaccgggcagcatatactccatcaggcggctgctcagttgttcacgcagttgaatgatatccagtgttatttctggttgtgggatcacataagcgaccagacgtttattgccgttttcctcttcgcgagccaccacaaccgcatccttgacgccctcacactgagccagttgtgcttcaatttctcccagttcaatacggaatccccggatcttgacctgaaaatcattgcgctccagatattcaatcgtaccgtccggcagccagcggccgaggtcaccggttttatacatacgggcatcggtttgcggactgaacggatcagtaataaaacgctccgcggtcagatctgggcgattgagatagccacgggcgacgcttaagcctccgatatgaatctcgccggccacgccgataggaacaggctgcccctgagtatcgagaatatagagtcgggtattggtcagcgggtaaccaatcggcacgttctggttcaggcagagtgcccggttttccggtttccatacggtggcaatcacggtggtttcggtcgggccgtaagagtttatccagcggcaggcctgtgtttcaggcaaagattgccaggtattgaaatggcgtaattcggctttttctccgccaacaatcaccagccgtaaagaagggctgaaaccgcagcgaccggccgccatttcctgtacccataaatgccagaatgcggtgggtaaatcggacacggtgatggcctgatcccgcaggaactgaccgaatgccttgtcgggaatacgcagatgagaggggcgcagtaccagcgttgcaccggtcgctagtgtggcaaaaatatcagataccgtcgtatcaaaggatacagacgtaaattgcagcacccgatccgttggagtcagttcatttatttcacgttggacatgaacaaaattgacgacctgacgatgttcaatcatcacccctttcggctgtccggtggagccggaagtgtaaataatataagccagatggtgtggtaacagccccagtgagtgagcgtcaggattatgaaccggctgctgtgccgcggtgttcaggtaatcggtatcgtccatcatccaaacagggatatcggtcgttaagcgatcggctaagtgttgctgggtcagcaataactgcggggcacagtcagacagaatatacgccagccgctcagtgggatagtccggatctaagggcacataaccggcgccggctttcagaatgccgaacaggccgataatcatatccgggctgcggtcaacgcaaatcgccactcgatcatccggtttgacgccggcggcaatcagggcatgggccagctggttggctcgccggttcagttcggtgtaactgagctgctgcccgtcactgaccagcgcaacggactccggtgagcgtgatacctgttgttcgaagagttgttgcagtaacagatcctgcggataggcgacttctgtggtgctgaattcggtcaggagctgtgtgcgttgctgtggcgtaagcagcgctaaatccgcgacttgttgtgtttcatccgccaccatggccgccagcagggtttgcagatgttccgccatccgttcgatggtggtgtgctcaaacagatcactggcatattccagttcacccactaatccgttctcgctttcactgaaggacagtgacacatcaaactgggttgtttttttggttaagagcagctcgttgatggtcaggtctggtaaattgaattctgatgaaccggaagtattatccagcgccatcatgacctgaaagaccgggctatgactcaggctgcgcggcggttgtaatgcttccaccaactgttcaaaaggtaaatcctgatgagcataggcggccagcgcatgggctttgacctgcgctaacagggttctgaccgttgggttgtcttccagtctgacccgtaacgccagcgtattgacgaagaagccaatcagcggctccagttcatggtattggcggttggcgacaggggtaccgattacgatatcctgctgaccgctcagtcgggacagtaaaatcgcccagcctgccagcagggtcataaacagggtagtaccgtgccgctggctcagggtgagtaagcctgcctttaattcatgcggcagggtgaaaataacctgatctccgcggtagctctgctccagaggacgagggtgatctgttggcagttccagtaataccggcgcatcctgtagggtctgacaccagtaattcacctgttgtgctaatttgtcgccctgtaaccattgccgttgccatacggcataatccgcatactgaatgggcagacgggggagcggatcaggctgttgctgacagaaggcgtgataaagcgccgaaaactctttgaccagcacattcagtgaccagccgtcagaaacaatatggtgctgagtccccagcagaatatggtgttcatcgctgattttcagcaattgggcgcggactaacggcccctgtgtaaagtcaaaaggctggtcagcttaggcctgatcagccgctttaagggcgatttgctgctcagccggggataacgggctgagatcctgcgatatcagggaaaagccccagctggggttgccaataatctggctgggttctccgtcaataacggcaatcgtggtacgcagaatttcatgccgggctacaatcctgtccagcgcggcctgtaacgcggcctgattcagctggccccgcaattctagtccgccgtcaatgtggtaggctgcctgtgcagcgctgtccagctgggcgaggaaccataaacgctgttgggcccaggaaaggggcaaaggtttctggcggtctgcgggcagaataaccgactgagtggattggatagcattccccagagactgggctaaatctgccagtgtggggtggttgaagagatcctgcaaggtcacttcaatgttcagtttttcccgtaaacgggctgcgacctgtacggttaacaaggagtgcccgcccagctcaaagaagtggtcatggcgtccgatatgttctactcccaataaactctgccaaatatcggccagtgtctgctccatttctccctgcggttcagcatattcacgctggacaatggctgaactgtccggcgcaggcagggctttgcgatccagtttgccattcgggttgacggggaaggcctccagaatgacataagcgccgggtagcatatattccaccaaacggctgcttaactgttcgcgtaactgaagtaaatcaagcgtaactccaggctgtggtaccagataagccaccagacgtttattgccgttttcctcttcacgcgcgactaccactgcatccttgactccgtcacactgagccagccgggcttcaatttcccccaattcaatgcggaatccccggatcttgacctgaaaatcattactctccacatattcaatcgtgccgtccggcagccaacgagcgacgtcaccggttttatacatacgggcattcggttgcggactgaacggatcagtaataaagcgctctgcggtcagatcagggcggttgaggtagccacgggcgacgcttaatcctccgatatggatctctccggccacgccgataggaacaggctgtccctgagtatcgagaatatagaggcgggtattggtcagcggatagccaatcggcatggcgttggtgaggcagaattcatggttatccgatttccacatcgtggcattaacggtggtttcagtcggaccataggagtttatccagcggcaggcctgtgtttcaggcaaagactgccaggtattgaaatgacgtaattccgctttttctccgccgaccagcaccagccgtaaagaagggctgaaaccgcagcgaccggtcgccatttcctgcatccataaatgccagaacgcggtgggcaaatcggaaacagtaatagcctgatcccgcaggaactggctgaatgctttatccgggatacgcagatgcgccgggcgcagtaccagcgttgcgccggtcgccagcgtagcgaaaatatcggcgactgtcgtatcaaagcaaacggaagtaaattgcagtacccgatctgccggagtcagctcattggctgcacactggacatgaacaaaattgacaacctggcggtgttcaatcatcactcctttcggctgtccggtggagccggaagtgtaaataatataagccagatgatgtggtaacaggcccagtgagtgagcgtcaggattatgagccggctgctgtgctgcggtgttcagataatcggtatcgtccatcacccaaacagggatatcggtcgttaagcgatcggctaagtgttgctgggtcagtaataactgcggggcacagtcagacagaatatatgccagccgttctgtcgggtagtccggatctaacggtacgtaaccggcgccggctttcagaataccgaacaggccgataatcatatccgggctgcggtcaacgcaaatggcgaccctgtcatccggcttgacgccggcggcaatcagggcatgggccagctgattggctcgccggttcagttccgtgtaactgagctgctgcccgtcactgaccagtgcaacggactcaggcgaacgtaacacctgttgttcgaagagttgttgcagtaacagatcttgcggataagcgacttctgtggtgctgaattcggtcaggagctgtgtgcgttgctgtggcgtaagcagggctaaatcggcaacgtgttgtgtctcatccgtcaccatcgcagccagcagggtttgcaggtgttccgccatccgttcgatggtggcgtgctcaaacagatcgctggcatattccagttcacccactaatccattttcgctctcactgaaggacagcgacacatcaaactgggttgtttttctgtctaaaggcagatggttgatggtcaggtctggtaaattgaattctgatgaaccggaagtattatccagtcccatcatcacctgaaagaccgggctgtgactcaggctgcgcggcggttgtaatgcttccaccaactgttcaaagggcagatcctgatgagcataggcggccagcgcatgggctttgacctgcgctaacaacgcgctcaccgtcgggttgtcttccagcctgacccgtaacggccgcgtattaacgaagaagccaatcagcggctccagttcacggtattggcggttggcgacgggggtaccgatcacgatatcctgctgaccacttagtcgggacaataaaatcgcccagcctgccagcagggtcataaacagggtggtaccgtgccgctggctcagggcgagtaagccggcatttaactcacttggcagggtgaaaacgaccagatctccgcagtaactctgctccagagggcggggatgatctgttggcagttccagtaatacaggcgcatcctgtagagtctgacaccagtaattcacctgctgtgctaatttgtcgccctgtaaccattgctgttgccacacggcataatccgcatactgaatgggcaggcgggggagcggatcgggcagttgctggcagaaagcctgataaagcgtcgaaaactctttgatcagcacattcagtgaccagccgtcagaaacaatatggtgctgagtcaccagcagaatatggtattcatcactgattttcagcagttgggcgcgcactaacggcccctgtgtaaagtcaaaaggctggtcagcttcggcctgctctgccgctttaagggcgatttgctgctccgccggggataacgggctgagatcctgcgatatcagggaaaagccgctgtcagggttgccaataatctgacgggtttctccgtcaataacggcaatcgtggtacgcaagatctcatggcgggccacaatcctgtccagcgcggcctgtaacgcggcctgatttagctggccccgcaattctagcccgccggcaatgtggtaggctgcctgcgcagcgctgtccagttgcgcgaggaaccataaacgctgctgggcccaggaaagaggtaaaggttgctggcgatccgcaggcagaataaccgactgagtggattgggtggcattccccagagactgggctaaatccgccagtgtggggtaggtgaagagatcctgcaaggtgacttcaatgttcagtttttcccgtaaacgggctgcaacctgcacggttaataacgaatgcccgcccagctcaaagaaattatcatgacgaccaacttgctccagaccaagtagtgtctgccagatatcagccagtgtttgctccatttctccctgcggttcggcatattcacgctggacgatagcagaactgtccggcgcaggcagggctttgcgatccagtttaccattcgggttgacggggaaggcctccagaatgacataagcgccgggcagcatatactccatcaggcggctgcttaactgttcgcgcaactgaagcaaatcaagcgtaactcccggctgtggcaccagataagccaccagacgtttattgccgttttcctcttcgcgagccaccacaaccacatccttgacgccctcacactgagccagttgtgcttcaatttctcccagttcaatacggaatccccggatcttgacctgaaaatcattgcgctccagatattcaatcgtaccgtctggcagccagcggccaagatcaccggttttatacatacgggcatcagtttgcggactgaacggatcggcaataaagcgctccgcggtcagatcaggacggttgagatagccacgggcaacacttaatcctccgatatgaatctcgccggccacgccgataggaacaggctgcctctgagtatcgagaatatagagtcgggtattagtcagcgggtaaccaatcggcacgttctggttcaggcagagtgcccggttttccggtttccatacggtggcaatcacggtggtttcggtcgggccgtaagagtttatccagcggcaggcctgtgtttcaggcaaagactgccaggtattgaaatggcgtaattcggctttttctccgcctacaatcaccagacgtaaagaagggctgaaaccgcagcgaccggccgccatttcctgtacccataagtgccagaatgcggtgggtaaatcggacacggtgatggcctgatcccgcaggaactgaccgaatgtcttgtcgggaatacgcagatgtgccgggcgcagtaccagcgttgcaccggtcgccagtgtggcaaaaatatcagataccgtggtatcaaaggatacagacgtaaattgcagcacccgatccgttggagtcagttcatttatttcacgttgaacatgaacaaaattgacgacctgacgatgttcaatcattacccctttcggctgtccggtagagccggaagtgtaaataatataagccagatggtgtggtaacaggcccagtgagtgagcgtcaggattatgaatcggctgctgtgctgcggtgttcagataatcggtatcgtccatcatccaaacagggatatcagtcgtcagacgatcggctaagtgttgctgagtcagcaataattgcggggtacagtcagacagaatataagccagccgttctgtcgggtagtccggatctaatggcacgtaaccggcgccggctttcagaatgccgaacaggccgataatcatatccgggctacggtcaacgcaaatcgccaccctgtcatccggtttgacgccggcggcaatcagggcatgggccagctggttggttcgccggttcagttccgtgtaactgagctgctgcccgtcactgaccagtgcaacggactcaggtgagcgtattacctgttgttcgaaaagttgttgcagtaacagatcctgcgggtaggtgacttctttcgtactgaattcagtcaggagctgtgagcgttgctgtggtgtaagcaacgctaaatcggcgacttgttgtgtttcatccgccaccattgccgtcagcagggtttgcagatggtccaccatccgttcaatggtggcgtgttcaaacagatcccgcgcatattctaaatcaccgactaatccgttttctgtgtcatagagtgtgagagtcaaatcaaagtaggcactttctctgaccagaggaagttcgctcaattttaatcctgctaactcaaactgcttttgttctgattggttatcaagagtcagcatgacctgaaaaatagggctgtggctcaaactgcgggtaggtcgcagcgcttcaacaagttgttcgaagggtaaatcctgatgtgcataagcgcccagtgcacgctttttcacctgtgtcagcaactcactgacacttaagttatcacttaactgaatacgcaatgccagcgtattggcaaagaaaccgattaatgattccagctcaggttgctgacgattgacaatgggtgttcctatgaccagatcgtcctgcccgctgaaacgggaaagtaataccgcccagcccgccatcagggtcataaatagagtcgttccatgacgctggctgagatttttcaaactcgcactcagttcagcaggaaatgccagctcaacacggttacctttataactctgttgtatcggacggggtttgtctgtgggtaattcgagtaattcaggagcatcctgtaactgctcccgccagtaatttaactgtgtttcgagccgttcgccctgtaaccattgctgttgccagagtacgtaatcagcatactgaagagataattcaggcaatgggtccggttgttcctgactaaaagcctgataaagggtggaaagttcctgaattaataatctgacagaccagccatccgaaatgatgtgatgctgtgttaataacagaacatattcatcttcagccaaatgcaataaatgacctctgagtaatggcccacagataaaatcgaaaggtctgacagcttcgtcatgagcacgcttttcgacggctgcctgttgttctggctctggtaaatggcggatatcctcagacgtcaaagcaaatccactgtcggggtgcccgataacttgccgggcggttccgttagtggagataaacgtcgtccgcaggatctcgtgacgggcgacaatcctgtccagcgctgcctgtaatgcgctctgattaagctgaccctgtagatgtaatcccacaggcatgtgatatgccgtttgagcagatgaatctaactgcgtcagaaaccagagtcgttgctgtgtccaggacaaggggatatcacccttgcgtggctgggggaggatctcagttttttgcgtgtattgacgggagagcttggcggctttggctaactcaagtagccttttccgttcagctaatggtaaagaaattaattcattattattcattgttaagtaccattcgagagccagatttattccatcgattcataaagaccctgtagggatcctgcgtcaaattgcattaattgagcgttgataatgcactcttcaagctgactgattgagggatgtgcaaacaattgttgaatggaaaggtcaacctcaaaaatttcattaaccttggactgaagttgcagcaccagaagtgagtgcccgccgagttcaaagaagttgtcatgacgaccgacccggtctattttcagtatcgtccgccagatatctgccagttgttcttcggtttccccttgcggtgctgcatattcctgagaactgactgatgagtagtccggagcaggcagtgcatggcgatccagttttccgcttactgtcagcgggaaagcctccagcatgacaaaggcgctgggaaccatgtgttcgggcaggctactactcaactgctcccgcagttcggagatgcctggtgtgatgtctgagtcaggaacgatataagcaaccagccgcgtatctgccgtatcatattcacgggcaatgacgacgacttgctgaacccccgcgcactgagccagacgggcttcaatttcacccagttcaatgcggaatccacggatcttgacctgaaaatcgttacggcccagatattcgatattaccatctgacagccagcgtcccagatcgccggttttatacagacgagcgtttgggtcagtgacaaaaggatcagcgataaagcgctctgcggtcagttcagaacgattcaggtaaccgcgggacacgccggaaccaccgatataaatttcacctgtgactcccagaggagtgggctggccattagggtcaagaatatagattcgggtattagccaccggtttgccgatactgggaagtggcagggagctatccaccggacagaaagtggcttgaacagtacattctgttggcccataggcattgataaaacgggtcgtttttatctgctgtaaacgcgaccatacggcaggatgaatggcttccccgccgattaatgccagtttgggctgataaccggtactggtgcctaaacccgcgtttaacaacccgtgcagctgcacgggagtgcaatcaaacatatctactttatgatgttcgaaataacgccagagctgtggcccatcggtacggatagcgttcggaataatgaccagcgtatgaccggcaagcaattgcgaccagctttgcaacgaggcatcaaaaacaatgctggcattcagcgctacgcgacttgacggagcgagatcgagcatcaactgtaacccgatgtgcaggttgatgacgttgtggtgttctaccatgacccctttgggttttccggcggagccggaggtgtagatcacatacgcaagatggtgcgagttcagcccaattgtacggtgatcgggattcgtatccggcatcgggttaaaggctgatgaattgctgtcatccagcagcacgattgtcggggcattttccagtcggtcagtcagggaggactgagtgagcagcgcgacgggagcggcatcttccagcatataggccagccgttcagccggataggccgggtcgagcggaacatatgcggctccggctttgagaatacccagtaatccgactatcatttccgggctgcgctctacacaaatagcaattcggtcatcgggttgcacccctaacccaatcagataatgagccagttggttggctcggcgatttaattcatcataagtcagctgactgtcgccataaaccagcgccatcgcttctggtgtatggtcagcctgttgctcgaatagctggtggatcagagcatctttcgggtaggagacgttagttgcattaaaatcactgagtacctgctgaagctggtgctcgtccattaatggtaaatggctaataacctgctggtcatcatctgctatagctgctaataaagtgaaaaaattgtccattagctgagtgataaactcagaatcgaacagcttggtatcgtaatgaaaaccgcaattaatctgctgatcgatttcaatgagattgatcattaatggaacaggcatttcagcataataaggatatgggaaagagcggagttttgcgcctccccagcctactgtggtggtaccactctgatccatccataacgatgtcaggttactgacatatctgggttgctggaaagtcatggttgtctggaaaactggatgggtatccgcattgcgctgtaatttaatgtgctccagtattttcgcaaacgggtatttttgattctcaattgcctgacgaatgcttttagcagcctgtaatatatgttcctgtactgtcatctcacccttgatctgggcgcgtaaggcaaccggattgataaattcaccgacgactttgccccagagagagcggctacgaccgggcatgatagagccgaccagaatatcatcctgacctgtatagcgatgtagcaggagttgataagcagccagaaaaattgcaaacaggctattatgatattttggtgtcagtgcaattaattttgcggccagtgtatcggggagtttacgagcaaccgtaattttatttgctacaaaggagggagcactgtcgcttgatttgctgctgacgggtaattgtaattcggttaactcaccactgagattatcaacccagaatttctgttgtttttttgcattgttactattaagccactgctgttgccaggtaacataatcctgataactccgttccgcggcaggaggtaattcctgtccggttaaaagtatgccgagttcttccaataatatccaataggaccagccatcaacggcaatatggtcaaaggttaataccatgacacattcctgatcatggcattgataccaactaacataaatacgcagcggattttcgagatcgaagggataccagcagtcattgtggactagctgttgaagcgtttctgcatccagatcccgggcatcatgttttttgattgtaacaattgcattttctgctatttgatatcccagtttaccgccatattgaccaaaactagcccgtaacatagggtggcgttttatcagatgattaagtgcttcttctaatttctcagcagttaatcctctgactctggcacaaaatgcactattattctgccccctctgggccgggttaatttgatattgaaaccaacgactgctttgtgcttcagataaagcaaatggtttcaatgtttcaggatgattcattttatagctccccttttatgggcatatggaaaaacaaaattttcagaactgataaaacaaaaaaaatggaacagaattaaagccaaagacattggctaaataaatttcagagagatatattttctaatgagaaaattaatgtggcgaaagtattacacaataaaaaaaataataacgataatatgagtggagttttctaggaaagttatgaattaatttcatctttatataaactatttcttgtctttattattgaatttaaggtaaaggattatatattaaataaacttattttacagagtgactgcaatgttattgtatatctaattttattagagccccggtgtctttcgtattgctgctattaatttttaatattaaagagcatttcaaataataatacataatttaaaaaaaaaagcctgttttaatgaggctcttanaatgggcgaggatatatttattataaatatttttttgatctggatcatttttagctaggatgatgactactggtttttatctccttaatatgtccatcttccaatttaatcacacgctctgcaatatcaaaatatgcatcatcatggctaataacaataacagtcttgccacgggattttagctcaggcaataactcagtatagaagattcttttaaatacagggtcttgatccgcagcccattcgtcaaatagatagatagggcggtcttctaaataagcagcaactaaagctaatcgttttctctgaccagcggaaagatcagtcgttgaaaattgcccatcaattactttgactttgtgacccatgttcaaagcttcaatatagtgagttgctttttcagtaacattcgtgccggtatttagtagttggtcgaatagatgataattggagaaaacggccgaaaaatactggcgataatgttcattatttgtttcatccattttggtgccattcagtatgatagagccggattcttgttcgaacaaaccgactaatagcatggcaagtgttgtctttccactcccgttacctccgataataaaaactatttcaccctgagaaatagtcatgctcatagggcctagtttaaattcccgatcttctttgtcagtggtgtagtggtgaataatatcttttaactcaagagataatggtttttcggttaaaaatgggtccggggtgttagcctgctgtatatacaaagattcttcaagctcgctatccagccgcttcattttttgtagtgagacttccgcttgccttaattcaggaattgcaccgataacctcactgatagggccagacaaaaacagaacaatcagagttaccgtcattaaagttgccggttcctgaggcagccagataggaataacaaaaatcatcagaccgataacaatgtagaagatcacagagccagcattcagtacccaggcatagttattgtttgccttgatacagatctctttaaattttagtgcagcaggggaaataactttgtcaataaacgcattacctttttgtctattgagtttcagttctttgctgccatcgatcagttgctgaaagttgaggtagatcttatctacctgctcacgcatttcttccatcaggcgtataggacgtttttccaaaaaatagaagagagaagcggttaccagacagacaatagccaaaatgataaatagctgccatgaaatccaggctaaataaccgaaacaggcaatgataagtgtgatattaccaaaaacagttggagctagcataaaagagtggataaacacatcaacatctttagtcagaacggccagcaacccatgtttcccaaagcggttcaattttttaaaaggtgcccgtaatattttattactcaggcttagacgcagggaataaatggttgcctgagtcaaatgtgacaacataatttctgatagtgttttcgtaacaaaaaaaagaatacagagaccaaaaaagttccagataaatgaagtcagattaaccgttcctgtaattccctggctaatcataccgactactgacgccccggaaaatccactgatcaatgcaaatattgttgatagaagcagcaatatccaagattggcgataaagataaacaattagagtcataaactaaaccattataggaggttataggtaatataaaaaatatacaccagccaatgagacccgtaatggttatttttttctggtgaaaattcaaggaagatttatgaatgaaaatatgaataaagttaaaccgtgataaatttcacagttcacatataacgggtttttccttaattattagaggtggtcttttttcttaatagatagaagttattccaatggtggaggctgttggatcttgttagtaagaatgattaataagaacatggataaatagtcacgcttagttacacaataacatcactcataatatgaatataatgtatcagagaaacgtaggtgggaatgattgatggaatattgagagtgattctagtttggttaataaaaatcaatagttgatgatttatttttattttgaacaaggaaatagtaattctctagagtgttaactgcataatgtaactggtaaggtacgtgatagtaataaatggtgttaggtaatcatacataagaaataaaaggaaaataagatgttttagaaggagtcatttttcatatcctgtgatttctaagttgtatttttgctataaaagataataagtcttatttttaaattcgagtgcatgttatatctgaaccagtctctctatttgattagagggcctggttttttatgttattcaaacaaaccaagatcctctgagaggtggcgtggtttttttattattgtgctgctttatgaaattcattaagtatatactctgtttatatttttgagttaaattaaaatttctaatgttttaatggatgaagatcacaataaattttcgatgtaataagttacaattaaagtttatgattagataatcattggaaataaataataaattcaatattaactttaacaatataatggttcttatttttaattatatatttttatgagtaaagcatggagtctatttactatagttaagaatgtgataattgctatattaatagcaaaacggtttaatgaaagttaatgttgagtgatatatggtaatgacgtagcagagatgaaactatgaataagagtattaattctacattgtggtttttaaggctaataatgttttaatcgttgaagtaagtatcctaattataatgaggtaatatatgaaagagttaaatcaaaaagaaatggagcaagtcaccggtgctggcgggaaagagatcgctgaaggggtttttggtatgggtgaaaaaataggtgaaggcataatagacgccttggaaaaatttggtgttatttctaaagagacgggagagcatattaagggagctatgaaaaaaggtgtagaattcgtagactcaattattgatgctatttaattgatagttcatatggcaagagtcacccattctattttattagagtgggtgattttttatagaccacaaattattctctatagagtaaaaaaccttttctcaccagagattactctgggatattatcaattctggcagatggggttattagggagccccagagccagagatagaaataacacgctctgctgattgaatagttgagggcctgtgcgcaatgataattcgggtaatttttaatgaagatactgactcattaatatatgactcattatctaaatccagatggctggttgcctcatccataaataggatgcttgggcgacgatacagcgctcttgcaatcaatagccgttgtatttgaccacctgataatccattacctaactcaccaatcagtgtttcatatcccattggcatcaataaaatatcatcatgaatatttgcacgtttagcgcattcctgaatgaagtgtacatctggtgagtgggtaaacccggatatattttctgcgatagaaccggaaagtaatttatcatcctgtaaaacacaggcaatacattttcggtagttatttaaaccaataatattaatatcaagcccattcattagaattgtacccttatttggctctaataaaccactcatgagcttcattaatgtcgtttttccggccccggacggtccaacaatggcgatactttctcctgcattaatatggagattaaaaccagaaataatcggctttgataaattatcatattgataatgtaaatcatggatggttaaattaaccgcttttcctgaaaaaccaagttccctatctggcgtttctttttctgtatcagtaagtacgatatcggcaattctttcattatgtaagtttaacatgcgtaatttcattgccatatcaattaaattacttgctctgtcagcaaattgcccacgatatgaattaaacgctacaaacatcccaagtgtcatatgattatctataactaatgatgctcctaaccacaaaatgataatttgctcactcgtggaaataaaagtcttaataatattaaaaatggagcctatcttgttaagtctggtatttgaattaagtgtatcaatattcaggtttaaccaggattttgcccggctatcacataaccccagggcctttaatgtattaatgctatacaatgtttccataaaatgagaattggctctggcatctttaactatttgctcctcagagagctgcctgaaatattggtaggttataaatcttatgatgatataaatgatagtaaaccctaatacaacccaaacgagccagttaccataaagcagcatcataatgaaaacactaaccagcataatagtatcaataatgctgttaataacattttgagtgaaagttgtccgtattacactgagtgagccaaagcgggactgaatatcacctaatttacgtttttcaaagtatgctaaaggtaatttcattaaatgatcaaatacaccggatttccattgtacatccacaaatgcttccatagtaatggatgtccagctacgtaatgtggatacactgactctaaataagatgaaaaagagtaaaccacagcaaataatcttcagaaggctatgatcctgagcgataatgacatggtccatgattaattgagttccgaccggcaagagtatattaattgcttctataaccagagataagaaaaatattttactcagtgtcgatttaattccctgaatattggtcagcagggagataatgcgtaatttattttgtttttttatcggaacaaattcactgcctggccacacttctaatgcaatgccagtaaagtgtttggatacttccgcaaaagtcatcacacgttgcccgaatgcaggatcatggatagtgattttatttttttttacattaaccagaacgacaaaatgattcatgtcccaatgcaaaatacagggtgtttttagtgcttgaagctcatcaagatccagtgctacagctctggttttgaacttaaggacagtggcaatattgatcagtgtcgtcagcgttacgcctcgggtggaaatcccgaattggctgcgtagactggataaatcaatttgtagcccatgataatgaaatatcattgctaaactggctaatccacattcggccgcttcagtttgcaaaattttaagaactcttcttctgaatcctagatttaatctttcggtgatagtttcaaaagaggttttattcatttttgagggcctgataatgtttttttcatgtcataaaatggtgagaacatccactgataaagcggtctattttcaaggaaaaaggtcgactgagctttcattccgttggataaatataattttcttccgttataattgaactgttctttcttcaggttaaccagaaccttataatatgattcggttttatctccggggacatttactggtgagcttctgtagtgagacatttcttgagcagtagcaggaatataagaaatgttattgatgtcccctgaaaattggccaaacttttcaaatgggaaagcatcgtagcgtatattaatgccatcgccttttttgatataaggtaagctgctattaggaacccacaaaattaaataataagttggtttcacatcatctgggcttacctgaactaaattatcatttgtgacaaccatttgaccatcggtaaaattcagggattcaatccgcccatcaataggagaggtaataaatatcgatccgctgacattcatttcagttaatttttgttctaaatcatccttttggattttatattgtgaaatctgtttatcaaaatcggctttttgcagcatgatgtcactattcagactggtgatttttaatgaatcgctgatgtattggctatagaggttttgatacatattttgttgctggtaataagaataaccgtagctattaaaccgatcttttgtaataagcccccgttcctggtagactttatagttcttcatattttcttttgcaaattcaacgccttgacgtgcgttttctacaataatcctattcttttcatgcgatagctcatactgatttttttgttcctcaaggctggctaaagtaacgcttttattatgttcgaggttttcaatgattttgtttatttgtgttagctggtttttgagggagttttgtgcgttggtgctggttttaccggattctgtcacttggctgatatcaacctgataaattttctggcctttttttacgatatctccgactttaacaaatgattttaagataaagccttgttgagaggctgaaatatttattggatgaggattagtgatgacttcgccataaacattaatacgtcttgcataatttccaaaagtaataaaaataaataaaatagtcagaaaaacgattgaagcaacacaaataacccatgcgggaacttttgctattaatattgccttacccgtccatctggattttttattatctaatgcttcttgcctaaataacttattcatagcagtcatttatggttaatcttcatgttttatttgattgaaatgttcctgaatgtaactgagagctgccatttatcaggtaatgtctgtagattggcggatttgatattatcttactgtaatatagttaacatgaatgttacttaaaccattaatgaggtttcctgggcttaatgcgggaactattgaatataagatagataagggaaaagctggaaggaaagagttccttccggaataaattaatcgtgttgccagagtattagttaaatatattaccaatcctatcaactaaacctaagtatgctgtttttaatttgcgtaattgataagcatctgtatatttccagtcagggctccaattatcgctactaaaactacatatatttaattcaccaagctctttttgcaattcctcgatttgttgatggacacaagtacttgaagcaaggcttttgcccatcccttaaccgttccagcgaatattagttgcggcggaatacgggatcgggataagtactgagtcaccattgaccaatgtatcgttattcatatcaggctggaatttcattgcagtaactccacctttggtaaatgtgacttcattattcagagtatttttataaaatggtaagcggcgaaaaaaaataacttgcaagacgaaatgtatatgagggttaaatatttggctagtagtaaaaagagggttttggtaatattttttagtgcggcgctgaatctgtttatgatatcaacgccgcctttatattaaaactcgtcagttacgagttgttccactgaagtggaaggagggaaggggatagttacacgttaaacaggaaattcatgacatcgccatctttaacgatatactcttttccttccgcacgcattttacccgcttcttttgcaccttgttcacctttataggtgatgaaatcttcaaatgagatagtctgggcacggataaatcctttttcaaaatcagtatggattttacccgctgcttgtggtgcggttgcgcctaccggaattgtccaagcgcggacttctttcacacccgcggtgaaataggtttgcagattcagcagttcgtacccggcgcgaataacacggttcaggcccggttcttccagccccatttcagccatgaattcttcacggtcttcatcttccagttctgcgatatccgcttcaattgctgcgcaaacaggaacaaccacagagccttcttttgcagcaatagcacgcacggtgtcaagatgtgggttattttcaaaaccatcttcattgacgttagcaatgtacattgttggtttcagggtcaggaagctcaggtaacgaatagcggctttctcttctgcactcagatctaaagcacgcaacatgcctgcctgctcaagatgcgggagacatttttccagcgcggctaattcagttttagcgtctttatcgccccctttggcttttttctggacgcgctggatagcacgctcacaggtttccagatctgacagggccagttcagtattgataacgtcaatatcagcagccggatcaacctgaccggaaacgtgaatgatattgtcattgtcgaagcaacgtacaacgtgaccaattgcttcagtttcacgaatgttggtcaggaactggttaccgagaccttcgccttttgacgcgccttttaccagaccggcaatatccacaaattccattgtggttggcagaatgcgctgtggtttaacaatttcagccagcttgtcgaggcgtggatccggcatcggaacaacaccggtatttggctcgatagtgcagaaagggaagtttgctgcttcgatacctgctttggtcagcgcattgaataatgtagatttcccgacgttaggcaggccaacgataccgcatttgaatcccataaatttatcacctttgattacttatacaccaacaatgaagatgctctttgtctggctgaaaagccatagggcataacctgtcggtgagttatataaaattggcgccattatacacgcaatagcatcacgtgccatgtactcccgtcaggcactggctttaaatgcgtgcaggcggttaatggctttgctcatgccatctttcataataatatcagtacagcttaatgcttcagcgatagcatcatcaatcagcttttgttcaccgaccggtggcttgccaagtacaaatcctacaactttgtttttatcacccggatggccgataccaattctcagacgatggaaattaggattattaccaaatttgttctggatatctttcagtccattatgcccgccattactgccgcccagcttcatttttgccacacccggcgggagatcaagctcatcatgtgcaaccagaatttcatccggctggatacggtaaaacccggccagggcaagaacagccttaccactgaggttcatgaatgtcgttggcaccagtaggcggacatcttgcccgttcatattaatgcgagcggtataaccgaaaaatttactttcttcttttaaggactggttatggcgctgtgctaataaatcgacaaaccatgctcctgcattatgacgggtctgagcatattcagccccggggtttgccagaccaacgattaattttatgttactcacagtttggtttcgcttattggcattaatgtattaaaaaaagaggcctagtttacctgcctcagagcttgagtacaaaattgattatgatattaggtaataggatgtcagtattaaaaataagttaaaatttgtacagcttgtgatcactggcgcaataacctttttaatactatggctataataagtaggaggcatccgctttcgtgcttttgagttcgtttgtaaacaaattacgttcacaaaaagtattggaggttggctatgggacgtaaaaaagcgtttattctgggcaatatttttatgggattaggtatggcggggatgcttattagtctggcctatgtcttgctcagtcatatatttagtattaaggaatctgaattttttgcgggagttgcactggtaggattatttgtcggtgcacttatttggttgggtggcgctagtcttggaggacgggagcatattacggataagtattggtggttgaaaaattatgatgagcgctatcgtcgcaaaaaacaacataagcattcgtaattttattaagatatatttatattttgatataacgctattattagcattgcccacaatataaaacgaatattttgttagctgaattattcacgtatttcaagttgcagctgataacgctgcaacttgaaaggtaataaatcttagaatattgcattaattcccagactgaaattataatcaggctcctcaccgctaccttcattacgggttacagtaataaaactatgtaggttattgaccagtcccatattcatcccaagggtatattgccgccagtttttgctccgtttactactttccactacaaaggaagttttggtggcattaatagcactgcgtattttagtgctgagatccccgaactggcgattaaactgaacagcagcataaggattaaagcgacctaactgagtgtctacacgccagcccagtgtaccaatttcagacgtatatctctgaccagaaaagtgcatggatgtactgttattttcgtgttcacgataaccgttaacatcacctttatcccagataaactgcacaatcgggctggtagtgatgacttcattaacaggaatattccagttggcagtaatgcggacaccccattgtttacccaatgttgaaccaatttctctacgggtagcttcaccaagctcaatattacggatcaggctatcgtaatttatatgtgaatagtggagatcaccactcagccacgcattgttatagagattccacagtccgtaagcgatgacagtatgtcccagtccttcataagtgtagattggagcgaaagtttgctcatcccttgtagggaaattgaactctcccagaattag

SEQ ID NO: 93 - DNA, 19492 bp, Xenorhabdus sp.
  unsure (1)..(19492): unsure at all n locations
tttgatgagtaagcaacgagtatgtctacatctactggagttttggcccataactgggcatttgcgattttcttgataggtgctcttggattgactgcgttcatgttactgggagcgtactttcttgggggcagagcaaaagccagagcaaaacacgtcccttatgaatcgggtatcgattctgtcggcagtgcccgtcttcgtctgtcggcgaaattttatctggttgccatgttttttgtcatcttcgatgttgaagccctgtacttatacgcgtggtcagtctctatcaaagagagtggctggctgggctttgccgaagcaagtattttcattttggtcttattagccggcctggtttatctggctcgcatcggagcactgaactggacacccgcacgttcaagacgtcaggttagccatcccagtgctgatgttcataccgctgatgtcagtaccactaatgctaataccaccaatgttaataccaacaacagtcaaatgcagtaatagcgaggcataaagatggattatacgctcacccgcatagatccgaacggtgagaatgaccgttaccccctgcaaaagcaggagcttgtcagcgatcctctggagcagcacgtccaccgtagtgtctatatgggtaaattagaacatgctctgcatgacatggtgaactggggaagaaagaattccctgtggccttataactttggcctttcctgttgttatgtagaaatggtgacttcttttaccgcagttcatgacgttgcccgtttcggcgctgaagtactgcgggcatctccccgtcaggctgatttcatggttatctcaggtacatgctttgtcaagatggcacctgtgatccagcgcttatatgaccagatgctggagcctaagtgggttatttcgatgggagcctgtgcaaactcaggcgggatgtacgacatttattctgtcgtgcagggagttgataaatttattcccgtcgatgtctacattcccggctgtccaccgcgtcctgaagcctatatgcaggcactgctgttattgcaggagtctattggcaaagagcgccgtccgctgtcgtgggtcgttggtgatcagggggtttaccgcgcaaatatgcaatcagaaagagaacggaagcgtggtgaacgtatcgcagtgaaaaacctgcgtaccccagatgagatttaaggcttttagccgctattttaaggctttttagccataaaaataaccagagcaatgtcgtaactcaagattatgttgcgatcacattaaaccctgatcaagcgttgtggtgaagaatgatgacagatcagatagcgcaagaaagcgtacggcctgcttgggaaaccagagatcacattgatgatccggtcgtaagtgagcttaatcgccaatttggccctgatgcgtttactgtccagcctacccgcactggtatgccggttgtctggattaagcgggaacggttaacggaagtaatcacgttcctgagaaagttgcccaaaccttatgtcatgctgtttgatttgcatggcgttgatgagcgtcagcgttctcaccgggaaggtctgccggcggcagatttttcggtgttttatcacctgctttccatcgagcgtaaccgtgacattatgttgaaagttgcacttgatgagagagacctgaatatcccgactatcacgtcaattttcccgaatgccaattggtacgaacgtgaaacgtgggaaatgttcggcattacatttaatggtcatccgaatttacgtcgtatcctgatgccacctacctgggaaggtcatccgttgcgtaaagagtattcagctcgcgccacggaattcgatcctttcatgctgaccaaacagaaagaagatctggaaatggaagccctgactttcaagccagaagagtggggcatgaaacgtggaaccgaaaatgaggacttcatgttccttaacctcgggccaaaccacccgtcagcgcatggtgcattccgcatcattcttcagcttgatggtgaggagatcgttgattgtgtccctgacatcggctatcaccaccgcggtgcggaaaaaatgggtgagcgtcagtcatggcacagttacatcccttataccgaccggattgaatatctggggggatgcgtaaacgaaatgccttatgtacttgcagttgaaaaactggcaggtattgaggtgtctgagcgtgtgaaagctatccgcgtcatgctgtctgaactgttccgcatcaacagccatctgctgtatatcagtacctttattcaggacgttggtgcgatgacccctgtgttcttcgcctttaccgaccgtcagaaggtttacgatgttgttgaagccattaccggcttccgtatgcatccggcctggttccgtatcggtggtgttgctcatgacctgccgcggggctgggataaactgctgcgtgacttgctgaactggttgccgaaacgtttgaattcctatgtcaaggcggcgctgaaaaacagtgtcctgaaagggcgctctgtcggtgtcgctgcctacaatgcgaagcaggcactggactggggcgtgacaggcgcgggtctgcgtgcaaccggcattgagtttgatgtgcgcaaatggcgtccttattccggttatgaaaatttcgactttgaagtaccggttggttacaacggcgattgttatgaccgcgtgatgctgaaagtggaagagatccgtcagagtatgcgcatccttgagcagtgtctgaaacatatgccggaaggcccgttcaaggctgatcatccactgaccacgccgccgccaagagagcgcaccctgcaacatatcgaaaccatgattaaccacttcctgcaagtgtcatgggggccggtcatgccagccaatgaatcattccagatgattgaggcgactaagggtatcaacagctactacctgaccagtgatggtagcaccatgagttaccgtacccgtatccgcacaccgagtttcgcacatttacaacagatcccttcggtgatccgcggcagtctggtttccgacctgatcgtttatctgggtagtatcgattttgttatgtctgatgtggatcgctaacgatgcaaagtgaatttaacgcaaacaagcaggcacgccttgatgtggtcaacgtgacagacactcagataccggatgagtttgtactgagtgccggggaacgtgatgctatcgagcaggaaaaacaccactacgaagatccgcgtgcagcgtcaatcgaagcactgaaaattgtacagaaacagcgtggctgggtgccggatggtgcaatttcagccattgcagaagtcttaggcattcccgccagtgatgtggaaggcgtggcgacattctacagccagatttatcgtcagccggtaggccgccatatcattcgttactgtgacagtgttgtttgtcacattacgggctttcagggggttcaggcggcaattgaaaagcatttgagcatccgtccgggtcaaaccacgacagatggtcgtttcacattattgccaacctgttgtctgggtaactgtgacaaggggccgaccatgatgatcgacgatgatacccatagttatgtgaaacccgaagaaattgaaaaattgctggagcagtatcaatgacaacgcattcaggagtgaaagaaattatccgcacagcggaagctcatcccctgacatggcggttgcgtgatgatcaacaacctgtctggctggatgaataccgtagtaaaaatggttacaagggagccgaaagagcactgaagggcatggctcctgatgaaattaccacactggtgaaagatgctggcctgaaagggcgcggtggagcgggcttttccacggggttgaagtggagcctgatgccgaaagatgaaagcatgaacattcgctatctgttgtgtaatgccgatgaaatggagccgggaacttataaagaccgtcttctgatggagcaattgccgcatttgctggtggaaggaatgctgataagtgctttcgcgctgaaagcatatcgcggctatatcttcctgcgcggtgaatatgttgaagctgctgttcatctgcgtaaagccattgaagaagcgaaagcagcagggttacttggcaaaaatattctgggcagtggttttgattttgagctgtttgtgcataccggcgcgggacgttatatctgtggtgaagaaaccgcactgattaactcccttgaagggcgtcgtgccaaccctcgttccaagccaccattcccggcaacagcaggtgtctggggaaaaccaacctgcgtcaataacgtagaaaccctgtgtaatgttccggctattcttgaacacggtaaagagtggtacatcggtttaagtgaaggcaaaagtaaagatgcaggcactaaactgatggggttctccggccgggtcaaaaacccgggcttatgggaactgccatttggcaccactgcccgcgaaattctcgaagattatgctggtggtatgcgtgacgggcttaaatttaaagcctggcagccggggggagcaggaaccgactttctgactgaagaacatcttgatctgccgatggatttcgaacacatcgccaaagccggaagtcgtttaggcaccgcgctggcaatggcagttgatcatgagatcaatatggtttccctgacccgtaatcttgaagaatttttcgcccgtgaatcctgtggctggtgtacgccatgccgtgatggtctgccctggagtgtcaaaatcctccgtgccattgaagaagggaaaggccagcccggtgatatcgaaacactggagcagctctgtcgcttcctcggccccggcaaaactttctgtgctcatgctcccggtgccgtagaacctttgcaaagtgcaatcaagtacttccgcgaagaatttgaggcggggattgtcaccagagattacgggaataccagcctgattgcaggcatccagccaaacctgcttaagcagcgttggtagagaagaatttttgattaacgcctgccacggcaggccattgggaagcatgctgactatggctacgatacatgtagacggcaaaaattatgatgtaaacggggctgataacctgttacaagcctgcctctcgctggggcttgatatcccttatttttgctggcatccagcgctgggaagcgttggcgcttgccgccagtgtgcggttaagcaatatcagaacgcggaagatacacgtggtcgtctggtgatgtcctgtatgacgccggcctcagatggtacgtatatctccattaatgatgaagaagcaaaacagttccgcgcaagtgtggtggaatggctgatgactaaccatcctcatgactgtcctgtctgtgaagaaggtggtaactgccatttgcaggatatgacggtgatgacggggcattcattccgtaaataccgttttaccaaacgcacacacaagaatcaggaactggggccatttattgctcatgaaatgaaccgctgtatcgcctgttaccgttgtgtccgctactacaaagattatgcggatggcacggatttgggtgtttatggtgcacatgacaatatctactttggccgccctgaagatggcacgctggaaagtgagttttccggtaacttagtcgaagtttgcccgacaggggtatttaccgataaaacgcactctgaacgttataaccgtaaatgggatatgcagttcgcgccgagtatctgccagcaatgcagtatcggctgtaataccaatcccggaaaacgttacggaaaattacgccccattgaaaaccgctataacggcacggttaaccactatttcatgtgtgaccgtggccgctttggttatggctatgtcaatcgtggtgatcgccctcgccagccacaacagcttcgtggtgatcagtggatntcactgaatcctctccaggtaatgcagggtggggcagatattctacgtcaggcgaaaaacgcgattggtatcggctcgccgcgtgccagtatcgaaagtaactttgcactgcgcgagttagtaggtgcggagaatttctatagcggtatttcagcagaagagcagcaccgtctcgatatgatgctggaaattctgcaacagggtggggtttatacaccatctttgcgggagatcgaagattacgacgctgtattagtgttgggtgaagattttgacacagacaggtgcccgcatggcgctgtcggtacgtcaggcagttaagggtaaagcccgtgaaatggcggcagctcaaaaagtagcggactggcaaattgcggcagtgatgaatattggtcaacatgccaaatatccgctgttcctgaccagcgttgatgatacccgtctggatgatatcgcagcgtggaattatcgtgcacccgttgatgatcaggcccggttcggctttgccgtggcacatgccctgaatagcattgcccctgctgtcgatgacctgccggatgaactgaaagcgaaagtagaaatcgttgctcaggcactgcgtggagcgaaaaaaccactgattatcagtggcagtaatgcaggcagtgataccctgattcaggctgcggctaatatcgcatgggcactgaaagacagcggagccaatgtcggtctttcctatgtagccgcctatgcgaacagccttggtctggcgatgatggaggcacagtcgctggatgttgctttacagcgtattgctaaaggtgattcagacacggctatcgtgatggaaaacgatctctaccgtcatgctcctgctgataagattgacagtgcactgggtagcctgaaaaacctgattgttgttgatcatcagcataccgccattatggataaagcccatctgatcctctctgcttccagtttcgcagaaagcgatggcacactggtgaatcaggaaggtcgtgcgcagcgatacttccaggtatatgagcctgcattctatgataaatccgttgttatgctggaaagctggcgctggatgcactctctgcatacaacctatacacagcgtcagacggactggactcagcttgaccatgtgattgaagcttgtgtcaaagaaatgccgcaattcaagggcatcgttaatgctgcaccggatgccacattccgtatccgtggtcaaaaactggcccgttcacctcatcgttacagtggccgtacagccatgcttgccaatgtcagtgttcatgaacagcgccagccgcaagatattgatacggcgtttgccttctcaatggaaggaaacaacagcccgtttgcggatcgtcagcaaatcccgtttgcatgggcaccgggatggaactcaccacaggcctggaataaattccaggcggaagtgggcggtaagctgcgtttcggcgatcccggtgtacgcctgattgagacagtggatggtggtctgaactactttgacagcattccggcagcctttagtgcgcagaaaaatgaatggtacatcgcaccttatttccatctgtttggtagtgaggagctatcccagcgggcagatgtcattcaggagcgtatgcctgaaccgtatgtaatgatgaaccgtcaggatgctgaacatcttaatgtgaaagaaggttccatgatggaatttgattgttcggggcagcaattgcgcttagcggtgcgcctgagcagcaatcttgctcagggtcagattggcctgccattgggaatgccgggtattccgccggttctggcaggcagagcagtcaataacttacgggaggttgcataatgaactggctgactcccgaattgactgaggttttgatttctgttcttaaagcagttgtcatcctgctggttgtggtggtctgcggagcattcatgagtttcggcgaacgtcgtcttctcggcttgttccagaatcgctatgggccaaaccgtgtggggtggggcggctcattacagcttgtcgctgacatgatcaaaatgttcttcaaagaagactgggcaccacgtttctcagaccggatgatctttactctggctcctatcgttggtttctgctctctgttactggcttttgccattgtaccggtcagcccgacatggatggcggcagatctgaacatcggtatcctgtttttcatgatgatggcgggtctggctgtttatgcggtattgttcgccggatggtcgagtaacaacaaatactcgctgttaggcgcaatgcgggcatcagcacagacactgagttatgaagttttcattggtctgtccatgatgggagtcgtcgcacaggctggctccttcaatatggtggagattgtgaactcccagcagcacctgtggaatattatcccgcagttctttggcttcctgacattcgccattgcggcggttgcagtatgtcaccgccacccctttgaccagccggaagcagagcaggagctggcagatggttatcatattgaatattccggcatgaagttcggtatgttctttgtgggtgaatatatcggtattgtgacggtgtccgctttaatcgtcacactcttctttggtggctggcatgggcctttcctgcctccattcgtctggtttgcgctgaaaacagcatttttcatgatgatgttcattctgatccgtgctgcgttaccgcgtccgcgttatgaccaggtgatgtcatttggctggaaaatttgcttgccgttaactttactcaacctgctggcgactgccgcagtgattttgtacaacgctcaataaaggggtgattaaaccatgacattaaaagagttattggttggtttcgccacccaggtacgcagtatttggatgatagggcttcatgccttccataaacgcgaaacaaaaatgtatccggaagaaccggtttatttgccaccccgttaccgtgggcgcatcgttctgacgcgtgaccctgacggtgaagagcgttgtgttgcctgtaacctgtgtgcagccgtctgtccggtggggtgtatctccctgcaaaaagccgaacataaagatggtcgctggtatccggagtttttccgtgtcaacttctcacgctgcattttttgcggactgtgtgaagaagcctgcccgatacggctatccagttgacaccggatttggaactgggtgaattcaaccgtcaggatttggtgtatgaaaaagaagacctgctgatttccgggccgggtaaataccctgactataacttttaccgtaagtcaggtatggcgattgatggcaaagacaaaggcgaagccgacaatgaagccaaacctatcgacgttaaaagcctgttgccataaggagcgatattcatggaatttgcattttatatcgcagggttgattgccattctggcaacactcagggtaataacgcacaccaatcccgtacatgcgttgctgtacctgattatttccctgctggcgctttcagtcgtgttcttttctctgggcgcttattttgccggtgcactggaaatcatcgtttatgccggggcgatcatggtgttgttcgtctttgttgtgatgatgctgaaccttggtaaatcagtcgctgatcaggaaagacaatggctgaagccgagagcctggattgggcctgtaatcctttcgtccattttactggttatcctgatctttgctattcacagcctgcctgaagctgcaatcagtggcgaagtggtcagtgccaaagaagtgggtatcagtctgttcggtccttacgtactggcagtcgagctggcatccctgctattactggcagggcttgtggtggcttaccacgttggtcgtgaaagccgtcagggtgaagtactcagcaatcgtgtggaggaccaataatgatacctatggaacatggtctgattctggcggctattctgtttgcattgggtttcacttgcctgattatccgtcgtaatctgctatttatgctgatcgggctggaaatcatgatcaatgcttcagcgctggcatttattgttgccggaagctattggctccagcccgatggtcaggtgatgtacattctggccattacactggcagccgccgaggcgagtatcggtctggctctgttactacagctataccgtcgtcgccagaacctgaatattgatatagtcagtgagatgcgcggatgaacttactctatttaacaattctgttgccactgctgggatttttgctgctggcattctcccgcggccgctggtctgaaaacctgtcagcgaccgtaggaatcagttctgtcgggctggccgcattggtgactctttgggtcgggatggatttccatactcagaatgaagctggcgggtttgtctatagccagacattatggaactggatgagcgtagacagcttcagtattccggtcaatctggtattggatggcctgtcattaaccatgctgagtgtggtcaccggagtcggttttctgatccacacttatgcttcatggtatatgcgtggtgaagaaggctattcccgtttcttcgcttataccaacctgtttatcgccagcatggtggttctggttctggcagataacatgctgctgatgtaccttggttgggaaggggtagggctgtgcagttaccttctgattggcttttattacaaaacgcctgccaacggtgctgcggcaatgaaagcctttatcgtaacccgcgtgggtgacgtattccttgccatcggtatgtttatcctctacgaccagctgggtacgctgagcttccgcgaactggcggtactggcaccgcagcatattgaagccggttccacagcaatcacatgggcaaccctaatgattctgggtggtgcagtgggtaaatctgcccagttgccattgcagacatggctggcagatgcgatggctggcccgacgccggtctctgctctgatccacgccgcaacgatggtaacagccggtgtctatctgattgcccgcagccatgctctgttcctgatggcgccagatattctgcatctggtggggattattggtgccgttaccctgctgctggcgggttttgcggcactggtacagacggatatcaagcgcgtacttgcctattccaccatgagccagattggttacatgtttctggcattgggtgtacaggcatgggatgcggcgattttccacctgatgactcatgctttcttcaaggctctgctgttccttgcttccggctcggtcattcttgcctgtcatcatgagcagaacatcttcaaaatgggtgggctgagcaaacgtattccgtttgtctatctctgcttcctggtgggtggttcggccttgtctgccctgccgttgctgacagcaggcttctacagtaaagacgaaatcctgtggggcgcgctggcaaatggtcatatgaacctgatgctggcaggtctgataggtgcattgatgacctctttgtataccttccgtatgatcttcattgtgttccacgggaaagagaatacgaaagcgcattcagttaaaggtattactcatacgctgccgttgtcagtgctgctggtactgtccacatttgttggtgctttgattgaacaaccgctgacaggtattctgccgggtaatggtgcgcaagggcatgatggcaagatgacgctggagattgtttccggtgtggttgctgtgctgggtattttgctggctgccgcgttgtaccttggtaaacgtagtttggtcaatgcaattgccaacagtgctccggggcgtttcttctcgacatggtggttccatgcctggggttttgatgctctgtatgactgggtatttgtgaaaccattcaaaggtattacacagctgttacggaatgaccctctgaactcactgatgaatatccctgcaatattgtcacgctggggcaataagggactgggtttgagtgagaacggacaggttcgttggtacgctacctctatagggttgggtgcagtgctggttttagctctgctgcttttggtttaattaagggacacattgcgccatgctactaccttggctaattcttctgcccttcatcggaggcctgctgtgttggcaggcagagcgcttcggcacctgtgtgccgcgttggatagcgtctcttgcgatggggctgactctgctgctttctctgtacctctggatgcagggaggctatacgctgaccaacccacaaggcattccacagtggcaatcagaatttatgatgccgtggataccgcgctttggcatctccattcatttggctttggatggtctgtcactcttgatggtcgtcctgactgcgctactgggtttaatggcgattctctgttcgtggaacgaaaaccagccgtatcagggtttcttccatctgaacctgctgtggatcctcggtggcgtaatgggagtcttccttgccattgacctgttcctgttcttcttcttctgggaagtgatgctggttccgatgtacttcctgattgcactttggggtcacagaggatcacagggcaaaacccgtattacggcagcgacgaaattcttcatttatactcaggccagcggtctggtgatgctgatttcgattctggcactggcattcatttaccacgatgcaaccggtgagtggtcattcagctatgaaaaactgctggataccccgatgtcacatactgttcagtatctgctgatgctgggattctttatcgcgttcgctgtgaaaatgcctgttgtacctttgcatggttggttgccggatgctcacagtcaggcaccaacggcaggttctgttgacctcgcggggattttgttgaaaacagcggcatatggcttgctgcgttttggtctgcctctgtttcctcaggcttctgcggaatttgcaccaatcgcgatgtggctgggtgtcattggtatcttctacggtgcatggatggctttcagccagaccgatatcaaacgcctgattgcttacaccagtgtttcgcatatgggcttcgttttgatcgctatctataccggcagccaactggcttatcagggtgcagttatccagatgattgcccacggtctgtcagcggccgggctgtttattctgtgtggtcagctctatgaacgcctgcatacccgtgatttgcgtcagatgggtggcctatggggacgaattcagctgttgccggccatatctctgttctttgcggtagcaacattaggtatgccgggcaccggtaactttgtgggtgagattatgatcctgttcggcagtttcggtaaatttaccctgattgctacggtatctgtctttggtctggttttcgcctccgtatatgctctgtacctgatgcagaaagctcactatggtacgccaaaatctgatgatccattgccacggatggatgcacgagaaatttccattttgctactgctgggtgccctgctggttattcttggtttttatccacaaccgattcttgatacttcggcagcggcaatgagcaacatccagaattggtattcagcttcacttttaactacaaggccgtaatttgccatgacaataacttctgaacaattgatcgcactgttgccgctattaatcgtcggattgacggtggtggttgtgatgctgtccattgcatggcgacgcgatcatttcaccaacgtcaccctgacggtaattggcctgaatctggcactgctttctctctattttgtcgggcaacaggaaccgatggatgtcactccgttgctccatgtggatcgctttgccatgttctatacagcactggtgctgattgcgagccttgcaacgacgacatttgcctattcgtggctggaaaattatcccgataacaaagaagagttttacctgctggtgttgattgcagctgctgggggcattctgctttctgcagctaatcacatggcatcgttgtttatcggtattgagttaatcactctgccactgtttggcttgattggttatgcattccgccagaaacgctcactggaagcgagtatcaaatatatgctgctgtctgcggcggcatcctcgttcctgttgttcggtattgctctgctgtatgctgaatcaggcgatttatccttcgcatcactgggcagaagcctgagcgacagcaaactccatgagccgctggttctggctgggctggggatgatgattgtcgggctgggtttcaaactttccctcgttcccttccagctttggacgccggatgtgtatcagggcgcgccagcacctgtatcgacctttctggcaacggcgagtaaagtggcaatctttgctgttgtgatgcgcttgtttgtacaggcacctgtaacagacagtgaaactctgcgtattgtactcacggtgattgcaattgcctcaatcctgtttggtaacctgctggcactgacgcagagtaatatcaaacgcctgcttggttattcatccattgcacatctgggatatttgctggtggtcttgatagccattaaagatcacaaactggcagaagaaaccgccggggtttatctggcgggttatctgcttgccagcattggcgcatttggcgtggtcagcctgatgtccagcccatacagaggccctgatgcggaatcactgttctcctaccgtggtttgttctggcacaggccaattttatccgctgtcatgactattatgatgttgtcactggcaggtataccgctgacatttggttttatcggtaaattctatgttatcgcaacaggtgttgaagccagactgtggtggttgactggcgctgtagtattgggaagtgcgattggcctttacttctacctgcgtgtgatggtgagtttatacctgccagcaccaaaagcactgaaccgtgataccccaagaaactgggcccgaacttctggtggtattgtggtactgctcactgcattactggtcttgctcctcggtgtctggccacagccattgattgagatcgtccagcaggcgaaaagcgtgatgtagggtttactctcaagcaataaagccccggttatgactgaccggggcttttgagtttattgggttgcagcagcttgttcgaaaagatatagcacaatcatattaatatgattctgctatatatctggataacttcatcacaatatccggcaatgattttagctaaaagttttatcaaaattctctttttacaacgatatatccattaaatctaacagcgcaatcatgatcatttactaatgctgaagccagaaaaacattatgcttatgctctatgttttcgtaagtgaattttatgatgatattttttgcgttattttcccgaaatgtatgtgcatattcacttatggttgtagtatcttcactatttactccttcagatttcttttcctgctctccataataggtagataatggtattcctacagaatttgaatataatagttcggattttgttttttctaaaataatatcttctttttttactttaaagtcatttaacataaagttagtcatatcaataccaactgtttcattaatgctgatacaattagtcggtaacacttttgcgaaactagaaatgctggtgaaagttgatattaatgcgataaatggaaataatttcattttataataagctccctatccccactttcccaaattttttgtctgtaacttggatgagcgacaatgcaaccattcgaagcagtaccgcggccattatcaccatgaatcagaaatccagcccttccacacatataattagtctcatgaggagttagccttagagtataacgaccagaatgtggatgtttgaaaggtgctccaattttatatcttcctcttggaagaggccctttatttgaaacgcattcatgttcactattattcttgtaccctggtgcacccgcatacagtgcataaaactgaaatttttcgttatgataaaatgctcttttgtttacttcataaatccatgccatttttttctcctattttaaaatacaatttatatcattactaacgattcttttttctctctgtttacataagtgtaatatattacatcattaaatgtatactccttgagggtttttgttagtaataattaacattagagtttatattgttatttattttctatgtgcttaataaattctatttattgtaaagatttggggtaatgtttggaagttttatgtttgaggtttatttgatattttaattgttggaagaagtatggtattttaacttcaatatcattttatatataacagaagcagaataaaaataacaaattgatatttataaaggaaagagataaaaggctgttttaattagtctcacgcgccaatctagaaaaatagttataattctaatgattagattgcttgtgaaatatcgtattcacgctcaatgggcgttactattactttatcgtgtatttcttcggttttggaataactatcgttttttgattcagtctctttatccagatacggagcgtgagcttagttctctcaatataagcctcaataagttttttatggtttaaccctcaaccagttggtaggcaaggcgattatgctgttcaataatgacaggaacgtccacggtagttactttaccgtcttcgactacgatgcggccgttaatgatgttgtacgctactttacccgggttacagaacaccagcgctgagaccggatcgtgctgtgcgcctgcaaggccaatgcctttgaggctaaacacagcaatatctgccatcatgcccggagccagcgcacctatatcatcacggttgaggttttttgcgcccccaagtgttgcgatttccagtgtttcacgggcagttaatgcttccgggccgaaacctacacgttgtaatagcagcgcctgacgtacttctgccatcatatctgaactgtcattagaggcggagccatcgactcccagtcccacatgcattccggcatctagcatatgccgcactggtgcgataccggaacccagacgcatgttggaacaagggcagtgtgctacgccggtgccggtacgggcaaacagctttatgccgtagtcgtcgagtttcacacaatgtgcgtgccacacatcgtgaccaacccattcaagatcttccacatactgagccggggttttgttgaagttttttttgctgtaatcgatatcactgatgttttctgccaagtgggtatgcagtgaaacgcagtgcgcccgggcaagttttgctgattcacgcattaatacttcacttactgagaacggagcacaaggtgcaaccacgatgcggatcatcgcaccgcgctttgcgtcatggaactgctcaatcacacgctgggtgtctttcaggataaatttctcattctcaacaagggagtctggtggcaggccgccctgttttttccccatactcatgctgccgcggcaggcgtggaaacgcatccccatttcctgtgccgcctcaatactgtgatcaagtttgatgccgttcgaatagatatactggtgatcgctggaagtggtacagccagaaagcatcaattcagccattgctgttttggttgccactttcatcatctccggagtcagtttttcccagatcggatatagtgcggtcagccaggtaaacagctcgccatcttgtgccgatggcacgacgcgggtcaggctctggtacatatgatggtgagtattaatcaggcccggaattacgatatgccctttgagatcgataattctatcggccgtctgcggtacttcgctttccgtcccgacagcgataatgttatttcctttaataaaaacgcagcttcttttgatttcacgcttatctttatccatagttacaaccacgtcagcgtttttcagcaatagcgtttttccggcggttgggatcgcatcgggggatttatctccgatgaaagatgacatcagtttttcttttgcggaagcaggaagtgttgttaataagggaatcagtagcggagcttttactaacaggcgacgtagttggtcaggttctttatccttcatgactactcctaattttaataagagacaataaatctattgtttaatagtgagatgcatattcttcttattttaaaaatcaaactttggttggggagtttgttattcctatattctatcagtcaagatacattgagctgtatatcatgtttttcaataatcatacaacaataaattcgatgtttttaaatggttttgattttattgaaatatttgctgtgaaagtcgttaacttcatcaatggtggtttttttacaagatgtgttttttagccatgtgcttaactcactaaatattaaattgttatctggtgttatatgcatttatatttattgcatgttgtttcattgagtttttgtttattgttaatgcaatatgattttcaatttattgatagtgatagctttatgaaaaaacgatctattccaattaaaattccactttattacgtcagaggcgggacttctacaggtgtggttgtattacaaaaatatttgccagaaaaaagagaattaaaggaagagattcttaggcacataatgggtgttcctttgctaggtaccgttaaagacaatacccaatcacatggattaggccgaagagtgattaccagcaacaaagcatttatcattgatatagatgataaatctaaaaaagttattagtacctttgcccagcttgaaaaagatagcaatacggtatcatgggaagttaattgtggaaatatgacttcatcaataccattggtgataagaggtttacctgaagagaaattgctaatgcctgatggtaggctaaatatttataacactaatacgcgtaaaaatattttatgttcaatggctaatgtgtctcctgaatatcaattaacatctatccccggtattattggggattttccggaagttcatgttttatttgagtctccagcctgttcaaaaacatcatcgatttttcctacaggaaatttaattgatatatttaataatattcctcttacttgtatcgatgttgttgtacccatgatagttatcaatgcaaaagatttagggatcactggttatgaaagtgtcaaggaaattgaaaataatacattattacaagaaaaaattttggcaataagagcagggatggggagtaaaatgggaattattaagcatgataggaaattaatgaatgaggatgatttaaaaaaatctataactcagcccaaaatagcgattattgctcctcctgtaaatggaggtgatatcagcatcagatatcttactcccaaaaatgttcattcatcggttgctgtttcgggtggttgttgtttagctgctgctagttgtttttctggaactattgccagtgatatccattattcccgcaacggtagtgatgataatgttacggtacgtattgaacatctgtcg

SEQ ID NO: 94 - DNA, 17569 bp, Xenorhabdus sp.
agctaatcacgtaaacgccataggatattgattcacatagaaccatgggaaaaccttcgtaagatgaggttagtaataagcaagttacgtttttaatattttctcgcacatatgcccatggattttgttgccaaccatgccactttattctattttcaattttaagtagaattgcaagtttctttaatttatcaatttcttgggagtcacctgaaccaacaatatttagtgaccaatctccatttattctagaaagtgataaaaatagttcttttagattcttttgcccattgaaattaatcctgcctaaatataaaaaagaaatatttttttcacgggttatcacttcaagttttggggtcacaggattaaaaacagtgtaaatatttttttggttaactcccatgttgtagagttgcgtagcgattccagaactgatagccaaatgtttatctgctaatagaatgtattctactttatacatatcatgcagggtgaaatgacaccaagaaatgatatttgtacttttaaaactaaatctccttgcccatagtgatatatagcatgttagtgagtcgtaagagataatatgctttggattgtgttgtgaaattaattttgaaaatttatatgcgaaatgaaatcttcttatttttgtatttttaatatttgacttaattcgaacaaactttttttcaccaatccatctatcatcagggtttttgaatttatcctcaaaaaaaacaaataaaacatcatagttatcattgtgtgataataatctgtgaaaattatcaaaaacggtttccataccaccaaatccacttaaattatatccggcaataaaaattttatcttttttcattataagatcggctagtcgattaaacagggttttatcaaattataggtagtataatattggtactagtgtttaactttctttagcggtgctctaataaagattctccataaacccaattttagttcagtataaaaggattttttcctgtgttgctgatctaactctgttcgttcgtcagttctatcgttaccaattgatgaatctaagttcaaatcagttaaccctactacagggggaataacactttttaattttatagcaccatgctctctaaatattttccattcatcagcagcgaatctgatgggtagtaaatattgatatagttttttagctgccgctaaatttaatatgtatccaaaggctcctgctgaatcaataacattgacaatgctatgttcgtcagttaatggctttttaaatgaatcaaagtattcatttgttttgttcagtaaaaaaaccaatggatttgatccaagagcctgaggatctttttctaaagaggatagtaccgttatcagattattatcaaaagtgacatcgtcttctaatatgagagagatagatatatttttatctatcattttcttatagacatttaggtgactcattgaacacccaacttcaccaagagttagatatattttattaaagtctgggcaaattttcttgagctgttcatcagacaatcctctcccatacacacctgtaataaattcggcattaaggtttgccttttctaattggtcctgtattgatagtttacgatctatatctttttctaaattaatgacaaaaatcttcatatcacaccatatttagtttttatttgggtaatgtgaacttcatcctaggtacaactgacatcttcgttaacaaaaacaaaggagtaaaccagtctataaactgtagatgaggtttactgttacgtcgaatgttttgtcaaaaattatctctatatagcgagtgaggtttctcgccgaagttgtaaaaaagaacagaatggatattctatttctgaacgttataattcaatttattatgtgagtcagaatcttttgtagttcggtaagccgaagacatacaggaaggtcggtgtcattatattaggattgtggattacattgtctagtcctgatatacatcgacactcattaacgcttgatgatgtacttgccagagaatttggtgtggaatttgaaagagaaggaggtggcgaatattgaattggctgagcagggatgggagtaatagtgatctgtcattaccaaaatttccaccacggttttgactctctgaaagaaagctcctcaggtggaatcataggttttccctccttatcgatatcatagccgccctctccttgaacttttgcatttagcgctctggcaatagagtgcattttttttatcatatggttgtcaggattcttggtggtaatcattccgtcatccagccaaaaccagcttgttatagactgatctgggtgctgagtccaaacagccatactttcatccacacaaataagtgtttcgccattagagaaaagcgcttcagcataaccatcgagtctcatctcgtcatcctgattgatataatcaatccattcttgcatggaaatattggctgattcgtcagaatatcggtcagggtcatcgtagtaatcattcagatcaacgcgggttatgtgtacgttaaagcccataaatcctcactcgtcctgtgcttgcttcaagtactcctgccactcttcccatacataatccgggttaatatccgagtaacctcttttttcatccatagcttggtttaccgaaacagggcaaactatacatgtaccattatcacgaatatcttcgacttcctctctggtcaaaggagcctcttttttattctgagcatgtacaaggagtaagatcaaggcaggaatgtatgccagttctaatttttcttcgtccatcaatcaaatctctgcgttatttcaaatgatatccgtaactcaaaacatcaatatcgttgtgatgttttcagcgtttactattcaatcagaaataaatttctgctgttttttatcaatctgcgagcgagaagaaaaaaccactgctgtcaattttgctgccaaaatattaggaatggatattaggataatattaggaatgtgatttgtatcaaagaaaaaagccaccttgcggtggccttttttattcccgaactcactgttttattcccgaactcactgttttatcagtggtttttaatttggtgccagggcgggactagcaaataaatataacgcattgaatatatttaatttatttttactcattgattttatgcccctattaatgcccctagagttagttgcttcctgaactcacatagttgactgattttaaataatttattttatcgtcatgtacatattttactgtaagggatcgcccgaagatgtgatgactatttcttttgaactattctccccgtagtattatcaagtcgatactgcgatattgttccatttacaacatgctcaataactgccagcactgttgataatgggacgtagaaccattctctgggcatataggtctgcccggtatgacttttcagcgtgacattcaatctgcgtggcgcaagaaaaccatgtatcaacatttccagtttatgtgcattgaggttgaaacattgactggttgatacaattctcacaggggcttgtagaaaagtctgatctttttcagcatttttgattcggttctctacagtggactctgtaaagccgactttgtaaaggttatgcgtatagggggcaagcacaggatcaacacttaacgtcgccaatatatatacaagaccagtcggtattgcttgttcagacggtttaattgcttcaccgttgagttgtagtttacgtccttctttatccctgacgagtccgtgagtcagcgataggtatagcatgcgcatctcagtgccgttttcaaaaaccaaatgcattctggcattgtaactactgtactgctcaaggcgctctccaatactaacaacataccccattagaccgttcagtataaaaaaatcacctacattgattttcaatttatgactaaaacgttcagtactaaaatgtccgttctgcaagccattctgtactcgtttaaaaattggttcataacgtacaaagtctggacaaggctgacgctgggcgatttcgtctggctgctcctttttttctatttgaatatgttccagtacaaaaatttcaggagtatcaaaatcgagaagaccatcatcatctgcaaaaatatcatccagcgaggtaactgactcggctcgactcaaatactctgcggagggttctgcggcacaagaaattagtacttcctcaacatcactattttttaaaagtccgaactcgtccagacgttgtaagttcggggatttctccacactggatctcaggctacgtaatcggcgagcaagtcttttttcactgaggctcgctgagctgttttcttcaggtgctcttccatgccctctgtaaaaggaattgatttcagtaaactgtgcctcggatatatcggtcacattctgacgtactttcagaggctgcacatttagcagccccaggtcatcgctttcactgagtatatcgtcaagatcgatccgtgatgataaacgttgtgttgataacctaatcatttcactgtccctgctgtgctaatcgttgctgttttttctgacgaataaaggccagtgcctcagcatacctgacttcgattggatcgctggaattcagcgatggttctctacgaaactcctgagtaaattgcttaattcggggccataaaatcacagcctcttcttctgaaacctgagatttactggcgctaaccgcttcctggatagtcttcagcatggcggcatcgacctgcttcgaaaggatttcgtaagctcccctgaacgggttaatggaatcgattaagtcaatgttcagattatcaatacacaaaaacttatcacccattttcaggaattgcttcccggtaatatttttgtcatttttgtcactgtcttcgtcccaatctacaattgcactgggtggcagatcttttccatctaccagtcctccttgctgagtaatcagcatactttgcagcgtacctaggcgaatttgttcttgttcttcttctgtcaggtcgggatacaaagtttggatgatggccgggagttcaacttgcgtcacagtctccggtggtacagtgtcgctgatggcttcctgtataagttgcttcttcgccagtagtgcggtcataatttcgtttctgtcaccgttaagaatgtcgagaactttttgtgaaactggtgttgaagtagtgtcgtcaacaaggagtgtatttgcaggtaattccttgccatcccacagtgagcgaggcttaaattgaatggtcggggcgaggatctgctccatcaagagagaagttgttatggctttcagcatgttgtttacggatgttctgacatcttcatcctgagcatcaggctgtgcaatcaaattagtgaactgcgcatgagtttttccaacacaatctcgggttgctctgccaataatctgaacaatttctgttagagagctacgatatccaatggtcagcacatgctcgcaataaggccaatcgaatccttcttttgccatacccagcgcaataatgatatccatatcgtcagaggacgttatactacgaagataggtctgcactttcgctcgttcagatgaggtgtcatcaaccaggttggcgaccctgagaatccgtccatcgtttgcctcgacctggagtattcctgtttctgggtcacgaagtaccacttcaccaataatatcgagaatcgcatcaacttcgctgtgcttatctttggtggattcgccagagttaacattaggaatgtgaatgatagtttttttatgggtatcgagcacatcaggtaaagcatcaatatatcgaccctggtagaaatgatagccaattcccagtgatttcagataccggtaaccattaagttgctcatagtaagtgtaggttactttggtaaatttagcttcatcatctggtaacaggatggggacagtatctcctcggaaataagaaccagtcattgccacaatatgtgcgcttgatttagccatcagttcatcgatcaacccaccaaggcgattatcaccgtccgcagaaacatggtgaaattcatcaatagcaaccaaacagtgattaaactctgcgatatcgaccttatcgaaggcaaaacgtaaagtagcatgtgtgcagaccaagatatggtcatctccagctataaagcgctggaatgcagcaaccttgctcttatcactaccatcaacgcataagttgttctgagggctaacctgccagtcggcaaaaaaacctgattcagtcagcgctgtgtttttaaaagatcccccgatagatttttcaggtacagcgacaatcactttatgcactccctggtgttcaagcttatccagccctagaaacatcaacgcacgcgacttaccgcaggctgggggagctttgatcagcagatactgactgttgcgttcagcataagcacgagcctgcatttctcgcattcccattgagttaagacttgcactttgtccagtctgtttgtattccacatgcaaaagattgttcattccaccactccagaaataactgagccaccttacggcgcataggaaggtggctcagaggggtcattgagaaattagcgtttcgtagcgagcaagcaaaaagcttaaacgttcgtcagcgtctttgaatggcttgtcccgataaagacgatctactgctttatccagtgcctggtgagctttcaataacggctcaggcatcttttcaggatcgtaaagctctgccagagttttgccgggaaattcttcacgagtaagcagtacttcttcggcaagcttttcgatcatcgtgcgtttttcattgctcacatcaggccatggaaaagggttataaaccactgatgcagagtatcggtagcgactttccagacgtcccgccaccaagcgcatccagtcgttatgcattaatgaggtaagtataccaaattcatatagtgtgccatcaggtacaaataaattagcatctgaacaaataacttgatgactaaagaaccccatagggacatattttctacgttcagaggaaactctgggtattaatatataatcacctgatcggggttggcttatctgaaagaaacaatgtggtttctctgccattttcaaagcattggtgtgtccagctttcaacctgagcgcgcgtattttgttaagtttctcctgtatggctgataaagattctaattcttccttgctggcatcacataaccataaacaccatcgatccttaccattcagaaattcatctgccccaagcactcgtttaatccatttcttatattcaggtccgagctttattagttcatttttttcggattctgaaaggaataaattcccaccatcattagccatattaccaaaaaggaggctaggcgtttctttcaaaaaaggtttgtttataggagagatagcaaagtttccaccctctactatgtacggacttatattgattacttgttttttatgccattgattgtcaaagaaatcaaaaagcacagattttttattttgttgtgatagaccaacaattataacatgcactgccgccttatcttttgcattgttttgccaagtaaaagttggatatgcgaaatttatcttaagtcctaatttaaataatggatgccatatagtgctagcttgttcaccttggcttattgaatttgttgcaacaaatgcaagttcggcattagagttaataatataattacctcccttccaaaaccagcaagcaacgtaatctaagtaaccaatcgatttaaaccctttgaaaacagaaagcatgtcagcacgctgttgcggagttctacctacatgacctaaaaatggtgggtttccaataacatatacctcatcctcagtatttttagaacagacttcattccagtctttatgtagactgtttccatgaactatacaaccactttcccgtaatggcagtgccggtggagcatccccgaactctttcttccactgattattaagttgatgttctgcaagccaaagagataatctggccacttcacatgcaaaatcatcaatttcgattccatagaattgtgacaggtgtagcccgctcattggtatggactgagggtctatttcccccaaagccatgataatttccatctcgagtttacggagctctttataagcaacaattaaaaaattacctgaaccacaggctggatcaaaaactttaatttttccgatgcgaaccaataattttgccaacccgttcacattttttctgtttttttcgaagtcagatctaagaggttcaataaataaaggctgaatcaccttcataatgttactgtaggaggtatagtgctgccctaaacgactcctttgttctatatcaatgacggcctgaaacatactcccgaaaatatctggattaatttcactccagtccatcgatccgcaatcaaggaggattcttcttccttttttaccaagctcaggaatagggtcatcagatgaaaataaatcgccattaacatagcgaaaattattaatatgtttgggaaggtttattcttgtatcgctatcctctggtgtatttaacacagagaatatttgataaagaaaggcatctagatcgcttccatcttcttcagtgtaactttttattgcagaagtaaattgtgcatcactgaaaatccctgtgtcttcagcgaaaaaacaaaagagaattctggttaaaaaaacattcaatgcgtgaatgtcttcagtattggttaaattattgttgatttttatcaggtcaaataatttacccattttttcggcagctttgacgtctaccggattctcactgctggttaatgccttttctaagccaaccaatggcaggaaaaaggcgtaataactgtgtaattcatctatatcgatatctaaccgttcatttgtttgggtatcccaggcaagaaagcggagaaagtctgtgattatgacaaaccgaattttatttttccatatgaaaggttaaaaccaccgactttagtcggtcagctttagctgcgatactgtgttgcacgagaggtgcaatatggattacagatatggcagccacacggtatttcagattgagtatcattttgtgtgggtaacaaaatacagacacaaagtgctcacaggtgaagttggcttacgggtgagagagctagttcgtcagacctgtgaagcgtttgaaatcaggatagtagaaggggtcgtgagcaaagaccatgtgcatatactggtgagttgtcttccgagctaagcgccttcagaaatcatgaggcgaataaagggaaggacagcaagtaagttgtttgaagagtttgctcacttgaaaaagcgttactggggtcagcatttttggggcagaggctatttttgtgcgacggtaggtcagttaacggaagagatgataaaggcctatctggcgcatcattttgaaccgaacccgaatgatcacttcaggctggataattgacgcatcgttcagtcgatgcgtatccggactttcagtccgttaatcactaacccaccgactttagtcggtggttgttgagttgtttagtgtggctatggctaattccagcaatgcctcgccatccagtttgccatagatattttgtggtacgacaatgacgggaatattataaatatcagcatgtttctggaactcttcttgttgggaggcataatgaggtccaagaaataaaatatcgattactgaaaaatactcagtaacttcgctttcgcttctggcttcaacagtaacggataattctttttttctggcagcatttctggtttttgtagccagcattccactggaaataccggcaccacaacacaacataataaaaacgtttttcatataaactcctcattattttgtcgctaattgatttttgttttcggatatataaactactatcttcaattttgattttatattcaattatctgttttcacctcaggagggcaattttctgtttttttaattgactgaatttgtaagtttgatgttttacttttttatttttccatatgaaaggttaaaaccaccgactttagtcggtcagctttagctgcgatactgtgttgcacgagaggtgcaatatggattacagatatggcagccacacggtatttcagattgagtatcattttgtgtgggtaacaaaatacagacacaaagtgctcacaggtgaagttggcttacgggtgagagagctagttcgtcagacctgtgaagcgtttgaaatcaggatagtagaaggggtcgtgagcaaagaccatgtgcatatactggtgagttgtcctccgagcttagcgccctcagaaatcatgaggcgaataaagggaaggacagcaagtaagttgtttgaagagtttgctcacttgaaaaagcgttactggggtcagcatttttggggcagaggctatttttgtgcgacggtaggtcagttaacggaagagatgataaaggcctatctggcgcatcattttgaaccgaacccgaatgatcacttcaggctggataattgacgcatcgtttagccgatgcgtatccggactttcagtccgttaatcactaacccaccgactttagtcggtggttgttgagttcttccttttcagagtcccaattagcttactcattcctgtaattttcctctttttcagaaaaattttctgccttttccatatgccttgctctcatatagagaaataatggtaatgcgaatgatacaccaatacacaaacctaacagggaataaatgccatttggcattttcaggcgcctgctttcataaacaacaaagaaaattaaaacaatagctgaaataacgacatcagccacaaagaagcgagtggcatcatttcccaataaaagctgtataaacaaagacacgtttaaaccattttcggctaaaaacaggaaaacaaaataccacgggattactgcacctaagatagtcaaaactaagtaaaatcgcgtcatgatttaaaccttaattgttttatttcagttaaatagctccattaatatactgagattaaccggcatctaatatgccagataagacactctgatttttttgggaaaatatttcaccttcgtgccaattctgccccatttttaaagtaggctttaatccccgaaaaaatagactctgctatttgctgctgaaattttgcagtacgtagctttttttcttcttccggattactgataaaggccgtttcaaccagaatggacggtatttccggtgcttttaatacggcaaacccggcctgatcgacactgtttttatgcagcttattcactttccccattcgtgtcaggacttcatccccgaatttcaggctgtcattgatcgtcgcggtctgaaccagatccagcatggtatgatccagatacttgtcaccacttttactgaccccaccaatcaggtcggcctcattctgagtctgagccagaaaacgggccatattactggttgcgccttttgtcgataacgcaaatacagaagagccccgaaccgtacgattagtaaaagcatccgcatggatagagacaaacaggtctgcctgcatcttacgtgcttttgcaaccctgacagtcaatggaataaaaacgtcttcattgcgggtcatatatactttcatccccggctgacgtttaatgagagcctgcaagcgacgggcaatttgtaaaacaacatctttctcacgggttttatgcttgccgatagcgcccggatcttcaccgccgtgccccggatcaagcattatcacaaccggcctgtcttttcctgccttgccagcttttttcctctttgccggcatatgcttttccagattcccgctgttgtactcttccaacagagccagtaacggatcatcatcaactttcgctgcttttggatagagatccagcaccagacgatgtttaaattccgcaaccggcggcaaagtaaaaatatgcggcgaaacaggttgtttaatttcaaataccagacgtaccgttttaggatcaaattgcccggcccgtattagtttcagataaggatcatttttctgaatcttcgagcccatactgctaagtacactattaagctgaaccccttgcaaatcaataacaatgcggtttggattcacaagtgaaaactgacggtattttagaggaatattagactccagcgtcacgcgggtataacttgatgccggccagatacggacagcaatcacttttgatgcagcagcgtgccctacggggctgatacttaatagccacagagccgctgcacctttcagtaaacgacgacgcgaagaattatggtctgaatgactcattatttattccatttaaaacaatcaaacagtaacttttgttaaaaagcaaaagacagtcaggtgggaaactctaattaattacaaccaaactgtcatcaaaaaaagcatttcctgttccttcaatagcttaatactcatataaataatagtattcttttaatccgtactcgctcttgccatttttctttcgatgaataaaaatataaaaaacacgaataaaaattcaataaaggggagcttcatgaaagaaagtagtgccgaattggtcgaaatcttccggcattcggttccgtatatcaatgcacatcgcaacaaaacttttgtcgttatgctgggtggtgaagctatcgcccatgaaaacttcccgaatatcgtcaatgacatcggtttgctgcacagtctcggcattcgtctggttgtcgtgtatggtgcccgcccgcaaatcgatcaaaatctcacagaacatcactgccagccggtttatcacaagtacacccgggtaaccgatgcccgaacactggatttggttaaacaggccgcaggcctactacaacttgatattaccgcccggctttctatgagcctcagtaatacaccactacaaggcgctcatattaatgtcgtgagcggcaattttattattgctcagcctttaggtattgatgacggtatcgactattaccacagcggaaggattcgccgaattgatgatgaggccataaatcagcagttagataataattccattgtactgattgggcctgttgctgtttccgttaccggtgaaagttttaatctgacaacggaagaaattgctgcacaactggcaattaaactgaaagccgaaaaattgatagggttctgttcatcacagggggtcaccgatgctgaaggacataccttatcagaaatgttccccaatgaaggagaaatacggctgaataatctggaaaacgccggtgattactcctccgaaacagtacgttttctgcgtggagccattaaagcctgccgccgtggcgttcggcgcagtcatctgctcagttatcaggaaaatggctctctcattcaggaattgttctcccgcgaaggcataggcactcagattgtcatggagcgatccggacagatccgccgggctaatatcaatgatattggtggtatccttgagttgatccgcccactggagcagaagggaattctggttcgtcgttcacgtgagcagctagaaatggaaatcgataaattcaccctgatagaactcgataatatcactatcgcctgtgcagcactctattcctatcctgaagagaaaatcggcgaaatggcctgtgttgctgtacatccggattatcagaactctgcacgtggcgaagttttattgggtgcaatcattaatcaggcccggcagagcgggctggaaaaattatttgtcctgaccacgcaaagtattcactggtttcaggaaaaaggctttgaacccgcagaaatcacgatgttacccgtggaaaaacaggcgctgtacaattaccagcgccgttccaagatcctgatgttagacctgaaaatccattaaagaagaggttaggctttaaaccattcggccagcccactccgcctttgagtgggtgtcgcaaccgctttaaccagaactgctttatgcgcataaatagtcagtttttcacgggcgcgggtcaacgctgtatagaccagctcccggctgacaacaggggaaaactgagtcggcagcactaatgccgtgtgctcaaactcagagccctgtgatttatgtactgtcattacatatgccgtctcatgcaaaggcaaacgacttggctgaaaaggttttatctgcccgtcagataactgaaaataggctttcagctcatcattctgatccttcagcataatgccgatatccccgttaaacagccccaatgtgctgtcattacgcaggatcataatcggccgcccgacatagccccggttttctttttctgcatattcttttttgatgtagctgtgccgattacctgaatatctcggcaaaacaaccatccctttactatgtaataattgctctactctctgattcagcccactgacaccaaatggcccgtcccttaatgcactgagtaatctgaaacggttaaactcggccagaatctccttttcagaggctctttctttcaccagagtcaaataacgttgataaccttcagcagtttcagtcagtaatcgctgataatcttcatcatcggccagagtgttaaagtagacatcagacaaaggttgtttcagtaccgtggaaacacgcctgctattcccctgattgaccgctgaagccagttgcccgatgccggatgcaaaattaaaacgataacttttacgcagcaggcataagctatcacgtactgccaacgcagcatcttccggttcagactccgaatatggcgctaactgacagccggttaaccgggccagctgtgctgcacgtgccacactgtaaccctgttcagcaaagcgacagatatcccctaagaccgcacccgcctctacagaggccaactgatccttatcgcccagaaaaatgactttcgcttttgctggcaaggcttcaatcagacgggccatcatcggtatatccaccatagaagcttcatctatgatcagaatttccagagaaagcggattaccccggtggtaacgaagtttctggctttccggctgtgctcccaatagacgatgaatagtttgcgcctgatcaggaatactccgccgctgttcatccgtcaaaacaagcttactcaccgcttcactaagcgattctgtcagtctggccgccgctttccccgtcggagcggctagctgaatacttaattgccgcccctcattcagcttaatcagcgcagccagtagttttgctaccgtcgttgtttttccggttccggggccgccagagataacagagatacggctggtcacagcaaccgcagcggccactttctgccagtcagtagcctcttcaccaaccagatctttatcaataacgccaaataactcatctaagatgctgcgtaactgtgtttcatcaatatcatcagccaatgccacatcagcaaaaaatgccgctacctgacactcactctgccacatacgctgtaggtaaaggcgataatcagaaagtccacggcgggaaagtatgatcggtgtaggagattgcccgtctccaatggcggggcaggcctgcaatgcagaaataatctgttgccgcgaaggttctcctgccaaagaccagagtgatgccaccagctcagggttgcgcccttcaaataaatgttcaggagtaacgcgctctaagggcagacaaacatgaccggctcccgcttccgcactcaaataggcggtaattaataacagcaatgggttttcatcttcaaccatcgcataggcaaactgcacatccaatgggcgcagtaatttctgggccacggcctgctgcaataatgacatcattacattcatataactgcactcataccttctcttctacaccagccgcgctgaacagcgcatccagttcatcaacaaactcaaccggcggcagatagcgataaataccatgccccggattattattatcgatgccacgcagaaaaaggtatatcactccaccaaaatgttgccgataatcatagttcaccagccggtgacgcagataacgatgtaaggccagtgtatagagctgatactgtaaatcataccgatgctctatcatagcggtggccattgcttcctgagtatatgaaccgctgctttctcccagccagtttgatttataatccaccacgtaaaacttaccctgccagcaaaacaccaaatcaataaaccctttcaacatgcctttcacctgatgaaaagataatggtgtgcactgtgctgacaatggatcataacgatgggtcaccgcatccagcgcattggaatgcagcaactgatcaacaggcagataaaactgcatctcgttttgttgatgatggcgcggaatatccgcaaggcgcataccctgctcattcaattctgccgtctgaatatccgtcatccattgctgcaaaaccggtgcccagctttcatcaaaccctgctgttgacagtttttcttccagccagagctgacccggctgggagctgaaatccagatcttccagaatggaatgcaagaaagtacccgctgttgctccacggggaaaagtatgtggtgtcatcagcgatgatggttcagcctgtttttcaccgctgacatcaatatccagtttcggtgcaatggattgcacaatcacttccaccgattcaccgaatgcgctggtatggagctgggaagatgaatgtgcagacgagttttgtaagccggagtaactggtcactctccagtcatcccggatgaaacgccgaaattttctggcaaccagagacagtgtattttcccgttgtggatcccactgttcatcgccgaaattttctggttgtgtcacctgaatattgtcatcccggagttcatctaggctacgtagcagtaattcggcatcgcctttttcccctttctgcaccaaataaccaagagcagaaaagtgcaaatccgtatctccgttttttttcctattgccgacaatcagcggagcaacaccgacactacagtgatataccgaacgtgtcagggccacataaagcagacgtaaatcttcagccaaacgctcttcatcagctaattccagcttctcactatcctgaaacatactgaaatgggtatcaaaattctgacggtcatgataaatagcctgctcctgcttcctgaaactgcaaataaaaggcagccagaccaacgggtattccagtccctttgatttatgaatagtacagatctgtaccagatgcttatcactttccagccgcatttgctggctttctgactgtggatcagggcgggaaatctgttgtgccagccagcgaactactgcgtgttcactatccagttgtaacgattcttcctgcaacaattcaccgatgtgcatgacatcagtcagacgacgctcaccttcatagcctgccagcaggttttctgccctttgggtgtttctctag

SEQ ID NO: 95 - DNA, 13634 bp, Xenorhabdus sp.
gctcctaaagcgaacgctttttctgtcatagccatgttttatgccatgcgccaatcgtgtcacgaaaaaagcactttttaacaggccctgagcatcaataattgcatcatattgttgttgttgtaactgctctctgaaacgtgtccgttcttcacagatatctttcctgaaccagttttttctccaacgacgaatagcaaccggaataacagtttcaactgcattgtgccatgtgggaatttgggcaaagccttcttcaacgacccagtcaaatttaatattcggtatgtgttttttggcatctgttaatgcaggcaaggtatgtaacacatcacccattgaagaggtttttaccagtaaaacacgcattaacgctggttctccgcctgtaagagtttttccagtgaggacaaaaccagctctggctgaatatcaataagactctggtggtagccaccatcactgtcaccttttctgatcttgtgatagccggtaatcaggcggatcacttcagctttatctgacagagggggcgtgaaatcagggctgcttgggccatatagtgccaccagcggacggttcagggctgacgcgacatgcattaaacctgaatcattggtaacaatagcatcacaggctgcgataatgttcaccgcttgttcaagggaagtcttgcctgcaaggttcaggcactgtttgcgggcgtcttcactcaaaagtgcgcggatatcctcaccggcttcattgtctttagcggagccaaacagcagtatctgatagcccttttgggtgatcaactgttcagcaagtgccgcgtaatgataatggggccagcgtttcgccgggccaaattctgcaccgggacaaaaacctataactgggcgatgatcgtcgatattaaacgcggcggttgattctgcaatatcttgctcactgacagccaattgaggccataaaagaggatgagaaagatcttcagcactgcgtacagctttcccgtcatatgcaagagcgacatagcgctgaaccataagcggaaaagcacttttattcagagtgcggatatcattcagcaaaccatagcgcatttcaccacgccagcctgtacgcaaagggatattggcgaagaaaggcaccaaagcagatttaaacgaattagggaggacgtaagcacgatcatatttacgttcacgcagtgctaccccaagacggcggcgctcaccgagggcaagtgctccatgccccagaggcattgccagagcctgattaacctccggcatttttgccagtaatggacgacaccattccggcgccatcacatcaatttctgcatttgggtacaaagccttcaaggtacggtagaggctttgtgacatcatcatatcacccacccatgatgggccgatcaccaatatcttcataaaggtcgattaattatcctgattaagccattgcatatattcggtaacaccttcagcaacggttttgaatgacttgtcataacccgcagcccgaagttttgtcagatcagcctgagtgaagctctgataacggccctttaatttttccggaaattcaatgtattccacggatggagacttttctttatgggactcggtaacagcatcagcaacagcctggaaagattcggcacgcccagttccgcagttaaaaatgccagaaacgccgttcttccagaaccacagattcaccgccgcaacatcaccaacataaataaaatcccggcggaaatgttcgctgcctgcaaataattttggattctggccttgattaatctgtgtatttaaatggaaggcgacactggccatgctgcctttatgtccttcacgtggcccgtaaacattgaaatagcggaaaccacaaatttgagagtctgcatgtggcagaatatcacggacatactgatcaaacaggaattttgagtagccatacacattaagaggtttttcgtactggcgatcttcaataaaattgtcactgcgaccaccataagtggcggcagaagaggcatacaggaatgggatctgtcgctcaaggcagtaatgcagtacatctttagagtactgataattattgtccatcatatatttgccatcccactccgttgtggaagagcaggcaccttcatggaaaatagcatcaatatcacctagatcatcacctgcaacgatgctggcaatgaaatcttctttatccatataatctgcgatatccagatcaacaagattggcgaattttgtgccatctttcagattatcaacaaccagaatatctctgtagccttcgtcattcagtgccttgacaatattgctgccaataaatcctgcgccgccagtgacaataatcatttggcccacctctaaatagtcagttcgctttactttggtgcgtatcatatcacttaaccctactgacgacagctgctgatataggggaatatcctgaaatcctgtaacatctcagttttcaggccgtgatccgctttacaaacttgatattatctctttctctctgtcgtcactggcgatatctataagtagaatacattgtgcattattacttcatttattcaggtaatcaggagagaaagatgtcagcttcgttttatcagaaaattaatgagcagttggaacaaacccgcgcggaagggttgttcaaaagtgaacgtattattacctctgcacaagatgcagatatcgccgttgctgatggtaacaatgtcattaatttctgtgccaataactacttagggttggcgaatcaccctgacctgatcgcggctgcaaaagcaggaatggatagccatggttttggcatggcatctgtccgtttcatttgtggtacgcaggattctcacaaagaattagaaaataaaatcgctgaatttttaggctttgaagatgccattctgtactcttcatgttttgatgcaaacggtggtttgttcgaaacgttattcgggccagaagacgcgattatctcagatgcactgaaccatgcttccatcattgatggtatccgtttgtgcaaagcaaaacgttatcgttatgccaataataatatgcaggaactcagggcacagctggagaaagcaaaagcagaaggtgcacagaatatcctgattgcaactgatggtgtgttctcaatggatggcgtgattgccgatctgaaatctatctgtgatttggcagatgaatttggcgcactggtcatggttgatgattctcacgcagtagggtttgttggcaagcatggccgtggtactcatgaatactgtgacgtcatgggacgtgttgacatcatcaccggtacacttggtaaagccttgggtggcgcatccggtggttacaccgctgcccgtaaagaggttgtggagtggttgcgtcagcgttcacgcccttacttgttctccaattcccttgctccttccattgttgccgcatctattaaagttctggatatgctgaaagacggagacgaactacgcgagcgcctctggagaaacgccaacttattccgtgaaaaaatgacagcggctggttttactctggctggagctgatcatgccatcattcctgtcatgttaggggatgcaaaactagcgcaggaatttgccgccgagctgttgaaagaaggtatctatgtgattggcttcttctacccggttgtgccgaaaggtcaggcgcgcatccgtactcagatctcagccgcccataccaaagaacaaattgaacttgtagtggatgcatttacacgtatcggtaagcaattgaatattattgcataaggtatcactatgaaagcgttgtcaaaattaaagccagaagaagggatttggatgacggaagtgcccacaccggaattgggccacaatgatgtgatgattaaaatccgtaaaaccgcgatctgcgggacggatgtgcatatctataactgggatgagtggtctcagaaaactattccggtgccaatggtcgtcgggcacgaatatgtggggaaagtggtcgcaattggtcaggaagtcaaaggcttcaagattggcgaccgcgtatccggagaaggccatattacttgtggttattgccgtaactgccgcggcgggcgtactcacttgtgccgcaatacaacgggagtcggagtaaaccgtcccggttcatttgcggaatatctggttattccggcattcaatgccttcaaaattcccgacaatatctctgacgaactggctgcaatttttgatccctttggcaacgctgttcatactgctctttcctttaatttagtgggagaagatgtactggtatcaggtgctgggcctattggcatcatggcagcggctgtatgcaaacatgttggcgcacgtcatgttgttatcacggatgtgaatgagtatcgccttgaactggcaaggaaaatgggtgtcactcgtgccgtgaatgtcagtaaggaaaatctgaccgatattatgtcagaactgggtatgacagaaggttttgatatcggcttggaaatgtcaggagcaccaccggctttctgtaccttgctcaatgccatgaatcatggtgggcgtattgctttattggggatcccaccttctgatatggctattgactggaatcaggttattttcaaagggctgtttattaaaggtatctacggacgggaaatgttcgaaacatggtacaaaatggcggcattgattcagtctggtctggatctgactccgattatcacttaccagttctcaatagatgattatcagaaaggctttgacatcatgcgttcagggcaatctggcaaagttattctaaattgggattagctgataacatcttatacagcttagtaaaatagctgttaagaaccagaacaggtgctgactgctttatgagcacctgttttattttgtgtggtcttctcttttatccctgctttatcttgcaaagacttatccttcatagcctcttcctgttgtgactttatttgatcagtactatgtaacttttcaaagtgctgttgtaggatatgaatgattgcaccgggaactaatgtttctccaaccattttgagatattgcactctggactctgatgttattccggattcagttttggatttctgagaattgatacatttttgttcagtctgtttatctggtcgagcgaggttaagcaatttgctgggagctaccagctcaatatcatctggtaatgttgctaacccttgccgtaatgcacgaatagttgttgggtacgggtgaccaattgcgatagcggatccttgtttacgagccagagcaatagcacgattgagttgatgcagagtttctgcttctgtctgaacattatccagaaagacattccggcggagtatctgtacaggtgttcctatcgatgctttagaaacctgagtgctgccaatggttacactatccagaaaatagagatgatattgagatagggcgcccatgacttttttcataccgctaagattagaagtcattgcgctgcccatatggttattcataccagtcgcatagggcactttctgtatagcatcgtaaataatggcttcaatttcctctttattcatcgaagggtgcagggtatttttttccaacggttgtttgctaagaggtgacattggcaggtgaattaaaatttcccgcccttgtttgtgggctttttgtgccatttccctgccatgtggtgagtcaggcaatactgcgattgagattgcagatggcatttgtaatattttgttttcattgtgaacccggtagccaaaatcatcaataacaatagccaaacgcgcagcatgagcattcagagtaaatgaaagcacaaaaagcggtaatactttccagcaccgaatatgccgaaagcgcagcattccaaataatagagtgaatgaatggaggcactgtattaatagatgctgcacgatggtttccctctattattttcctaaccacggtaacggattaacagcacgtccctgacggcgaatttcaaagtacaatgaaggctgctgctgcccaccactacttcccaccagagcaatcggctgaccagcacggacttgttgaccaacgctgaccagagcactttggttatatccgtaaatactcatatctcccttgccatgttcaaccacgacaaccagaccatagccctgtaaccagtcggccagtaatactcgtccgtctgaaattgctttaacttccgttccttccgctgcggggataacaatacctttccagcgtaattcaccctgtattgtttccccgaagctgtgaatgacccgaccacgaacaggccagatcgcctgcccggcaggacggccaagtccacccgttcgtgccatcaacgcacgttcatcttctgttggtttatagctggagcctttttgttgggcttgtttttgcttagccgcaacttgtgcacgaacacgtgcagcttcacgcgcttcacgttcagcgcgagccttagcttcccgttctgcttttgcaattttattgcgtaggcgagtttcgttttgccgaagttcagccagactctgttgatctttcttcaatgcggattcgagagttgtcagcgtattttgccgggctgtgcgggcaacttccatcttttgtttttgttgtttttggctgcttagtagcgtttgttgctcgttttgtttgccctgttggagttttttttgctgattcagtttatccgttgtttcttggagcttagtgatagtctcttcacgagcctgattcagataactgtaataagccagtatacgttctttgcgctgagcttctgggccatttagcagtaattctaacccttgatgatttccttgtcgaaatgctgcatccaactggctggcaagccgtttgcgctgttctttttgttgcattagcaggcgctgaatatttttcgtcagggaggtgatttcattccccagtttattcaggtgaagctgagtgctatgcagtgaacggcccacttctgaaatggtactctcttgctccttgagctggctgaggagttctgtgcgttgtttttgctgttgtttgacacttttctctttttcagcaatgtcctgctgaatatctttgagctggtttttattttctgaaatttgattggcaaaggttcctgaacagaaaaaagcaaacagtagggcacagaacagtaaagctctgctactaaattgccactgtttttgcttcttccgaaagttaaaacttttgaaacccttatgatcagccatttgattcagtacctttccccgctctacactaactatttatagtacttgtctattatatgtctgttgtgcccgattatttcatgtgaaattgcctctgaccagagaatggacagttttttgtcttcccgaatcataatctaaattttagtgaatttagctcatttattatcgaaaatcctgtatctgaccagtttggcatgaaatattttagcggaatatggcaatcaagtatttcatgaggattttttattttttctcgaaactctccgcaaaaactgcattaggttggtgctaactggctgtaattgacacaacacacaggtatactctgttaccttaagatttttgttattaactaatgggagttgttgccctccatgctgcaagaaatcatgcaatttattagccggaacacgatcctgagcctcgtctggattgccctgttagtggctgttatcgtcctgacactaaaaagtgtgttctccaagagtaaagatatcactcgcgcacaggtcatccatttcatcaataaagaagatggtatcgtcgtggatttacgctcccgtgacgatttccgcagagggcatatcattggttctgttaacctgactccatctgagattaaagataacaatctgggtgagttggaaaaacacaaaaagcagcctgttatcgttgtttctgcgaatggtctggaatcgaaaacaccggcagagaatctggtgaaagcaggctttgaacaagtttataccctgaaagagggaattgccgggtggacaggtgaaaacttaccattagcccgtggcaaaaagtaacgaatgtgaatgtaagcagtatacttagtacttacataatctaggtttaataaggatatacaaaaggtaaaaattattatgtcagaacaaaacaacacagaaatggctttccagatccaacgcgtatacacgaaagacatttctttcgaagcccctaaagcacctcagatcttccaagaagaatggcagccggaagttaagctggatctggatactgcttctagtgaattggttcagggagtttatgaagttgttctgcgtgtcactgttacggcgacattgggtgaagaaactgcgttcttgtgtgaagttcaacaggctggtattttctctgttgatggcatcgaaggaactcaactggcgcactgcttaggtgcatattgcccgaacattctgttcccgtatgcccgtgaatgcatcaccagtctggtaggccgtggtactttcccacaattgaacctggcgccagttaactttgatgctctgttcatgaattacttgcagcaacagtctgattcccagtctgatgaggcaacacaggaagcctaatgaatactgcttctatgatagttatcggtgccggctcatacggcaccgctttagccattacactggcccgtaacgggcataatgttgtgctctgggggcataatcctgagcatgtcctagctttgcaacaagccagatgtaatcaggcgttcttaccggatgtttctttccctgatagtttacagcttgaagctgaactgaagagtgctatttcagccagccgaaatatcctgatcgtggttcccaaccatgtcttcggcgatgttttacagcagataaagcctcacctacaaccagattcccgcattgtttgggccactaaaggccttgaagcagaaactggtcggttattacaggatgtggcacgtgagatattaggcaatgaaatcccgttagcggtggtgtccggcccaacatttgcgaaagaattagcggcaggtttaccgacagcaattgcggtatctgcgacaacatctgaatttggtgaagaactccagcagctttttcactgtggcaaaagcttccgagtatacaaaaatcctgattttatcggagtacagcttggtggtgcagtcaaaaacgtgattgctattggcgccgggatctctgatggtatgggtttcggggccaatgcccgcactgcattgataactcgtggtctggctgaaatgagtcggcttggtgttgcgttgggagcggacccttccacatttatgggcatggctgggttgggcgatttagtactgacctgtactgataatcagtcccgtaaccgtcgtttcggtatgatgctggggcagggcgttaatgttgacgctgcacagagtgacatcggacaggttgttgaaggttatcgtaataccaaagaggttcgggcactagccagacgagttggtgtggaaatgccgataacagagcaaatctaccagatactataccgtaacaaaaatgtactcgaagcggctcaggcattattgggaagagcgacaagggatgaaggagaagattcccacatttaagttacccaaaatagccattataaaaacaatcacatgagaatgattgatatgtctcgagaagaattaagagaagtttgggaaaatataaaacatgaggcgagagagctagccgattgtgagcctatgttagccagcttttttcatgcaacactacttaaacatgaaaatcttggaagtgccttaagctacatgctggcaaacaagctggcgacaccaatcatgcccgcgattgcggtcagagaagttgttgaagatgcttatggcagtgaaccaaagatgatcgaatcggcagcgagtgatatcaaagccgtccggctgcgtgaccccgccgtagataaatactccacccctctgctttatctgaaaggttttcatgcactacagggatatcgaattgcacattggttgtggaaacaagaccgcaaggcattggcggtttacatgcaaaaccagatttctgtttcttttggtgtggatattcatccggctgcaagaattggctgcggcattatgcttgaccacgcaacaggcattgttatcggtgaaacagcgattgttgagaatgatgtttctatcctgcaatcggtgacgcttggcgggactgggaaagcatgcggagatcgacacccgaaagtgcgtgaaggagtgatgattggtgcaggtgctaagatcctcggcaatatcgaaattggtcgtggtgcgaaaattggtgcgggttcagtagtgttaagacctgttccaccgcacaccacagttgccggtgttcccgcgcggattgttggtaaaccggaaagcgagaaaccatctctggatatggaccagcattttaatggaatgaataatggttttgagaatggggatgggatttaaaatctctttgcttttgatagctcagaattaataacactcagtgctgtcaggcgctgagtgcttatatccaatagatttcgagttgcatcgcggcggcaagggaactcatccccgggagcatagataactatgtgaccggggtgagtgagtgcagccaacaaagaggcagtttgaaagacaacgggtatatgtattaatccctcaataaagcaccctgataaccaagttgccgccatgcttcaaacaccactaccgccacagtattagaaagattcatactgcgactatccggcagcattggaattcttatcttctgttcgggcggcatgttatccagcacataaggcggtaaaccacgagtttccggaccaaacatcagataatcaccatcacggtaactcacattactgtgagtcggggtgccttttgttgtcaaagcaaacaggcgagtaccggtgggggattgtgagtttgctgaacttaatccctcactttccagaaatgcttggtaatcgtgatgttgcttgatattggcgaattcgtgataatccagccctgcacggcgcaggcgtttatcatcccatgtgaaacctaaaggctggattaaatgtagctgacagcctgtgttggcacacagacggatgatgttccctgtgttaggcgggatttctggttcaaataggacgatgtttagcatggtttaaataattttattaagaacctgttcagagtcttttcaataagatgactaaaaagaccaaattgataatttgcagactggtactcagttttcgttgacaattcttacaaagccgcctgtatttttccaaccaattgaatgatagctcaactacccaacgtttggggaataccacgaacattctcaattcagaatgtttagcaatttctatagttgcatcacatagcacttttaccgctaaggccaatgctgggtcatactcccaatgattagatattatgacaaaccccctgcttttattgtgggtgagatatggctaaagttgatgtggttcaatgattttggtcaccgttatagaggtgatattctcacttctataattcaacaggtgacatgatgaaaagaaatttcagccccgaatttaaattggagtcagcacagttagtgcttgaccaatactacagtattgccgacgccgccagagccctgaatgtcagtcagtccgccatggggcgatgggttcatcagttaaaacaggaacggcaggaaaatttccccaccgcttcgcccatcacgccggagcacattgaaatccgcgacctgaaaaagaaactccaacgccttgaaatggaaaatgacgttttaaaaaaggcttcagcactcttgatgtcggttacctgaacaattctcgctaatcgaacaattcagagtgcattatcccgtggctttcctttgccaactgtttagcgtttatcgcagtagttatcaagcctggcaaaaaccggggaagccgcatgatccgacgcgagccaaatgacagagttgggtgcgcaagcatttcatcgagcgccacgtctcagcaggcgcccgagccattgggccgatggtcaccaccaaaggcagtccattgggccgatggctgccgggaaaattaatggctgaactggggctggttagtctcgcctccatccaaggcatcgttattcacgaaaagaacaagagcatgttgatattccgaaccatcttgaccgtcagtttgcggtcaccgcacccaatcaggtgtggtgtggggatgggacgtatatctggaccggtaaacgttgggcttatctggcggtcgtcatcgatctttttgcccgtaaacccctcggttgggcgatgtctttctcgccggactctgaactgacgaagaaagcgttagcaaaggcctttgaatccagaggaaggccgcaagggctcctgtttcacagtgatcaaggtagccactatactagcaaagcgttcagacgattattacagcgttatggtattaaacaaagcctgagcaggcggggaaattgctgggataacagcccgatggaacgttttttccggagcttaaaaagcgaatgggttcctttggcgggatatgcaaattttagagaagcttactattctattatccaatacataaccggttattacagccagcctatcaagcctgccgaagagcgaattattgatatggccatgaataacgccggggttagggacacggctcgagtgctgaacattggcattaacacggtttattcgcacattaaaaagctcacgccaaggcaggtaactgtgctgccacttgcgggcagtgatattcaaattgtctgtgaaatagatgagtaagcgtcatttgtcagtaataagaaaattcagcgctggctctggtatacttgggggccgaataggaaacgggcagtggcgcatgtgtttggggatcgcagcaggaaaacgttgaaaaagctgctggcacccctttctccttttaatatccggtattactgtacagatgattatgccgtttacgattgtcttcctgaggaaaaacacctgacgggaaagaaatttacccaaagtattgagagaactaatctcactctacgtattcggataaagaggctgaatcgaaaaacgataggttattccaaatccgaagaaatacacgataaagtgataggaacgttcattgagcgtcactactatactttaccagcaatctaactattggattcatgacccttttaggatattgttcacgtcaagggacctgagcttcatccgaaaaagattatccatattagactcataatagataaattttattttttaattagcatggacgctttattctatacaggatctgataatatcacacgatgaagatatatttggtgaagaaatgctaccaaattttaccctcatcaaatatcaatatattcttagttactacaccttaactttctaaacttattttttagcagatataaaaaaacacatattttacctttcaagctaactggacaatttccttcatattcagtaactaatatcccaccaaatttcgatctttagagcaca

SEQ ID NO: 96 - DNA, 17942 bp, Xenorhabdus sp.
tcgcgacaggaaccgcggctgtccatgatagccagttttttgaagctgtttggacaggtcaaatacccgtcgggacatttatgcggataaagggtatgccagccagaagcgtgaacgtgtgctgaaggagcagggctatcgtgtgcatattcagagaaaagcggcacgtaataagcccttatcacactgccaaaaaggccgaaataagaaaatagcgaaaactcgggcacgcgtagaacatatctttggctcactctctcagatgggtgaaaaaattattcggacgataggccagctgcgagccaattttgcgatgacgatgaaggcaacctgctatgatttgcaacgtttggtttatttcggaaaatcgggtattcatgctttttaatttcgagatgtgatgaaaaagtgatgcgtttgtttttttcccctgaacaagcaagaaaaagtcatacacaataaggtcagttattggtgagttcaaaattgatcttattttttgtattgagagtttttagaggttcccattactaatattggtaaaatactattttctttagtagtcaatatattcttttaaaccaattaaaatgatatcaattagaaaataattagggagcctgggctccctaattggatatgataagaaatcaacggaaaactacaaccacttggcaaccccgccatgacgagagcatgcacctttgcgtgatttgctcttactatatgttccgtctttacaaagtgcggtattcaccgcttttgttgaagtcgctttccttttctttgttgatttcttactgtttttctgcacttgtttttctaatgaaccggttttattttttaccgattttatacttttttccacgggtatcacaggcttagaaacaggttctgttggtactgctggtgctgcaagtactgcacttgaaaacaacaccagtaatgccgcaactgataacttcaagttcttcatatataaatcctctggttagaagtactttaacccgaaatcaactcttgcagtttggagtatagctttgaatgatgcgattacaaacttaacataaataatggttacaacttaatagactatgaaaacatttattcaacgtaagggaaaaataaaaaatcaagtttaattatatagtaatccaatgcctgtttctgactggaaaaacaaagaggattgattcattgatttataaaaattcaatggctatttaatatttattaaaaccagataaattcatttattttcttaaaataagaaaaaaataaaatgaccatgaattcacaatttcatatgaaatttgttcttcaattaattattaaaaatcatcaaatattgatttttatttgaatgaatatgttaaagaataattaaagatgtttctctggtaattaaggctggtcaaaaccagcctttaaaccttcgctaatatcaggccttaaacgtaagccatggcctgactcttgccactgatttaattaatccagcttgttcctgaacttcgatgacaggtgtaatgggtttataagcagaaggtgcctcttcccgtaaacgctcacttttcagagtaatgcattgccacggcaagccgcgattttcttgtggttttagagccttactacgcatctcctgacggcgtactgaacgaccggcaccatgtgagcatgaccataaccagtcagaatgaccttttcccatgacgagataagaataatcccccattgaaccgggaattaatgccaattctccggctcgtgccggagttgcacctttacggtgaaggttcattccctgttcagggaaaataatattatgtgagagatcgacaagcagacggcttttatcctgttcgaataccttttgccatttcgaacgtactaattcagttaacacaatacgattcgcccacgcataacgtgcagcaacacccatcgccaataagtattcctgagcatgctccgccgtcagaccaaacagaccggaagccggatatttttctgtcgcaggccaaagtgccttcgctttatcagaccagcgctgaccaacatagaacccaacatcccgtgagccggtatggatcattatcaatatatcgccctcacgcagaccagcagcataagccgcatgtctgtcgaaaatagtatccacgatctgcaattcaacaaagtgattaccagaaccaaccgttcccaggctagcgggccggataatttcccgatgttcaaaaaacgcttccggagcatatcgactatgagcttttactgcatgtgtactcaatactgcgcttaattcagcatacatccggctgaaatcagcctgctgccaaattccttgtcggggtaattcctgcaaccacgcagacaatccctcatcaaataaggcaccaaatgattgcggagtaacagggacattgcgttgatccagtagtaagacgttttttagctgctgaaccaatgcttctttctggctgtttgcttcttcatagctcaacccggttgtcagtagacgcataccacaattaatatccgtaccaattgcagcagggatcactaaatcttctgtggttgccacaacactaccaacaggcgctgtcgtgccgggatgaaaatctggcgttgctcgagcctgacaaacttttgcatcactgccgggaaccctaaccgcagctaaatcaagcaattgctgtacagctttttcttccagtggcaaagattccggtaacaggactttggcttctacctgattttgattgaaatgataggtattgttttcgtaataagtttcaattccctgacgggaaagacgtttttgtaaacgatttaatgtagacatgtaagctacccagaaaaacaaaaaatcgcttcttccgttttgagtgggaagaagtcttgtttttcctgcagcagcataattcaggaagatttgagctgggtatactaattgtagaaattcaggatgtaaagaggattcattaatctaattgttaaattttaagccttgcttaattgaactcttctctgttttgctcatctggctgcgacctatcaaccataaaatcaagtgtaggattttcatcatcaaaccaactgtcccaatgatctttattttggcatctcaatttgaatacctctttttataacattaatacttggattcacatattaaaaaagggagtcaaatgctcccttctagctaaatttaatactgaattactggcctgctttcagtttctggaaatagtcttcatacaggacattggcattaccaacatcgctctgccattcccctttctggatcaccgattcatcaggatacagtgatttatcccctgatacagaagctggcaataattttttcgcagccagattcggtgtcggataaccgatggtttctgcaacttgggccgcaatctctggacgcagcaggaaatcaatcagcttcatcgcaccttcgacatttttggcattttccggaatagccagactatccatccagaaaattccgccttctttcggccagataatatcgataggcgttcccgcctgacgggcaacataagcagaacctgtccacatcatgccgacatcaacttcaccttccataaatggattagcagggttatctgaattgaatgccagtacatttggcatcaactttctcagttcctgatacgctgcctcaatttctttcggatcggtcgtattgccggaataccccagcttcagcaacgccatctgaaagacttcacgggcatcatccgtcaataccaaactgtttttgtactcaggcttccagaactcagcccaagaagtcagcgtttttggatcgatattatcgctgttaacaccaatcgctgtcgcaccccaaatataaggaatggaatattcgtttttcgggtcaaacgacttatgcagtagattaggatcaagattatggaaattcttgagcttactggtatcgattttttgcagcatcccttctttgctcatcttggagacaaagtaagtggagggcacaaccaaatcataagcaccgtctttataagttttcagcttagtgtacatgctctcattggattcataggtggaataaatcaccttgattccggtttctttagtgaactggttgagcaagccaggcggaacgtattcagtccagttgtaaaaataaagtgtcttgccatcattctcggcagcagcatttaccgaaccaatgcttaatgccatcatcccggcggctaacagatagaaccactttttcatgctgtttttcatgtagtgtttccccgcagttgatgcgttattatcgcgtcattcccatatacagcaggctcgatataaacctaccccaaaaaacggctattataaaagcgcccttacatggggtaaagccgcttatcatgtgtaagtctgtgaattgtacaattagatggattcagttgtacaataaataaaaaccatacatataaagttaagaaggaacatcatggatacatttactatttcacaaactcgtgaaaacttagctgctgttatcgataaagctgtagctggtcaaccagtggagatcactcgacgtggcagagaaccggctgtaattattagtaaaaaagaatttgaagcacttcaaaaagcaaaattggatgccgaatttgctgatatcgtcgggctattcgataaatcaaacagagaattaacagatcgatgattaggcacgtcactccagatgaagtcattgctcttcatgattaccttttacgtcgctacgcaggagtacccggaatgagcgattcaggcagggctgatgcaattgtcagccgggtaatgaatcgagaattttacgaaggcatcaccgatatttacgaactcgctgcaacatattggcttgctatcgctcgtggccatatttttacggatggtaataagcgtgcagcactgaacaccacaatgctgtttctgaaacgtaatggggtagaagtttatgaccacccagaattagtggagttaaccgtgaaagcggctaaaggggactttatacctaaacagctggcagtaaagctccgagaatatttcgaaccgaagctcaacgcttagaaaagcgcagcccaatctgactgcgcttaatttagattgcctctaagacttacccgtgcgatcacgcatcacaaattggctaatcagtaccaataccagtgacaaagccaacaaaatagcagctaatgcattcacttccggtgaaactcctactttcaccattgagtaaattttaagtggcaggatttcataactcggcccagtcacaaatgaagaaacaacgacatcatccatggacagggtaaagctcagtaaccatcccgccatcactgccggcatcgccagtggcaggataatcttacgcagaatcgttaactcacttgctcccaaatcacgggccgcttccagcattttgacatcaaaatctttcagacgggaatagactgtcactacgacaaacggcagacaaaaagtgatgtgcgaaaataacagtgaccagaagcccagtgaaactcccagcaacataaacagcaccagcagtgaaatcgccatcacaatatccggtgacatcatcaccacaaacagcatcccactgacaaattttttgccacggaacgaataacgatacagcgcaactgccgttaatgaaccaatcaatgtagcaaatgttgcggagactacagccattgtcagagaatgccctgctgcttgcagcagactgtcgttattaaataacagactgtacctattcggttgtaaaaccctgccagttgataccaaagcgtgatttgttaaacgaacttaccagcagaataataatcgggatatacaggtaagcgtaaacgatggtcatgaagccaccgcgcaacaggcgtccgatcattccagctccaccttcttgttcagcagcttagccgcacgatagtagacccacagatgatacccattaccaacgtcagacaaatactggttgccgcaccaaacggccagtcgcgaatattgaggaactgacttttaatgacgttaccaatcagcaggtttttcgcaccacccatcagatcagagacatagaacagccccattgccggcagcagaactaaaagacagccagcaacaatacccggcatcgtcagtggaatgatgatacggataaaagtctgcaacttccctgctcccaaatcgcgagcggcttccagacagggtttatccaacttttcaatactcgaataaagaggcatcaccataaatggcaacagaatataaaccagccctaacaccactgcttccggggtatacatcaggcgcagcggcttctcaataatccctgtccacaacagaaaatcattcatgtagccacgggtgctgagaaacatcttcaatccataaatacggattagcgagtttgtccagaatggcagaataagcaggaacagcatcagtggacgcagttttttcggcatccgcgccagaaaaaaggcaaacggataaccgataaccagacaacacagcgttgcaataaccgccatattcagcgagtgtattaacacttctgcatatagtgggtcgaacaggcggctatagttgtccagagagaataccatctgtaccagattggcatcatcacgcgtcagaaagctggtaccgataatcatcagattcggcagaaagacaaacaacatcagccaggatacaatgcctgtaatgacgatgttctggaatagtttacgcgacttcttcatcgaccagcacaacctcccagctttctacccaagtgactgcgatcttctggttcagggaatggtcaacatccggatcatcttcgttaaagaattcacttaccatcaccattttgccgttttccatttcgaccacggaatccagcgtcattcccttatagttacgttcgcgaacataaccaatcaggcccgatacctgctcaccattattgatctcttctacccgcagatcttccgggcgcaacaacaccttcaatgtttgtccggcggttacgggcagatcggtgaaaatgtcacactcgtggccttccacatcggcacgtatccgctgatcatcaatacggtgtaatactttggcgtcaaagatattaatttcgccgataaagcgggcaacaaacagattcttaggctcttcgtagatctctcgcggagaaccatcctgttcgatacgcccatcgcgcataaccacgatgcggtcagacatgaccagcgcttcttcctgatcatgcgtgacgaaaataaaagtaataccgagtttacgctggagcgctttcagctcattctgcatctgcttacgcagcttataatcgagcgctgacagtgactcatccagcagaagaactttgggtttattcacaaccgcacgggctatcgccacacgttgctgttgaccaccggaaagctgtgcgggcttacgttgggcaaactcttcaagctgtaccatacgcaatgcttcttcaacacgcggagcaatctctttttccggtgttttctgcatacgcagtccaaaggcaacgttttcaaatacggtcatgtgagggaacagggcataactttggaaaaccgtattaacatgacggttctcggccgggatatcagtaatatccagcccttccaataaaattttgccgctatcagcatcttccagcccggcgatcagacgaagtactgtggttttaccacaaccggatggaccaaggatggtcagaaactcgccatcattgattgtcagatcgagctgtgaaataacttgcttgccgtcgaagcctttacttaaggactttaattcaacgagtggtatcagagaggtattctcagtcatttatgctatcatctatcccttggaataatgcagatagaaccgccacgggaaaagactgtgtcagctaacaggaagcattatttctccgctgaagctcaaagccagtggcgccggttgaaattacgaagcgcgcataataaacgcagtacgccgaaattgaaagccgaaatatggcaatatgctattttttattaacatttcatgtatgttcgcatttcaggtcattttgaaccggatttctccagtctgtaacacgcttttgttgactatttttcagtcagcaaagacagtacaccgcctttctttccaatacaacatactcaaacctttttcagaccaagaattcacattcataaatagaatatttctttgataagataattaattaatctattcatatgattttttatttttccatatgacaggttaaaaccaccgtctttagacggtgactttgactttaatgttttgacctacgcgcgtttacgaggtgcgtggttcgacgactttcagtcgtcagcaccgaagtgcgctaacccacctacttcagtaggtggtagttaagtattctaataatgaactttataatcatttaatttaactgaaattaaaataattaagatcgctatcactctttcaggaaataatataaaacgttactttacacattaactatttaacgatactttcctgacaatacaggtgattagcaaatattactgaataataaaaaatcaataaacaactcgttaataattatgaaaaatagttactaataaaaatcacattatatcaattgctatactatttcctagcgttaggattaatgtaacttcaacgtagaaaaataaaaccatccatctacttaataaaaaataacgtgaatttattcaacgtcggtttttcacccctaaaaaactgaatcgtttcaatcaattttatacacaatggatttcaagatgcatcgcggcggcaagggagttcatccccgggagcatagataaccgtatttttataaaaacggtgactggggtgagcgagcgtagccaacaaagaggcaacttgaaagacgaagtgtatatagggaggtaaaatgtttcacctaacattgcgaaatatccatctggcagcacatgctgacaataaagaagatgcaattcagcaggttgccgatgttttaaccaccgccggatatgtcagtaaagagtatgttgatgggatgctggagcgtgaaacacagtcttcaacctatctgggtaacggtattgctatcccgcatggtactcatgccacacgcggcaacgtacttcatacgggtgtacaggtgatgcaattcccagatggtgttgactggggtgataaccagactgcctacatcgttatcggcattgcagcaaaatctgacgagcatctgaagctgctacatcagttactccccattctcagtgatgaaaatcgagccagccagatggcaaaaaccacctcggcagatgaactctaccgcttactcatgaacccacaaccgccctatctattggatgcctccacaatcacactggatatttacgccagagatctggaaaccttgcaggcgctgaatctcgctcgcctgcaaaaaaccagttcggtgaatgccgcatttattgccgatatcctcgctagatcccccatacatctggggcaagggatctggttgagtgatagttcacagggtagcttacgtaatgccgttgccatcgcccgtccaaaagcttccttcagtattagtaccgataatcttgatgaaaaaccggtcagcttgctcatcaccattgcctatgccggcgatcagctgcatagcctgctaactaatctaaacaacctgattcagcaaggaaaaggtgagcaactgcaacgggctcaggatcattcagcgctcattacattactgaccactaaagccgcacaacaggctacatcacaagcaaaaaataccctgaccgcagattttatcctgcccaatgaacacgggctacatacccgccccagtgcactgctggttaataccatcaaacaattcagcagccgcattaccatcatccatctggatggagacactattattcccgttgatggccgcaaactgatgctggttgcaggtttgggcattaaacggggagaccgtatccgttttaccgcttccggcccggatgctaaagaggccctggacgccatcaaaaatcttattaacaacaatctgggtgaagatatcgcatgaacaagcatggaatgaataaaagagtagccaccatcaccctcaatcctgcctacgatctggtcgggttaaccggaggtataaaaaccggtgaagttaatcggatccaaactgcgggattatatccggcaggtaaaggcatcaacgttgcgaaaattctcaaaacactcggaattgacgttacggtaggtggttttctcggtaaagagaaccagagtaactttcaaaaaactttcgcagaactgggcatcactgaccggtttcagatagtagaaggccggacgcgtatcaacgtcaaactcaccgaacagaacggccttgtgaccgatttcaacttttcaggattcaatatcaataaagaggactggcagagctttgccaaaaactccctcacatggctgcgggagttcaacatggtgtgcgtcagtggcagcttgccggcaggcgttgaaccggatgacttcactgactggatgcagcaactgcgcgaagcttgcatgtgtgtcgtgttcgatagtagccgggaagccttcactgccggaatcaaagcacaaccgtggatggttaaaccgaaccgccatgaactggaaatctgggcaggcagacctttactgactcaggaagatatcatcggcgctgctcagcagctacgtgcggaggggatctcacatgtcatcgtctcattaggcgaggaaggagctattctggttaactcagccggagtctggcacgccagaccaccgcactgtgaaattgtcagtaccgtcggtgccggtgatgccatgatgggtggcctgatttacggcctgatgatggggcaaccctgcgaacatacattgcgccttgctaccgccatttctgccatgaccgtcagccaaagtaacgtcggcaatatcgaccgccagcaactcgcctgcttaatgacaaaagtggaactcatttcattaaaaaaacaatcgaaaaaaacagccatcgaaaaaccaacaacaataagatgagaacgccatgaacatactgattattagtaatgagaaacaaggacaagcacgcgcctacctcgccagacaaacactggagaatgtcatagcccaacatggccttaccctgactgacgatctaagtacggctgaacttgtgatcatcatcggagaatctgtaccagatagcttaaatctgcctgacaataagttgcatggaaagaaaatctttattggctccgcagaacagataatcagcgaacccgaggtatttctccacaaagcccaaacagaagcgagtgtttatcatcagcaacacactgctgatacagcagaaagcaaggttcagcaaaagcctgtcaacatcgttgccattaccgcctgcccgaccggtgtcgcccatacctttatggcagccaaagcactggaaacacaagcacaaaaacgcggctggcaaatcaaagtcgaaacccgaggctccgtgggaagcgaaaactctctcactaatgccgaaatagcagcagcagatctcgtgattgtcgcagcagatattgaggtcgaactcacccctttctccggcaaacgcctttaccgtacctcgacgggagcagccctgaaaaaaactgccagcgagttggagaatgccctaaccaaagctgagatttataccgcgactagcacaacttctgtccccagtaggaacaatcaggcaaataccagcatttatcagcacctgatgaccggtgtttcctacatgttacccatggtcgtcgcgggtggcctgtgcatcgcattatcatttgtcttcggcatcgaagcgtttaaagagccggatacactggctgcatctctgatgcaaatcggcggcggatccgcacttgcccttatggttcccgtgctcgctggttacatagcctactccatcgcagggcgcacgggattggctcccggacttgtcggcggaatgctcgccgttagtaccggagcaggcttcctcggcgggatcattgcaggctttcttgctggctatgttgccaaatccctgacaaccagacttcgcctaccacaaagcatggaagcattaaaaccaatcctgattattccgttggtcgcaacactggcgacaggattaatcatgatttacgttgttggtaaacccgtttcagcgattatggaatggctgactcactggctgaaatcgatgggaaccaccaacgccgtgatcctcggcgcaatactgggcggaatgatgtgcaccgacatgggtgggccagtgaataaagccgcttatacctttggagtgggattattgagtgcccagagctacggcccgatggccgcaattatggcagcgggaatggttccaccattagccatgtggctggcaacagtgattgcgagaactaaatttgaccaaagtgaacgcgaaggcggaaaagcagcactggtactggggctatgttttatctcggagggagcgattccgtttgcggcgaaagatccggtaagagttctaccaagctgcattctcggaggtgcggttacaggagcactttcgatgtatttcagcatcaccgtttataaatttaaatgtgatacgccaatttcctgatactttgattgaccagatatttttacgattaccttttaattcatgaagatcataactaagaaaattaatagcttcaatacaactggcagaatcgataattgtaagtcggttttttattcgaagaactaatttttgttccaacccactactatcattatttaagaagaattttttcattcccttgtgctttaatctcttgattatggtaaccatgttcccaactatggaacagtataacgtatgttccatcttctacaacacgtttataatgttatagtcttaattaattatttcagtaccaattaattaaattggtaaagcatccctctaaattaaagtaataaatttagctctatttattatattttttctatctaatacaaaaaatagcgaatctatttagtgataaatctaattttattaaaaatatcctaacactaaccatatcaatcatatgtacagacgaaaaatacagaaatttccccactcatttaactatcatgtccgacaaactctttttcctgcacttcagattcagaactactccgctttccctccaatttagcaatgactgaggtagcaatgcagttacccaccacattagtggctgtgcgtcccatatcaaggagctggtcaatagcaaggatcaataatatacccgcttcaggcagtttgaacatcggtagagtggcggcaataactactacagaagcacgggctacgccagccatgcctttgctggtaaccatcaacgttaacataatcaggatctgttctgtaatactcaaatcaatattgtaagcctgcgcaataaaaagaatggcaaaggattggtacatcattgagccatcaaggttaaatgagtaacccagaggcaatacgaaactggaaatttttttcggtacaccaaagcagttcagtgcattcatggtctttggataggcagattcgctactcgcagtggcaaaagccagtatggtaggctctctgataagctgcatcagcaaaaaaatatctttgccgaggaaaagaaacccaacggtcagtaaaatgcaccaaagtaaaaatatccccagataaaagagagcaattaattctccatactcataaagcaaccccatcccttcaatagtaattgcagaggcaatggcagcaaataccgcaattggagccaatgacataacataatctgtgatgcggaacatgatgcgccccagatcttcaatcatagttactatagggcttgttttctgactattccggcaaatatatgacaatgctgaaccaaaaaagagagaaaaaataaggatctgtaagatttcattatttgccatagcttccacaaaactactgggaaatatatggctgataaagtttttcagggaaaattcaccagcattcagactcgtatcgatatttccatgttgtggaattgcaatattcagcccgactcctggctggaacaaattagctatcagagtgccaatgctaatcgaaatcaagccagcaacaataaaccatatcattgctttgatagtgatccgtccaacagatgatgaccctccaattgacattaatccggcaacaatcgtggaaaatataagcggcccaataatcatttttatcaggcgcagaaaaacatcggtaataatgttgatataagaggcaatttcttttgcctgactggcttcaagataatgattaaatccccatcccgttatcacgccaagcaaaatggcgataacgatctgcttcatcaatttttgcctcttcattattatccccttattttttgttatgctaattactcggatttatcctttagttatctggctatattttattacttattctattcaaaaatgttatttcataagaagtccacaacctgcttaacggtggattttaaatatagaatgaataagatttaaataggtaaattctaaataaacaaacctaaagtttgtttggcgcacaagaaaaaaccaaaaataagctatatagaatagggagttaactggacataaaataattcataaaagtaataacattatgaattttatatctaaaataaattaatctatctggttattttagatataaatataatgaaaactaatttatatcagtttctatttaaaatagctcccatttattaaattgttctttcatctctttaatagaacttagttttatttttggtatggccaatttttcaaacattgcagcatagcgtttgcggttttttggtgtaacaacagtgatgtggtgaagcatttcccatttgattgagtcttgattaccttccaatccaccatatcgtttacgctggaatgacgtcctgtttatataacatagcaggcttgataacgttgaaacatctaataaaataaactcagttgctctggataaccgttgcggcaggcatcttgcatagtttccatcaataacccaactttcttctttaattgccatatcatgcaacgagataaattcatcggcagagcgttcctgccaatctgtattcggcaaatggaaaagttgatccaagtgagtgacattcaaattatattttttggagattgcattagcaagtgttgatttaccgctattcgaaggccccataatacagattctatttcctaaatctgaaagttgcataacattctccaataattatagaaccaaatatattatatggatgagattaaaaatcctatatattaaatattagagactgtcatttaatttcaattagaaaatatcacggtactgataactgccttaccttttgattgatatttcataatataggcaaggcaggtttttaaatggcgaaacctgaactacagatttcgagcaaccatattcttaaattgtgataatgaagcgaccccaactatagaatcaacaggttttccatctttataaatgtacgttgttggtataccgcggataccgtacttcatagcgatagtattgaattgttcaatatcaatttcgccgaaagtggccttatctttcatatcaattgataactgcttaaacgtcggcgcaaccatacgacacggctcacaccacggtgcccagaatctgacaacactcacccctttggcactgacaacactgtcaaaattctcttcggttaattcaagtaatgtactcatatgaatccttaggaaaattctcaagttgatagaagacgatctagcttaacaatcaattattatattgaatatattaattattacaatcagtattatatcagttcactgtctcccccggcataagttattaggacactacattcgccaacattggcggattgaaaatagccaatattatctccttgatgtggtttttaaagaggatgatttaggtattgttggatgaaacgattgaaaatctggcgttattccggagtatcgtattgaatatggtcaaacaatgtgactatggtgctcccagccaaagaaataaactcaaaaaagcagactggagtgatgattattatgctcaagtattctttggttagatattaatcaaagtatgctcgtaccctgcctaaaaagtaatgatcattgaattattaaatgtgggaacagcagcatgtagacatttaataattcaaaaagttttaattcgattaaatcatttaaaccttacttgacaaatatcaatagccattaacatcattaaaaaaatgagttgcagtaattaattatattgttaaatactcaatccgttataattattggggttgagaatgaaaagaaaggtatccagttcaaaaagggaagttatttttgctgcagagtatgttcgaatgtctactgagcatcaaaaatattcgcaagataatcaatctgcatacattcatgattacgcaaataagcatggtatcactatcattcatacttataatgatgctggaaagagtggattaaatttaactggcagatccggacttaaaacattaattgatgatgtcataaatcacaaaataaacatctccactctacttgtttatgatgtcagtaggttcgggcgttttcaggatgcggatgaggctggacattatgcatatttgttaaaaatacatggtgtgaaaattatttactgtgcagaacccttcttcaacgaacaatctgagatgtatatgctgggagtgtcattctctcggtataatgctgcaagctacagtcgaaatttatcggaaaaagtattcctcggacaagttaatttaataaaacggggttttcatcagggaggaatggccgggtatggattgcgccgtttactcattgatgagcaccgtaatcccaaaggaatacttgagttcggccagcgtaagagtattcagaccgatcgaattatactcatacctggtccacaaaacgaagtagacatcgttaatcaaattttcgatatgtttatagtagaggggaaacctgaattggttattgcatctgaactcaacagaaagcagatcctcgctgagaatggtactgaatggactcgcggaaaaatccatcaaatactcacaaacgaaaaatacattggaaataacgtttataataagacttcgttcaaacttaagcaacaacacataataaatcctgaagaagaatggattcggtgtaatggagcatatcaatcaattattagtcatgataaattcaaacaggcaaacgatataattaaatctcgaacgcttatttttactgaagaagaattgttggaaaaattacacttattattacaaaaaaagggaagattgtcaggacttatcattgatgaggaagaactattaccttcaagtagtgtttatcgttctcgttttggtagcctactccgagtatataagctggttggatacaatcccaaaactgactactcctggttagaaaccaaaaaatatcttaacgggataaatgccaatataacagaatcaataatcaaaaatatctatctttctgatggctggattagtgattcaccagaaacagggattctgaaagttaatgatgaattcacattaactctacaagtagccagatgccaaaaaatatcaccagaaaactttagatggaaaattaaatttgaccatatgttttcaccggatgtaaatatagcagttcgcatggatagttttaatcagtctatcgttgattattatatattcccttcaatagatactattttgggaaatcat

SEQ ID NO: 97 - DNA, 17816 bp, Xenorhabdus sp.
attggctgcagaaactcatcctcagtggcacacgttggggggtatcgcggttgtggagtcatggcgggaagagcaaggtaaaacagagagttatgaaaggcgctactatattaccagccatcgtggtgcctcggcagaattccttgcgtgtgccatacgcagccattggcatattgaaaataaactgcactggcaattggatgtgagttttggtgaggatagccggcgtctgagaagcggtcatgcggccgaaaatgtggcattaatgaataaaatagcacttaacttactgaaaaatgagaagtcagttaaaataggcgtgaagactaagcgccagaaggctggctgggataatggctatatgatgaaaatcctgacagtgggattttcatctgtataaattagacccgtttgccctccaggccatggacaagttagttgaaattttctgcgatgtcgacgacttttgccgtcttttcatcccccagtgggcgcagttttgtctcgataacggataccgcctgcgccgtagacaaggccgcatgtatcccagtgaaatcatgacagttttaatcctctttcagcggtcgcattaccgtgattttaaaaacttttatttggagcatatctggcaataccaccaccgcgacttcccctccttgctcagctatactcgttttatcagcgttgccccgtccgtttttgtacctttatccagttatctgactcaattaaaaggaaaaccgacaggcattgcttttatcgattccacgagtttgcgcgtttgtcataacatccgtattcctcgtcataaggtctttcagggcatagcgcaacgcggaaaaacctcaatgggatggttctatgggttcaaattacacctgattattaaccatctgggcgaaattttagcgcttaaagtgaccccgggtaatgtggatgatagggagcctgtacgcgaattatcaaaagatctcacgggttctctttacggtgacaaaggatatctgagtcaggaattggcggatgatttagctaaaacggatatcacctttatcacgaaaaaacgccgcaacatgaaagcgcttgcactggctgagtgggataaggttatgcttaaaaagcgttttatcattgaaacgattaatggacaattaaaaatcggctctcaattagaacattctcgtcaccgaagtataaccggttttttgttaacgattttaacgggattgattgcttactaccttaaagagaaaaagccatcactgaaaattttctactcagaagaagatatttcagcaatagcttaagcggaattggggttaattatgtccactccaaagccggatcatctactggttgacgtaaaacctgtttatctttttgataatcatgtgacacacgccagttttcgctgcgtccctgacggggaagagcatcaccgcttcgttttacataactggatttcagcgccccgaaaatattctcatccaccaaaatctcatccggctgcgcatgtggagtcacaaccgtagcctgacggcgatccatttcatggaacagacgacatatataatccgctgaaagatcaatttttaatgtccaggcattattaatgtacccaaacaggtaagcaaaattaggaatatcccgaatcaatgttcccttataaaacataatgttactagtatctatcggttgcccatcaatggaaaccccaaccccccccataagctgtaattgtaaacctgtcgctgttacgatgatatctgccggtaactccttaccagactgcaacaaaatgccattctcagtaatatgcttaatatgatcagtaacaatcgatgcttttccttctcttattaccttaaaaaaattactgtcgggcacaaaacacaatcgttcatcccacggcatgtactcaggcgtaagatttttcatgtcaaaatcagggccaactttcctttgggctagtcccagcaaaaatgctctcaacatattgggaaaatatcggcttatcttatacaggtaactgaaaaataatatattacgctctctgctcagggcgtaaatccaacgctgaggaataatgcctttaaaaaattcagcgaatttatccctgcccggtattgaaaaaatataactgggagaacgctgtagcatagtaatatgctctgtatcattagccattgccggcaataaagttaccgctgtcgcaccacttccaatcacaacaacccgtttccgtttgtaatctaaagtctcaggccaatgttgcggatgaaccaccgggcccttgaaatcttcaagtccgggaagtttgggggaatgaggctcatcatggttaaagtaacctgtcgcaccgatcagaaaattgcaggtaaactgccgggtttcaccgctggcctcatcaattgctgaaatctcccattgacggcttttatttgaccaattaattaggattatttttatcccaaactgaatttttttatcaattttatactcctccatcgctgaacggagataacgtttgattgaaggcccatcagcaaaaatactggtttctgtccagggactgaatttatagccataactcatcatatccgaatcagtacgaatacccggataacggaataaatcccatgttccaccaattgtacgacgacgctctaatatccacacttttttatcagggcattctctggccagatggcatgccataccgataccagaaacaccagcccccataatcaaaacatcgtaatgattattcacattcccccctataaggtattttctgatgaggacattttcccaccatcgcaacatgttattttttattcaataaaacaaccatttgtatttatgaggggggactaacattaatcgaggcagggggatggatagtatttgtacagcgatgatggtgacaaagataagccagcgcggtcagcaacaatgtggaatatagagctacagaatattccgcgtagccctagaaatgactttcattataaatcaatcaccagccgtttaccttttgctctggaacagcaaatcagcagagatgtctggctctctctttcttcatcactaaaatagtgatcacgatgatcagcctcaccttctaaaatcgccgtttcacaagttccgcagatcccttctcggcataaactttcaaccactgcggcattatttctttcaataacttgcagaattgtcgatgcgttatcgacctccaattcaattcctgatctggcaagcacaagggtaaaggcatcacctgttttatcttcaactgcaaactgctcaaaatgtaattgatattgaggaaatccggctttttgtgccgcttgttttacaccttcacttaatgaatttgaaccgcatgtataaatgtggcttccttcaggcaattgagcaatgaaagtctccagctccatacgggaaccttcagatgaaacatgacaaacaactttatctttaaattctgatgccattaattcctgccagaatgcgttttcattggcattccggtaacaataatgcagttcataatctgcattttgctgttccagctgatgcaggtgagacataaatggtgtgatcccgattccacccgcaattaagatatgttttttagcttcaggcacgattgagaataaattattaggctcagaaacaaagagcttatccccaatagtgactttttcatgcataaatgccgaaccaccgcgagaacgcgcttcccgcttaattgcaatttgataacgttgttcatcaaaaggagaattgagcaacgaataggcattactataattgctgctgccatcctgcatttgcacaaaaatatgactgccagcagtaaacgagggtaaatgcgtgttttgatctggtattaacgtgaaacgcttaatggttggcgttatcgtttcaatatcgctgacaataacaccaaccatttgataagtagccataaactacacctcattattcatggtagatttgcgcgataagattatgaaaataagcgataccatgctcactcatcccacttcctgtgctatctgccatgatgcgcccctgaccacgataaccacgggatttcagtcccttttgtacgctttcaaccaaacgaagatcttccgggcgaaaaacatcacgataccattcgatcaaatcgttttgctcctgagtcagatcctcattggtaaagtaaatatcgtagtgttgtagcgttgtttccgcatcaaccggaaattcataaataaccgtcatcatgcctttaatgggtgtaacgttgtacatagtacaaggccataaccaaaaaccatggaatgaagattcaccttcaaatttgaaagattgctctgagggaacggcataaccaaattgtaatgaccagttatcacgcatagtatgccagtagcgatcaacctgaacagaagtagaaaaacccggatgtgccggagcacagtgataacattccagatagttatcaacaatacttttccagttagcaggggttgatgtcgtgaaacgggcagccagttttaaatcgtaaacttcagggcaggcttccaatactttggctcctaatcccggcaactgttgttcaactgtaccggcatttacatccatattaataaagacaaaaccagcgtattcctccagtttaacaggggtcagagtcgctaagtctttatcaaaattggccacattttcgcaattacgcgcgtgtgctaaggtgccatcaagtttaaaggcccacgcatgataagggcaggtaatcacattttttgccttaccttccccttttaataactggtgcccacgatgaggacaaacgttaaaaaaggcccgtaatactttgtcacgcccacgcacgatgacaatgttttcaccaataatttcacgcgtaatgtaatcattcgggttagccaactcgctgatgtgtgcaacacagatccaactcttagcgaaaatcgcttctttctcataatcaaatacactctgagaagtatagaaacgggctggcatggtataagcttctgtcgggtttgcacaaaaatctcttggcaatgtgaaatcaggatgttggatgctcatatcaattccttaatcttcttatgacgttcattgactgttttgttagttattgctgtcgtggatgaaggtattgttagtattttttacttttatcggcaccggaataacaacattctcctgcggttcagaagtatcaataagatgggcaggaacatgcgcgtaatcttgttttatccagcgaataaaaccatagaccttaaataataggatcaccagaaaggggagtgcagtcagcactaccgttgttttcattgtttccagagaagcctgtgtaaacaggatcgaaaggggaatgagtgtaatcaccacacaccagaaaagacgtaaattccggctggggtcctgaccttcacttaaattacgggtactggttgctgccattgtgtaggccactgcatccatatgtgaggccagaaaaataatcataatgcaaagataggcaataaggaaaaactggccgaatggcaacgcattcaatagctgatgaaccgccgtttcaccaccgaacgtatttaatatttcagggacattaatggctccggtaataaattggtgcatcgcatagctttccagaacaccaaagaaaaaccagcagccaaacgtactacctaataataacgcccaaatcacttctttaatttttcgcccgtgagaaaccctcgtcacaaacatagcaacaccgggagtatatgaaatccaccacaaccaatagaaaacagtccagctacgggtaaattgcccatctcccattggatcggtaaacaagctcatttgtaggaaattctgcgtcgtcagaccaatggtatgaataatattattaatgataaattctgtcggccctgccatcagaaccagaaacgcaaaccccagcgctccccagcccaccatctggcttaaacgccgcataccattatcaataccaatataagaacttaagctgaaaattaaggcggctaataatgtgattccggcctgaaccataaaattgttcggtatgccggttagcaccgaaagcccaccacttaatgttgatgcagtcaccactaacgaaatcgttaatgcgcctaccgtcgcaattaagaatgtcatatccaccagacgaccccaaaaaccctgaggattgattttgataatggcagagatgatccctgacaggctcaggcctttattttttctgacatgaaaatggtaagccattaccaacgaagccagagcataagtagcccaggcactgactccccaatggaaaaaagagtagctgatactgtactcgagagctttaggcgtatgaggagcaatattcagaccgggcgttttataataataggcccattccatcaccccccaatataacgtcgatgaaccaagccccgcacaaataaacatgcataaccacggtgctgtggcatattttggttttccttctccaagacgaatattgccgtatttactcagtgccagataaaggacaaacatcaaagcaacaagcactaaaatctgaatggttgacccaagcaaacgagtcagaccattaaaaattgcattagcaataacacttgttttttcaggaaacgcaccgagtgttattgctatcacaataatacagaccagactgatgacaattaacggaatatctttctttgggttgctcagcataaaacctccgctttaccattttgtatatctccttattttttatggatacacaaaattgcctgttatcgttgttatggacaggacaaaaggaaaacgtgcaactaagtaagaacaaaacttatcgcttctttttgttaacaataaaaatatagtgtcgctacactatttaaacaattagctaaacagtaaatagataaaacacatatcgtaattaatgttttgtgatgttagttcagaatcagtctgaaatcagacaacaaaaaaaccatacccccccaataaagaatatggtttttagaaaataatgtttttttagaaaagaataattttaagcattcaaatgattaacgatggcttctcccacctgctgtgttgatgcctttcctttcatatccggggttacaatgccttgcacaattaccgcttcaatcgccgctaaaatatcatcatgagcatcctgatagcgctgctcaccctcccccaaaaactgtaacatcatggctcccgcccagatcatagcaatcgggttagcaatatttttgccataaatatctggtgcagagccatgcacaggttcgaacaaagaagggaaattcctttccggatttaaattagcagaaggggaaattccaatagttccggtacatgccggccctagatcggaaagaatatcgccaaataaattggaagcgacaacaacatcaaaccgctctggattcaacacaaagcgggcacaaagaatatcaatatgctgtttatcccatttaatatcagggtactgttttgccatcttttcaacccgctcatcccagtaaggcatactgatggataacccattggatttcgtcgcggaagttaataatttgcgcgggcggctctgggctaattcaaacgcatatttcaggatgcgatcaacaccacggcgggtaaaaaccgactcctgaatcaccacttcatgctctgtaccttcattgaaacgccccccaatagcggaatattccccttcagtattttcccggacgacatagaaatcgatatcttccggtttcttattcgctaatggacaaggcactcccggtaacaaacgcacaggacgcaaattaacatactgctgaaaatcacggcgaaacttaagtaatgagccccaaagtgagatatgatcaggcacggtttcaggccagcctactgcgccaaaataaatagcatcaaactgcattaattgattaaaccagtcatccggcatcattttgccgtgcctgagataataatcgcagctagcccattcaaaatattcaaacgataaatgaagatcccatttttcagccaccgcctgcaaaacccgaataccttcaggaagcacttcatgaccaattccatcacccggaattgctgcaattttaaacgtttttttcatcgagtatatctcatttatcagggtacagaattgactttctggatatcttataattgactgatttgtattcaatactaaaaatgtagaaacataatttacaatctatgaataatcttccctttttacaggatctacgcgtttttcttttagtggcgaaaagagccagttttgccgccgccgcggaagagatcggtgcctctcctgcttttatcagtaagcgcatcgcgatattagagaatgtattgaatgtcagtctgttacaccggaccacacgccgggtatctattacagaagatggtgagcggatttatgaatgggcgcagcatattctgaacgatgttaaccagatgatggatgaactctgcgaacttcggcaagaaccacagggaaagatcagaattaccagcagctttggctttggccggaagttcgttgctccggcattatcagcattgatccagacttatccacagctcgatcttcgttttgatgtggaagatcgtcttgttgatctggcgactgaagggattgatctcgatattcgtattggtgatgagattgatgacaatcttattgcccgtaaactggcatccaaccgccggatcctctgtgcatcaccggcttaccttgcccgtcattcagtgccaaaatcaattaatgaactcccttctcatgcctgtctggtgatcaaagagcgggatcatccgttcgggatctggaaactacaaaacagcacaggagttcagtcaataaaagtcaccgggccgatgtcatccaatcatggtgagatcattcaccaatggtgtctggatggacacggtattatcctgcgatcatattgggatatcagagagagtattaaatcaggagctttagtacatatcctgccggaatattaccaatcagcgaatatctgggcggtttacgttacacgcttggctatgtccgcccgtatcagagtaacagttgagtttttagagcgttattttaaggagcattatttggagtaaaagcaacttcataatgactatgtctaaagctaccttatagctgcaaataaatcttggatctttaaaaacataggagttgttccattggatgcaggaacacctaactcaacaaacccaagaagggtataaaacgcgactgcatcagggtctgcatccaaaaatacccccttaatcggcatcacattatgaactttaatggcgtgctctaaaaactcctgcattaaaatatgaccatatcccttcttttgatgttttgccgatactcccaacatcaccaagcgaacgacggaaaggtcgcttggcattgaaccagttattacaccactcagtctggattttgctagcgaataacctgtgaaactgcacacaccaagtaactcgcctgttttatcatcaattaagaccttagcgacgcaatttccattggaaacattacttttaagactactgcgaacgtagcggttaataacatggttaccacaatcaaaagctttttggcccggatatatcatatcgctctggtagttcacacaaatgtattcaaccgcaatttcatttagtggcttttccatctttgttcttcctcatcagagcgcgtaaagcaagtgttggggacgctggttcagcaatcagcatattcaaagtacgccagttttcttcatctaattcacgacgcttttgattttccagtacttcttccgctcgctcaaaagccgcactcaggataaatgcacttaaatcaacaccagcaacttgtgctgcctgacgcaaagtttctttcaattcagtgctggtctttaactctacacgggcatttttcacctctttatgaggcttttttaccgatatcgttgccattttggttactccagttagttgataaaactatattttattaatttaattgtagaattattcacctataaatgtttatttatcgtactgacggaagatagcatctgatgagataacaagcaaatttatacggccaataaccgtacatataacatataaaagttaactgactattttacgatattattacacttacccactgatcatatggaaatcacatcttgaataattacaaattactccctgcactggtatcaatactgaaaacacttaacctgaccgaatctgcaaaacagttaaatgttacccagtctgcaatgagtaaaacattaaatcagctacgtgaagattttcatgacagaattattgtgcgggaagccaatcagttcatcctgacgaaaaaaggagaaaaactgaaagcacaacttccggccttacttcaacagttaaataatctgtatgcacctgaactaatggaaccaagtctttgtgacagaaagtttaccttagcctccagcgattatgttgctcaggctattttagcctctatattgagccatattgaaaaagaagcacctaatgtcagtattgaatataaacagtggcataaagataacctgtataacgtagctgagcaggatgtggatttagtagcaacaattgctgattcagtacccgataatttatacggaaatttaatggcggaagacccgcttgtagtagtattcaggaacgaccatcctcattttgataacaatatgacggtcagcaactatattaatggccgacatattctcatcagtggaggcggagataaaaacagcccgattgatcaacaattagcgatgatgaacctaaaacgccatatttttgcaaccgtaccctttttccagtcagccattgagttgttattaaaaacggacacaatgctaaccatgccactgcatatcgcgtctgatttttctcagcgatatgatttaaaaataaaaactttacctattgatatcaaaccacaacaatactacttactctggcatgctaaacaccatgaagatccagaacataaatggttcagagaactttgcttatctttaatcaaaaaccatcttgaaaggacgataaaatacggtatgaaattaattcatacccacaagtagatttatcatatttacatgcagattaatggcattaatatactatccaatcaatatatatccaatggatttcaagttgcgtcgcggcggcaagggagtgaatccccgggagcatagataactatgtgaccggggtgagtgtgagcagccaacaaagaggcaatttgaaagacgaaggatagagggaatatataatgccatcaatagaaacactcattccatttattgaaatatcaacatttttatgcttcttaccggggccagataatattttagtcttaaatcaatcagccctgaacggacgaaaaacaggtatattcattaccattgggttatgtatcgggttaataatacatacatctttagtttcattaggtattgctataataatacgggaaaatgctatcgcttttgagattattagagggcttggagtactttacttaacctatctggcatggggagctttaactgccaagccagtttatttaaaggataactcagagattctctgtgatagcaagaaattcattaaaaaaggaatgataatgaatttgtcaaacccaaaagtaattattttctttttggctttcttgccacagtttatcagtaaccatgaagaagcaatgcctgtttcactacaattattatacttgggattgatatttgtcggcgtagcttttattttatggctttagccagtttaagtcgcgttagcgtcttaaatcataaccacccgtataacgggtggttatgatttcatttacgatgatatcttacttgtctgtttttttgcatgaatttatcgcgaatcactcattagtgaaaattattttaaataaagtgacaagttttatttttattggtttagcaattaacttattaatgagtcagatttgagaagatatagctcacatgactcattatatataattaagcagaggattatttatgtaaaaaggaaaaacaaaataacacatataattataaaaatagctaatattacaattgcacccataatagtatttaaaatagaaacaaccacagaagtaattacaacaaaaattataatagcaataatatgttcaataaagaaatcttttaaaaaatctaaagtgaagtctttaaaccagtttttttctttcttttggttactcatacgttagtttccttatttataataatgtttgattattagatttattcaccgaaacttaaaatatcaaatgggcatgaaatttccataccctgaaatgagttaaaactcatataaaacagcaaaaatattattaagtgcatgtagcaccatcggaataataagagaacgagtatgtatccttacatggcataggataacggaaaatacgaataacacgataaaagtagtgggtgatgaatattgcatatgcccggcagaaaataacaacgatgtcgttataatggctacctgctttcctctttcaccgtatcccattcctgcatttagtaaaaaaccacggaatataatttcttcactaatgggggctgcaatacaaatagcaatcacatgtaggaaaaaagtaaaagtaggtagataaacaagatttgaagtccaggattcttcaatcccaagaatgccatttatccaaatcagagcaataattgccagcacgggtagtacaagatccgttaaacgcaacttacctatcggcattaagttaaattttttctgataactgcgccaacaaattattgaataaggaaaccagatcagaagacttaacacagggagagctaattcagaacgatatagctctaccgcattaggaaagaaaatcaacaggaaagacaaggcaaaccagccgatataaactgctatgcaaattaatgaatgggtaactctgtctgtgtattgcatcatgctttaggataacttccgtttaaatgatgatgttataccatgaaaatagctaatttatagtcgtaaaatcctattaggattagggctaattgttcgaattcacagggagctaaaagtgatctaacaaaaattaaaaacagccaattttatctaacccgccaatatcccccttttttcgcaccaacacgaattaaatacccaaagtcctgcaatactttaatatttcgttctattgttctaggagtaacgcctaaatcatcagctagttgagatattgttatagctggatgattgacaataatagacaggatttttttcgcagtcgcgttcagctgttgtgtattttcttccgacatttgtaccgacatttgtaccgacatttcttccgactctaagatagtatcctgctgttctgtatcaatactttccttaagtgcttcagctaatttttccagtataaaatcgataaataccgtgcaatcactggcctgatcacattctctaagaacctgataatatgcttgctgttgataatgaataatggtttcaaccggcaaccatgccaactccgagcgccattcactcaaaatcaacgtttgccataaacggcccatgcggccattaccatcagcaaatggatgaataaattcaaactcataatgaaaaatagaactggcaattaacggatggatatcagtttgctttaaccatgtaagtaattcgttaatcaaacgggatatttggctggcaggaggtgccatatgaataagtttattttcacgataaataccaacatcattgccacgtaattgtcccggaaaatcaattaatcccatcatcaataaccggtgtgcggctaataagtcagataatcggtgactacgccaatccggtaatttctcataagctaatatcgcattgtgtacttcctgaatatcctttgcaggagccagtacacgtttaccattcataattgccgtgacttgctcgatcgataaactattatgctcaattgccaatgacgcttgtattgtgcgaatccggttttctttacgtaacaaaggagaactcatctcattttgtactgaccagcgccccaataactcacctatttctataacacgattaagtatagatggggtgatacggtaaggaggttggtaagccgccacattaatttcctcttgaattgaccaagtgttaaagtgaggttatcacaacatcatattaacctgaatttatagaattctgcctatgagtgaataccaatattaccattttgaacggctggatggcgtgctgtcggcacagcaaaaagccagtctgagaatgatctccagccgtgccgaaatcagttcgagtcatttttctgttcattataactatagtgatttaaaagctgatccagataaactaatggttcagtattttgatatcgggctttactatgcgaattggggccaggttattttctacctaaaagtaccgttagatacgatcccgccggtatttatgcacattgatgatggtgactctgtaacctgtgagaatgtgaatgggtacgtactattcacattttctgtgggtgaaaatgattattatatggacgatgaagatgcaagtgattatctgaatcatttggttgaattacgttcagagttactgagaggagattaccgtctgctatatctcccctggctgaaactcgcatttgataacgatgagacgctgtctgaactccctctgattaatttcgattttaatcaattatctgatgcacaattggcatttgcagaattattcgatattcctccagcagcatacaaggctttagatatgctgcttaaatcatcaccagcacatcccgctgaggttaagcagttgaccacagaagagcaaattaatcagctatctgatgcagataaagatttgttattgaaatccttatttgataaaggacaactgactgcacatcaagcgagagcattagtttgcaaaccgtcaaccagcaatgattatcaatattggctgagtccttcctcacttcatacttattggcaggctgcgaatgaggaaatggaacgggaacgcttgctggctgaagaaagaaagcgcgaacaagagcggcttgcaacattaaaacggctcaatgcggtctttgccgcaaaagaaattcactggaaaaatgcgaagacatacagtgaacaaggccatgccagcgcttacgataaagcggccagagaaataaaagatctgtacgcggcttatcagattaataatgcattagccgaatttgtgacaatttatcaggtatttgccaagggtatagaaagaagaagaacattagttcaacgactgggattactcaatcaggaaattaataagtatcagggtagtatgtaatttaattccccgtccttttgtggctgttttggacggggaatacagtgagcaggataatgtcttactttagctgagaatataaatccgcaatggaacgaaccactgcggcagtcgtctggcaatccactactgccgtatgcgcttttcccttcactgatactcccgcagcccgtgctgcattggccagtgaaatagtgccatatcggtttgttgcaccataaaactgagctgccaatcccattgcacactgagactgcaactgctttatccaacgcgtatccatcgcaaatgccttcgcagtctgagctataagcctgagatcaaacttttcattaaaaataatcaaaggacggctggtcaaaagcgggataagttcatcagcaatctgcggccattgaggttcattactcaaagcactcagggttataccgtgaacagcttgagcttcaggatcaatcagtacagaagggcggagatagcgctgaaaaatcaccttcccatcgatatctgtaacggctatctcaacgacctgtgcctgtttatctaaacctgtggtttcagtatccagaatatatgcacgttccgtgatccattgatgggcctgtgtaataattctttctcggaacatctttttttccttaataattttaaggatagttgctttatcgggatacttttctggatcgaacactattattatcctttattatttatcgtattaattcaaataggatctttaagcattaaaccaaataaaggattatcaacaaccgggacagccgcggtatcaaatttgtctggctccggcaaaaaatcaatatccattaatgcgacaaaccgtgacggtgccaagtaggcttcttcgatatcatccgcgtacatcaccataccaaactcattttcatccaacgtcacaaatcgacgattacgcttgttaaacagtacataaccgaccacatcaggatctttttccattaactttaacgcatcaagctctttcttaagtttttttagtttcataataaatttccactcgttttaatagccacaattagttccaccttaagttaaaatgctaactaattatttttattgagggttttaacggcaacttcaaactgccttggagtaacctgctgtttgtgctggttccaactgtgtacagcccgaattatttacgaattatttactttgaactttttgtatgttcatacttaatcagccagtgtagtggctccccagcctctcgcataaaataaagcagcctatgtacctcaagcagagaatacgttacctagaagtggtcctctgcatagtaattcatatcatatctattcagacaatcaaattccgtgtgccactacagttcggaagcagtgagtataagtgaggttgaagtaggtgtcttatggaagcctcattttacttttttatctatatttagaataaatttgtaactattatttaagataggatatctattaggctagggtaattgactccagccggaagaatgaataaatgacaaaaatcgtcgacatgataaaaaatttctactagcttaaccatagcttgttcttcctcagagcagtttttcagcctttaccaaaacttttcttctgaaacaggcagttcgtcgatttctatccaaaactcaggttaattaaaaggattaagctcaatgtcgagtatggtgttttgccgcgggtgcggtaataaaattcacgaaacagctaaggcgtgtccaaactgtggtgcaatacaaggaactgcaggaactaaaaaccgtatcgctgctgcgctcttagcattttttctaggggggattggcgttcataagttttatctgggtaaaattgcgcaaggctttttatatctaattttctgttggacgtttattccttacttcatttctttcattgaattcattatttacctgtgcaactccgatgaagagtttgcccgtaagtatggttaattaaccccaattctgtttaagctgtcactggaatatcttcttcttctgagtagaaaactttcagtgatggtttcttctttttatgacaataagcaattaaccccgttaaaacagtcaacagaaacccttttatacttcgatgacgagaatgttctatttgacagatatttttcaattgcccattaaccgtctcgataataaaacgccttgataacatcatcttatcccaatcttccagcacactcgctttaatattactccgctttttcgtgatgaaagtgacaccgttttgtgctaaatcgtttgctctaaagctttagagcgcacataaaggagc

SEQ ID NO: 98 - DNA, 17362 bp, Xenorhabdus sp.
atgtttacacagctcagtgatcccctgctccgcgaaggccatacgttttttgccttcaaaattaaatggcttggtgacaacagcaacggtcagaattccaagctctttggcaatctcagccacaacgggagcagcaccggttcctgtaccgccacccataccggcagcgataaataccatatcggccccttccagtgccgtacgcagtgattcgcggtcttcttcagccgctgtacgtccgacctcagggtttgcaccagcgcccaatccttttgtaatgccgttgccaatctggatggtctgaccgacagctgttttacgcaatgcctgagcatcagtgttaaccgcaaagaaatcgacaccttcaatacgctcacgcaccatatgttcaacagcattaccgccgccaccgccgacgccgatgactttaatcaccgcgtcattggttaattccagtggttcaaacataatttctctccgttttgtgcctttatgtcgaggccgacatcattttcacggcctctgtataaaaaatcaaaattcttttctcagccagctactgacttttttgaaccagccgcttactgaagttcttttatcagcatcagaatcaccgccaaggtgggattctttgccataatgcagaagcccgactgctgttgagtagcaaggctcctgcacgtaatctgtcaggccggtaatgttcaggggacgtccaatacgtacctgagtatgaaatactctttgggcacactcagccaacccatctatctgagcccccccacctgttaaaacgatccctgcggccagatgatgttttaccccctgctgacgcaattgctcctgcaatcgtaaaatttcatcattgactaaattcagcagttcggtataacgtggctcaataacctcagccagagtctgccgttgcaaactgcggggagggcgtcctcccacactcggaacttcaacgctttcatccttgctgactatcgaacccagtgcacaaccgtggcgtaccttgatggtctcagcgtcactcggcggtgtaccaaatgcataggcaatatcactggtaacaacatttcctgcatatgggatcactttggtatgacgcaatgcaccgccagtatataccgcgatatccatcgttccgccgccgatatcaacgacacatacccctaattcacgctcatcttctgtcaaaacagcataacttgccgctaatcctgcaaaaataagctggtcaactttcagcccacaacgctcaacagcttttacaatattttttgccatgtcgttatggcaggtaatcaaatgcactttcgcctgcatacgcacaccggaaagcccgactgggtttttgataccttcctgataatcgatagcgtattcctgtgggatcacatgcaaaatacggtgttcatcgcgaacacgaaccgatttggctgtatggacaacactgtccacatcatcctgtgttacttcttcttctgaaattggcaccatgccaatttcgttctggcaactaatatgtttgccagacagcgccagataaactgaagatatttggcaatctgccattaactcagcctgatcaatcgcacgctggacgcatttaacgactgattcaagatcgttgacgccgcctttatccatgccgcgggatgggcaatttcccactccgataatattaaccataccatcgggcagaatttcaccaaccagggcagatacatttgctgtcccgatttcaaggccaactaccaattttctgtccgttgatttgatcatcgttgttctgcctgtctctgtattattgccagtcactatttattttcttgcccgttcattaaagccggtgcgtcagttaataaaggagcccagccaaccgcagcaccactgtcataacgtaagtccacataagccacacgtttttgcgtgtttttctgcaacacagggtaaagttcaataaaacgctgaatgcgcccttcttgatctttattacccaattccagccggacgtcattatccagtaccagttgccaggaattacgagccgtcatgatcactgctttcaatttcattttatgtgcagcaagctgttcagccattgtgcgatattctgccaatacgactttttctttgccttccgggccatagagcatggaataatgccctccggcgctacgttcaataggcaaactgaatactcttccttctttatccagcatgtgcgtatcattccaacgcacataagggacgtattctaccagatgaattttcagttcatcaggccattgtttacgtacagtgacctgacggatccatggcagccgctctatctggccctgaatgacattgacatcctgtgtcataaatgtctctggcgtgcccagtgacaggattgcctgcctgacatcatcatccgtggtgtaatgccgctggcctgtcaataccagttttgagagtggcagccggtttgaatccttcatccactctaaggttacccagctcccccatatgacagtaccaaccaccatcagaaagaagaggaaccctgccagataataaccattactggggcgggaactccgaacttcaatttcccgcgtattccgggctgcctgtgacatatcaatcagccagctccagaattctcgctactaattgtgaaaaacttaatcccgtctgacgcgcagcctgaggcaccagactatgacttgtcatgcccggagaagtgttcacttccagtagatagaaattgccatttccatcatccatgatatcaacccttccccagccactgcatcccactatcttgtaggctcttaatgcgagatccgccaactcttgctctttttctacacttaaaccactagggcagaaatatttagtttcgtttgagatatatttcgcatcatagtcataaaatacttccggtgcctgaatacgaatggagggaagaacttcatcaccaagaaatgccactgtatattccgggccaaacatccatttctcaaccaagataatttggtcatattgaaatgccagctccagtgctccacgcaactcggagtagtcattcactttggtcatgccaacactggaaccttccagatttggcttaaccattaatggcagccctaattcttgaacatattctttgatttgaaaatcattaagttgttcaaattgatgagaattaatcacaacatagggagaaacaggcagttttgccccttgccatagctgctttgtgcgcaatttatccattgataaagcggatgccattacgccgctgccggtataagggagctgcaaaaattccagtacaccctgtactgtaccatcttcaccaccacgtccatgcagggcgataaagactttgctgaacccttcttccttgagtttagtcacatcaaagtattttgtatcgactgaatgtgcattaatacctgcttccttcaacccagctacaacagcctgcccggattgcagtgaaacttcacgttcagcagaagtccctcccaacaagacagcgaccttatcagccatgatgctccccttcattaaaagacggctgtaattttgtttcagccaaattgcgcgctattttaccgatattaccggcaccctgtactaatactaagtcgttgttttccattatttgtgacagcatgaccgaaatttgctccggttctgacaccagtatcggatctaacttccctcgaccgcgaatagtacgacataaggaacggctgtccgcacccggtatcggagtttccccggcagaataaacatccagcattaacagaacatccacctgattcaatacattggcaaagtcatcgtacaaatcacgcgttctggtataacggtgaggctggaataccataacgatacgtttatccggccagccggctcgcgcagccttaactgtcgcatcaacttcagtcggatgatggccataatcatcaaccaacatgacactgccttctttgttattaatattcctgagagaaaaatcccccaggaagtcaaagcggcgtccggttccctgaaattcagccagcgatgccagaatcgcggcatcatcaatgccttcttcagtcgcgacagccaccgcggctgttgcattcagtgcgttatgttttcccggcgcattcaggacaacatgaagttcaggtaaatcttcacggctgatggtaaagaaaccctgtgctcccttctgttcataatgggtaatgcgaacgtcagcctctttgctgaagccataagtcgtcacataacgaccgatacgcggaattaactccttcacaaccggatcatcaatacacatcacggcccgaccataaaatggcaaattatacaggaagttgacaaaagtctgcttcaggttttcaaagtctccctgataggtatccatatgatcgggttcaatattggttaccactgccatcatgggttgtaagtgcaggaaagacgcatcgctttcatccgcttcagcgatcagataacggctggtaccaagacgagcatgcgtacccgcagctttgaccagtccgccattaacaaaggtaggatcaagaccagcctgagcataaatgccggcaatcattgctgtcgtcgtcgttttgccatgagttcccgcaacagcgatgccatgtcggtagcgcatcagctctgccagcatctctgcacggcggataaccgggatacgggcttcacgagccgcaataatttctgggttatcggcaggaattgctgttgatgcaacgaccacactggcattgcgaacattctccgcgcggtgattaaaataaatagttgctcccagttcaatcagttgctgcgtaacaggattgggagcgagatcagaaccacttatctgataaccttcattggccaacacctcggcgatcccacccatgccagcaccaccaatgccaacaaagtggatatgcctgacttttctcatttcaggcactgaagctcttaatttcgccaactgttgtatattcacgttttaatcttcactagttatgtttacttctccgctctgccggtatcttaaaaacccacaaaacggcctgaatactattttttagcggcgtcagtcaatgccgcagctactcgttcagttgcatcgataatggcaacagaatgagctttttctgccatttcctgcaattgcggacgcttccactgtttcagcaattccacgacggcatccgccgtaaattgaggctgttcaagtatttttgctgctcctgcttgttccagcggcaacgcattccagtattgctggcgatctttatgctgaaacggtacgaaaatcgcaggtaaacctgccgctgaaatttcactgacggtcaatgcaccggaacgacaaatgacgatatcagcccatgcgtaagcctgcgccatatcatcaataaactcagtcaccctaaaatcagcgacagctaagtcggtatattttttctgtgtttctgcctgtgcacctttgcccgcctgatgccatacagagatactctctcccagacgggaagcggcttctggcattgtctggttcagaattcttgcaccctgactgccaccaacaataagaacgcacacaggcccttgtctgtctgcgaggcgctgtgctggtgcaggtaatgccaatacatctttacgaaccggattaccaaccaccggagcatcaggaaatgcccccggaaaagcctgcaaaactgtttttgcaattttagccagccagcggttagttaatcctgcaataccgttctgctcatggagcacaaccggaacaccacacaaccatgcagcaataccacccggccctgaaacgtatccacccattcccagcacgacgtccggctgataacgtcggataatcgcttttgcctgccggatcgccttaaaaattctgataggtgcagcaagtagcgcttttatccctttgccccgcaaacctgaaatctgaataaattcgatctctatgccatgtttcggaactaaatcagcctccatgcgatcagctgttcccaaccagcgaatctcccagccctgttctttcaaataatgggcaaccgccagccccggaaacacatggcctccggttccgcccgccattaccatcaaccgccggtttttgccactcatttagggctccttacgaacgcctgcgcttttgccagacgcacttcataatcaattcgcaataataaaacgatggccgttgacatcacgatcaggctcgagccaccataactgacaagaggcaatgtcagcccttttgtcggtaacatccctgaagctgcacccacattgatgaatgcctgaaagctgaaccagagaccaatggcacaggccagaaaacctgcaaatcgctgatcgagctgcaacgcgcggcggccaatcatcattgcgcggaaagcgacgaagaataccattgccaacaccaaaaccacacctaaataacctaattcttcccctaaaatggagaaaataaagtcagtgtgtgcttccggcagatattccagtttctgaactgaatttccaagcccttgcccgaaaaagtctccgcgaccaaatgccatcagggattgtgtaagctgatagccactaccgaaaggatcatcccacggatttaggaaagaagttaccctgcgcacacggtatggctcggcaataatcagcacgataaccgcaaagatcccgcagccaatgatggcaagaaactgccacagttttgcccccgccaaaaataacagagccagagttgttacaaacagtacaaccacggttcccaaatcgggttgggctagtagcaggacagccagcgcaatcatgacgcccatcggcttacagaacccccagaagttgtttctcacctcttcgacttttctcaccagatagctggagaggtaacaaaagagtgacaacttcgacaattccgccggctgaatacgtaaagggccaatggctacccaacgagatgcaccatttaccgagctacccacaaacagcacgacaaccagcatcatgatcgtcattaataacataacaatgctgtaacgctgccagaacgccatcggaatacgcaacgtaatcagcgacaggccgaatgacagccccagataagttgcatcgcgattcgagaagataaatggatcctgagcaagacgctgaccgactggcattgaagccgatgtcaccatcacaaaaccaatcgccgctaacccaagcaccatccagaccagggtacgatcatacatgacgatatctgtgggatctgtctccacattacccgccagccaatttttaaatttaccgaggcccggaatgatcattaacccaactcctccgccaaacgggagaactcataaccccgctgttcaaaaccactaaactgatcaaagctcgcacaggctggtgacaataacaccatgtctccgctaaccaatttgggggtaatctccctcatggcctgttccatcgtatccgtcagtgtggaaatttcaggacgcagctgcgccagttgatttccatcacgaccaaaacaataaagacgaatgttatttccggataaataagaccgaagaggggtgaaatcagcctctttcccgtcgccaccgactaacaggtaaagcgtgccctccagcatcaggccactcaatgctgcctgagtgctgccgacatttgttgctttggaatcgttgacccagcgaataccgtttctcatatgaactacctgaaaacggtgagccagcccctgataagtacgcagagccagcagacttgcttcacgggggatattaaccgcatcggccagagccagcgcagcaagcccgttagtgtagttatgctgacctgtcagacacatctcacgtgtagacaggacgggctgttgattggcaactaattgttgctgctcactgtcaagccggtaatcaccacttccgacaccaaaactaatacaacggctgtctttacctgctaccggcagggtcaaatcatcctgctcattcactacgcacactttggcctgatcatagatgcgcagcttggctgcgcgatattgagccagcccttcagggtagcgaaccatatggtcttccgtgacattaagcacggtcgcagcagctgcccgcaggttgtaagttgtctcaagctgaaaactggaaagttccaagacatatagctgacacggttgcttcagtaactccagagccgggacaccgatattccctccaactccaacctgccatccggcggctttcgccatttcccccaccagagtggttactgtacttttgccatttgagcccgtaatcgccacaatcggccctgttgcttcacggcagaacagttcaatatctccgactatttcaataccagcatcaatcgcggcctgtagttcaggtgttgccagcgcaatacccgggctggagacgattaagtcagcttccatcagccattgtttgttgaagctgccggtgtggcattcaacattatcaggcagcttgtcacttcccggcggtacgatacgggtatccatcacacgaggaatcactccacgcgccatgaaaaagtcaacgcaggaaaggccggttaatcccagcccaacaataacgacttttttaccttcgtattttgtcatgatccgttcagtcatgattagcgtaccttcagtgttgccagaccaatcagtaccagcatcagggaaataatccagaaacgtacaataacgcgtggctccggccagcctttcagctcatagtgatggtgaataggcgccatacggaaaatacgctgaccgcgtaatttgaaagagccgacctgcaaaataacggacagtgtttccacaacaaacactccccccataatgaccagcagaaactcctgacgcagtaacaccgcaatcgttcccagtgctccgcccagagccagtgaaccaacatcgcccatgaaaacctgagccgggtaggtgttgaaccacaggaaacccagccctgccccgactattgcggtgcagacaatcactaattcaccggcatggctcaggtaaggaatatgcagataattggcaaaattgacgttacctgttgcccatgccactaatgcaaaaccggctgccaccagcacggttggcataattgccagaccatccagcccatcggtcaggttaacggcattactggttccgacaatcacaaagtaagtcagcaagatgtacagcaggccaagctgcggcatcacatctttgaaaaacggcacaactaattgtgttgccggtgtgtctttaccaatgctgtacatcgcaaatgccacaccaagagccagtacggactgccagaaatatttccagcgggcaatcagccctttagtgtctttacggacaaccttccggtaatcatcaacgaacccgacgatgccgtaacccagcaatacagctagtacacaccagacataagggttatccagacgcgcccataacaggacagaaatagtaatcgaaaacaggatcagcaacccacccatcgtcggtgttccacgcttgctgaaatgggattccggcccatcgttacgtacaacctgaccaatctgtaacttttgcagataagcaatcagagttggccccatccacaatgcaatagacaacgcagtcagcaagccgacaatcgctctgaacgtcaaataggaaaagacgttaaatcctgtatgatacttaaccagatactcagccagccaaactaacattggaagttctccttcagtgagtccactacctcttccattttggcgctgcgtgaacctttaattaatacagaaatcgtttcgtgttgcttcaatacaggaagcagtgctgcaactaactcggccttgctggaaaaatgctgaccacgaccacttgcatcactaatatgggcacttaaaggcccgacgctaagcagttgttcaatgtctgtcgatgcaacagcttcaccaacctgacggtggcactcaatcgcctgatcacccaactcacccatatcgctgacaaccatcactcgataaccgggcatccgggctaatacctgtgccgcggcaatcatagagccgggattcgcgttataagtatcatccagcaccacttttccggcagccagaggaaccgggaataaccgccccggcacagctttcagccctaataaacccgtacggatattatcaagggatgctccgacggaaatcgccagtgcactggcggctaatacattggctatattgtgttttccgggcaacggcaacgcgatttcacaattaccgattggtgtatgcaggcagaaatgcgtttccagcggctgctcctgaatatctgtcacataaaaatcggcgtctgccgcaggtgtaatggaaaaacgccataccgtctgctgatcactgatgctctgctgccagttatgccagtcattgctatccagattgataatggcagttcctgtggacgaaagccctgcaaaaatttcaccttttgctttggccactcccgccagcgaaccaaacccttccagatgggcagaaaacaggttattaaccagcgcactttcaggccgaaccatctccgtggtataagcaatttcaccaatatggttagcacccagctcaataaccgcaaactggtgttccagcgtaaggcggaacagggttaacggtacaccgatatcgttattaaagttgcctgcggtataaagcgtattaccgcattgacgtaaaatcgcagcggtcatctctttcacggaggttttgccggaagaccccgtcaatgcaacaattcgtgcattgctttgcccgcgaacccagcccgccagtttgcccatcgccaaacgggtgtcttctacaaccacctgaggacaatccacttcaagaggtcgctcgaccaacaaaacagcggcgccttgcttcgctacatcagccgcgaagtgatgggcatcaaagttttccccttttaaagcaatgaacagatcaccacctgtgattttgcggctgtcagttgtcaccgcctcaatgcggataatggccgcctgctgcccggaaacgtgatgtaacgttccttcggtcacttgtgctaattgttgtagagtcagtgggatcatgctgtcacccccagcagacgcgcaacagtcagacgatctgaataatccagacggcggttccctaccaattgatagtcttcatggcctttacctgctaccagtacaacatcgtcttctgccgcctgcataatggcactggttacagcttcaacacgcccatgaataaccatcgcacggcccggatcgatgaaacctgtcagaatatccgcaacaatagactgaggctcttcactgcgtggattgtcatcagtaacaaccacccgatctgcctcttgctcagcaacgcctcccattagtgggcgtttgcctttatcgcgatcgcctccgcaaccgaatacacaccagagctgccccttacagtgcagccttgccgctgccagtgctttttccagtgcatccggtgtgtgagcataatcgacgactaccgtcggacggcctgaggctgaaaatacttccattcgcccacaaaccgggatcagacaagatacagttgccagcagtttttctaacggatattccagtgataatagcgttgcaagagctaataacaggttgctgacattaaaggctcccatcagaggactttcgagagttccgcttccccagctggatgtgaaggtaatagacgcgcctttatcatggtaatgaatgtccgttgccgataaccaccgcccctgccagttttccggcagacgattttccatcgtgacggcgacagtttcagataacaccgcatcaggtaatcgggataaccatttcagaccgatgtcatcatcagcattaataattttttgtttaacgttatgtgtgctgaacagcagccatttggcttcttcgtagctttccatatcgccatgataatcaaggtgatcacggctcaaattagtaaaaacagcggcctgatacggtaacgatgctacacggctttgtattaagccatgtgatgaaacttccattgccgcaaacgttgctttctgattgacgagttgctgtaagtcaagctgaatgtcaacggctgaacctgtcgtgttttcagtaggaacagtcatgcccagcagaccatttcccaccgttcccatcacggcactggtttctcccagcccctgactccactgtgccaacaattgtgttgttgttgttttaccgttggttcctgtgacgccaaccagctttaatttgttacccgggtgctgataaaattcacctgccaatttcgacagtttattatttaaatcatcaagatagataaccggaacaccatgcatttcctgaatagtgccgttatccgcttttccctccgcttcagcgatcaccgcagcgaccccctgagcgatggcttgaggaatgtattttcgaccatctgtctgatgccctttaaccgcaacaaacagatctccggcagccgctttgcggctgtccaatgtcatttctcgtagcggaagctcaggggcattaatcccccagagagccaacaaatcgcgtaaattacgatcttccacttttatcctctttttatttattcaacacagattagttattaattagttatcaactacaaactcttttttatcgtccgcaggcaaagcatcaggctcaacattcatcgtacggagaacaccactcatgatggcaccgaagataggcgctgaaactgcaccgccataatattttcctgcctgtggatcatcgataatcacaaccagtgcaaaacgtggattactcgcaggcgcaatacctgcggtataggaaatatatttatttacatatttaccgtccggcccgacttttttagccgtaccggttttaatcgcaatacgatagccttttatcgccgcacgtaccccaccaccaccgggcagtgccacgctttccatcatgtgtaccacagtgcgcataatatgctcaggaaatacccgggttcccggaacaggtgggtcaactttggtaatcgataatgggcgataaacacccagactgcctatcgttgcataggctcgcgctaactgtaacggtgttaccatcagcccgtagccgaaggagaaggtggccctctcaagatctgaccacctttgtctattttttggaaatacgccactcttttctccgaccaaccccaaatcggtcggttttcccatcccaaagcggtaatacacatctaccagctctgaggcaggcatcgctaacgccagtttagaaacaccaacgttactcgacttctgtaagatccccgtgatggttaattcagagcgaggggcaacatctttaatttcatggcctctcgaaccgtacatcaaccggtagggtctggtatccaatacggtattttctttgacaatcccattattcagcgcactcatcacaaccagcggttttatcgtggagccgggttcaaacatgtcagtgatagcccggttacgcatcgcatctttgggagtgccagccagattattcgggttataggacgggctgtttgccattgccagtacttcaccggtattaacgtctaccaatacggctgtaccggattcggccttgttaagtacgacggctttggttaattcccgatagaccaatgtctgtagtcgttcatcaatactgagcgccagatcatgggcagccctgctgtctacagatgaaatatcctcaataacccggccgttacgatccttacggacagtccggctacccggtttacccgtcagccagctatcaaaactcttttccaccccttcaataccattgccatcaatattggtcacaccgataatgtgtgccgtcacctggcctgccgggtaataacgacgggactcctgacgcagatagataccggggagtttcagttttccgacataatcgccaattgaggtattaacctgacgggcaagatagacgaatcgacctttgggatattcattaattttactggtgagttggtctaggggaatagagagtgcatcagccagtgcctgccagcgggtatcatccgtaatcccacctttttcaaagacttctttcggatccgcccagacggcatctaccggtacgctgacagccagcggacgcccattgcggtcgttaatcatgccacgagaggtaggaatggactggacacgcaaagagcgggaatccccctctttcaccaaacggtcagggttgataatctgcaaataagccactcgaatcaaaagcccgattaaagcaagcgaaatgcccccgcagagcaagacaaaacgccacttaacaaaactggctttatcttcttgttttttcaactttaaagagcgtgcagctttcatcgcctaccttttagttgtcaactggactttattgagtgatcacaatattttcttgtgctggatcgacatgttgcatgtgaaatttttcagtcgctatagattcgatccgactgtggtcacccaatgcattttcttcaaggagcaagttacgccattcaatatcctgagcatcaatctgaattgcctgacgttctttctccgcagtcaataagcgggtctgatgggtgaccgtcactacactgatggctgaaaccacaacagctaccagtaaaatcagtgggattttggcattacggaacaaatccctgccaataacccccactaatccatgacgttcacctgccactattcacctgccttctcatcacctgccttttcagcaaatcgcaataccgaacttcttgctctcggattggttgccacttcatcctctgagggttttaacctgccaattgatttcagactacgtcctcccaatgccctcaattgtacttcggtaagcggcagacctgccggcaccttaggcccctgactatgttgctggataaagcgtttcactatgcgatcttccaacgaatggaaactgatgactgataatcgcccttgtggtgctaaaacttgcaatgcaccgtccaatgcacgttctatttcttccagttcactgttaatgtagattctgatagcctgaaaactgcgtgtcgcaggatgcttatgcttctccttaattggacttgccttcgcaattaactctgccaattctctggttcgcgtaatcggttcttcctgattgcgagcaacaatggctcttgcaatacgtttggcaaaacgctcttcaccaaacgttttcagtacccacgcgatatcatctgcttcagccttcatcagccactctgaggctgattgccctcgggttgtatccatccgcatatccagtggcccgtcacgcataaatgagaaaccacgttcaggatcatccagctgcggtgaagacacccctaaatccaacagtacaccatcaatctttccagccagacctgcatcttttacataggtcgccaaatctgaaaatggcccatgtgtaatggaaaaacgcgggtcagtaatcgcctttgatgcttcaatggcctgcgggtcgcgatcaattgccatcaaacgaccattcggccctaattttgataaaatcaggcgagagtgcccccctcgcccgaatgttccatcaatataaattccatcttcccggatattcagtccattgacagcttcatccagtaatacactggtatgcttgaaatgactatttgccatgtttatagtgataaatcctgtagccttgctgataaaggttcttgtgtagattgttcagcagcgatgtcactttgtacttgctgataccagacctgctcatcccacaattcaaatttattaaattgcccaaccagcatgacctcttttgttagccctgcatgctgacgcaatgtatgggctaacaaaagacgtcctgcactgtccatttggcattcactggcgtgtcctaataacaaacgttgaacacgacgttcggctgggttcatgctggataagcgagataatttttcttcgatgatttcccattcgggtaatgtataaagcaacagacacggctggtgaagatcaatagtacaaaccatttgaccttttgattccgtattcagcgtttccctatatcgggcaggtacagtaagtcgccctttagtatcgagattaaccagcgttgctccacgaaacatactcaggttaccccttgatggccgaaatctccacattatcccacaaatcaccacaattaagagtttacggatggtatgaaaaccttgtcaagccagagccagtgtgctttagctagatttacagaaagatttaagagagaaaaagaaggattttttagatttggcaagattattatcagctaacactatgataaaactaagttatttatagatgatacaaagactaacctgaaaaaaattttttaggacaaataattatcacttaaattaatttatgcaatccatatctcattattgcacaattgttaatcaatcgtaatctatcaattataaaaatatactcagatcaaaatagtataaaaagtaataataaactgaaataaagtagaacaaaaaaacctgcaattacttgaatataaagtatataactaaatatctcacacaaaagaaataacttatctttataatatatttcttaagcgaagatatcgttcttttcaccttcgatagcctatttgccattttttcactcatagattttcgttcagaaaaattttagtcggaatagtctcaaaattaaatcaacgaatctatttgaatgatttttggagcatcatattgcacccccacctaaaatgagggcacaccaatcagtctttacgactcagacttccccgacggcataagtgacgacgcatacgggttattccgggttccggcctctgtttttcatcaaggctagctaataccagtgacaaagcctgttcagcaacatcacgatgccgctgtgctaccgataataccgggcactcaagaaaatcaagcaactcatgatcaccaaatgttgcaatgactaactgttctggcaaccgtccgctgcgtttcaggatggtatccatcaccccctgaagcaaggcaaatgaagtcgtgtaaagtacctgaggcaaaggatttttttccagccatgaagcaaaaacgtcagccgctgcttcacgttcatagctgttcgcatagagataactcacctgacgcggatcattttcccatgcttcgcggaacccttgttcacgtaaaaaactgacggataattcaggcaatgcgcccaaataaagcacggattctgaaggaaactggcgtaattcctgtgcctttagagcac

SEQ ID NO: 99 - DNA, 18688 bp, Xenorhabdus sp.
aggacgcccggcttttatataaagaggtgtgcggataatagcctggggctgagggcattggcacaaaatgatttttcagggggttttgtctatccgtcccgatagttcttgagttttttaattatttagggatttattttacgcaggcaggcaattttgattctgcctatgaagcgtttgatttctgtttaagagctggatccaacttacaactacgcgcgaatgaatcgcggcatcgcattgtactacggcggccgttatcgtttagcgcaggatgatctgcaggcgttttatcaagacgatccaaatgatcccttccgttcgttgtggttgtaccttgtggaagagaaactcgatcccaaggttgcaataactagtttgtcaaatcgttttgacaaagcgaaccgggggctatggggctggaatatcgttgaattctatttaggtaaaatcagtgaaaaaacactgatggaacgcctgaagcaggattcgacagataacacttcgctcgctgagcatctcagtgaaactgacttctatttaggtaaacattacctaagtctgggggatgaggatagcgcggttgcgttattcaagctgacggtagctaacaatgtccataactttgttgagcaccgctatgcattgttggaattggcgctgctaggccaaagacaagatgacttatcggaatcgaaccaacaatagctgacgaacattttcacgacagatttttaagtccacatcttaaggggtgggggcttgtttgttcgtttaataacataatttgagccagttcacattttaaatgaaaatgacagaaattcttttcactgtgttatgtagactggccgccacgattaatgaggcaccattacatgaccactgagactgaaatctcttttgctgatttagggttatcagcacctattctttctgcgttgcaagacatgggctatgagaagccttctccaattcaacagcaatgcattcctcacctattaaatggtcgtgacgtgctgggtatggcacagactggtagtggtaaaactgcggcatttagcttacctctactacataatattgatgctgagcttagagctccacagatccttgtgttagcaccgacccgtgaactggcggtacaggttgctgaagcatgttcagatttttctaaacacatgcgcagtgtgaatgttgtcgcactttatggtggacagcgttatgacgttcagctgcgtgctttgcgtcaggggccacaagttgttgtaggtacaccgggtcgtctgctggatcacctgaagcgtggtacgctggatctgtccaacctgaaaggtctggtactggacgaagctgacgaaatgctgcgtatgggctttatcgaagatgttgaaaacatcatgagccagatcccggcggaacatcagactgctctgttctcagcaactatgcctgaagcgattcgtcgtattactcgtcgtttcatgaaggagccacaggaagttcgtatccagtccagcgtaaccaaccgtccggatatcagccagagctactggtctgtttacggtggtgtacgtaaaaacgaagcactggtacgtttccttgaagcagaagattttgatgcggcgattattttcgtacgtaccaagaatgcaacgctggaagtggcagaaacccttgagcgtaacggttataactctgcggcactgaacggtgacatgaatcaggctctgcgtgagcagactctggagcgtctgaagaatggtcgtctggatattctgatcgcgactgacgttgctgctcgtggtttggatgttgaccgtattagcctggttgttaactacgacatcccaatggatgcggagtcttatgtacaccgtatcggtcgtacaggccgtgctggccgtgcaggtcgcgcgctgctgtttgttgaaaaccgcgaacgtcgtctgctgcgtaacattgaacgcacaatgaagctgacaatcccagaagtagaactgccgaatgcagaactgctgagccagcgccgtctggagaaatttgcaggtaacgttcagcaacaactggaaagcagcgatctggatcaataccgcgctctgctgtctaagctgggtaccggtgaagaactggatatggaaacactggcagcagcactgctgaaaatggcacagggtgaacgcccactgatcctgccaccagatcctgtccgtcgtcctcgtcgtgaattcaatgatcgtgatgaccgtcgtcgtaatggtaatagcttcggtgagcgtgatcgtggcgacagaggtgacagaggcgaccgtggtgatcgtcctcgtcgtgagcgtcgtgatgttggcgatatggaactgtaccgtattgaagtgggccgtgatgatggtgttgaagttcgccacattgttggtgcgattgctaacgaaggtgatatcagcagccgttacatcggtaacatcaaactgttcgcaactcactctaccattgagctgccaaaaggaatgccgggagacctgctgtcacacttcactcgtacccgtatcctgaacaagccactgaatatgcagctgctaggtgatgcacaaccatttgaacgtcgtgaacgtcgtgagcgtcgtggtggtggtcgtaatggcggtaatggtggcaacggcggtaacggtgcacgtcgtgatcgtgacggttttagcaacggcaacggtggtggtcgtcgctttaataacaatgaacgtcgtggtggcggtgagcgcggttctttccgtggccgtggcaatgacgatttcaacggtggtcagcgtcgccgccagcaaccaagcaatggtaacgtgtaatacgccattgagtgttgctttgtgttagtggtaacacactgaaatattgatagaaagaggccctttcttcttactggagaaagggcttttctttatggctttagccagtttaagtcgcgttagcgtcttaaacataaaaccacccgctttgcgggtggagttcaaaggttataccaagaaaaacacctttccgttacgatatagatgtacaagctaatattcgtaactcaaataaggaaaggtgtttatgggcattaaagcacaaagctcagcgcatacaaagtggctgtgtaaataccatatcgtcttttcgccgaaatatagacggaaagtgatttttaataatattcgttcaagtgtgggagagatcctcagagacctttgtaagtataaaggtgtggaaataatcgaaggtcatctcatgccagatcatgttcatatgttggtgagtattccaccaaagctaagcgtttcaagctttatgggatatttgaagggtaaaagttcgttgatgatctttgatagacacgccaatttaaaatataaatttggcaacagaaagttttgggcggaagggttctatgtcagtacggtagggctaaatgaagcgacaattcaaaagtatatcagagagcaagaaaagtcggatttaatctcggataaattgagtagtaaagagcatgtagaccccttcaaggggtaggccaaagcagcaaagacacttagcttgaacgaagagaaagcagcgtcatttaggcgcagtcggtaacaagcccttatagggcaagagcaaaccacccgttatacgggtggttatgatttattgttcttgaaaaaaacagatttaacctcatatcctttcttactattatgtaatggcttactactttttatagagggaagccctctgttagttaactttggatcatggtcatcatcgcttatctcaagtagaatcagttatgaatggcaccagcgtgagttctattaggagacggaaatgtcatacagtggcaagcaagatcaatatgcacctaacatgtctttggtgccgatggtggttgaacagacagcacgtggggaacgtgcatttgatatttattcccgcttattaaaagatcgaattatttttctgacgggtcaggtagaagaccatatggcgaatttaattgtcgctcagatgctcttcctggaagcagaaaacccagaaaaagacattcacttatatatcaactcgccgggtggggttatcacagctggtatgtctatttatgacaccatgcaatttattaagccagatgtgagtactatttgtatggggcaagcctgctcaatgggagcgttcttgttaacagctggtgcaaaagggaaacgtttctgtttgccaaattccagagtgatgatccatcagccattaggtggatttcaggggcaggcaacagatattgaaatccatgcgcaggaaatactcaaagttaaagcacgtatgaatgaattgatggcaaaacatacggggcaatcgcttgagaagatagtcgaagatacagaacgtgatcgtttcttatcagccggggaagccgtagaatacggattggttgatagcatattcacccagcgcaactaatttattgataattaatttattactccaacactataatttaaaggtgaatttttgtacaatcacctgattatgcggagtaatgacagcgttttttctgttatgccagatagactgggataacagctcataaagtgaggttgactgatgacagataagcgcaaagacggttcaggaaagctgctgtattgctctttctgcgggaaaagccaacatgaagtccggaaattaatagctggcccgtcagtgtatatctgcgatgaatgtgtcgatttatgtaatgatatcattcgcgaagaaattaaagagctagtaccacatcgtgagcgtagtacattgcctacccctcatgaaattcgccaacatctggatgattatgtcatcggtcaggaaatggcgaaaaaagtactagcggtagccgtttataaccattataagcgcctgcgtaatggggatactaataacggtgtggaattaggcaaaagtaatattctgctaatcgggccaaccggtagtggtaaaactttgctggcagaaacacttgcccgttatttagatgtaccatttactatggctgatgctacgaccctgactgaagcaggttatgttggggaagacgtagaaaacattattcaaaagcttttgcaaaaatgtgactacgatgtacagaaagcgcagcgtggtatcgtttatattgatgaaatagataaaatctcccgcaaatctgataatccttcaataacacgtgatgtgtcaggtgaaggcgttcagcaggcactgttgaaactgattgaaggcacagtagcagctgttcctcctcagggtggtcgtaagcatccacagcaggagttccttcaggttgatacatctaaaattctgttcatttgtggcggcgcgtttgccgggttgagcaaggttgttagccagcgtttgaatgtcagctctggaataggttttagtgctacagttaaaggtgaatcagagaaagcaactgaaggtgaattgcttgctcaggttgaaccggaagatttaatcaaattcggcttgattcctgagttcattggccgtctgccggttgtggcaacgttgggtgaacttaatgaagaagctttaatccagattctgcaagagccaaaaaacgcgttgacaaaacagtatcaggctttatttaatctggaaggcgttgagctggagttcagaaaagaagctctgacagcgattgctaaaaaagcaatggtgcgtaaaacgggtgctcgtggtcttcgctcaattgtggaaggtgttttattggacacaatgtacgatctcccatcaatggaacatgtagaaaaagttgtcgttgatgagacggttgttgaagataaatccgcaccattattgatatatagcaaaccggatgctcaagtttctggtgagtgatgaaaatagggtaagaagtaccggccatcaattcgcattgaaaaaataaaatgagggattctccctcattttgctttttgcagactcaggctattgaatgtcggattcctgtccccatatattttatattctttgaagtgaaactcgtgaaaaccgtgtttcacgagattcctaaaaactggcgaaagctaaacgaagagagagctctatgaatcctgagcgttccgaacgcatagaaatccctgtattgcctttgcgcgatgtagtggtttacccacatatggtgatccctctgtttgttgggcgagagaagtcgattcattgtctggaagcagcaatggatcatgacaaacaggtcatgttggtagcgcagaaagaagcatccactgatgaaccgggagtcaatgatctattctcggtaggcacagtggcttctgttctacagatgctgaaattaccagatggcacagtgaaggttctggttgaaggcttgcagcgtgcccgcattacaacactgacagataacggtgaatacttttatgcgcaggttgaatatcaggactccccgatcgttgatgagcgcgagcaggaagttttggtaagaaccgcgattaatcagtttgaaggctatatcaaactgaataaaaaaatcccgccggaagtgctgacatcactacacagtattgaagatgccgcaaaactggctgataccattgctgctcacatgccgttaaaaatcaatgacaaacaggctgttttagaaatgtctgatgttgttgagcgcattgaatatctgattgcaatgatggaatcagaaatcgatctgctacaggtagaaaaacgaattcgtaatcgcgttaaaaaacagatggaaaaaagccagcgcgaatactacttgaatgagcaaatgaaggcgattcagaaagaattaggtgagatggatgatgcacctgacgaatatgagacgctgaaacgtaagatcgaaaatgccaagatgcctaaagaggcacgggaaaaagcagaagctgagctgcaaaaattaaaaatgatgtccccaatgtcagcggaagcgacggttgtacgtagctacattgactggatagtgcaggttccgtggaacgcacgcagcaaagtgaaaaaagatttggtgaaagcccaggaaatactggacaccgatcattacggtctggaacgagttaaagatcgtatccttgagtatctggcggtacaaagtcgtgtcagtaaaatcaaggggccaatactatgtctggttgggcctccgggtgtgggtaaaacctcactggggcgttctattgctcgtgcaactggccgtaaatacgtccgcatggcactgggtggagtacgtgatgaagctgaaatacgtggacatcgccgtacttacatcggctcaatgccgggtaagttaatccagaaaatgtctaaaatcggggttaaaaacccactgttcctgttagatgaaattgacaaaatgtcgtctgatatgcgcggtgatccagcatcggctttgctggaagtacttgatcctgaacagaacgtgacattcaacgatcattatcttgaagtggattatgatctgtctgatgtgatgtttgtggcgacatccaattccatgaatattccggcacctttgctggatcgtatggaagtgatccgcttgtcaggttacaccgaagacgaaaaactgaatattgccaagcgtcatttgttacctaaacagattgaacgcaatgcattgaaaaaaggtgaactgaccatcgatgatggtgcgattctcggcattatccgttattacacccgtgaagccggtgtacgtagtctggaacgtgaaatttccaaactgtgtcgtaaggcggttaaagcattgttgatggataaagcgcttaagcatatcgagatcaatgctgaaaacctgaaaaattatctgggtgttcagaaagtggattatggtcgtgctgacactgaaaaccgtgttggtcaggtaaccgggcttgcatggactgaagttggtggtgatctactgaccgtggaaacagccagtgttccgggtaaaggtaaattgacttacactggttcgttgggtgaagttatgcaggaatccattcaggctgcattgacagtagtccgggctcgcgcggataagctgggcatcagttctgatttccacgaaaagcgcgatattcatgttcatgtccctgagggcgcaacacctaaagatggcccgagtgcaggtatcgcaatgtgtacagcgttggtttcctgcctgactggtaatccggttaatgccaatgtggcgatgactggtgaaattactctgcgtgggctcgttctgcctattggtggtttgaaagaaaaattgctggcagctcatcgtggcggaattaaaacggtcatcatccctgatgagaataaacgcgatttggaagaaatccctcagaacgtaattcaggatttggaaatccaccctgttaagcgtatagaagatgttttgactattgctttgcaggagcctgcatttggtgcagaagtgatatcactaaaatagtacaaaaatagtgagctgaatcaagacactgtatgaaaataaggttggtaagctaattcaggcttgccagcctttttttgtctcattaagttatcttaatctaaagatctgattaaatattttgctgttctatgatttcttgctaatactggaattgattgatataacggcaagactgtcgtgttagccgttataaataggcgtttgttacgatagcaaaacaaaatggggatgataagcgtgaataagtcacaactgattgacaaaattgctgctgatgtgaatatctctaaagcagcagccgggcgtgtagtagatgcattcatttcttcagtttctggagcattgaaaggcggtgatgatgtcgttttggtagggtttgggacatttactgtacgtgagcgggccgctcgcataggacgtaaccctcagacaggcaaagaaatcaaaatcgcagcagcaaacgtacctgctttccgtgccggaaaaggcttaaaagatgctgttaacgggtaattgttaaatagccaccttatttaccattacagttataccctatgggttcaagatgttgtcaaacaaagctgtcgtttgtaagtaccgtacagattgaactgactggctggaatctgtaggttaaaaatataagcgcgtcacttgattgatgcgctttttttctcttagcgttcgaattagcgtaatatggcagtttctttttcactaaagcggagttttacgtctttatgatggacaacctacgcacagcggcaaatggcccagtgcttaaaatcgtgttggctctaattatcctgacctttttggtgacgggtttaacaggctacctgtcaagtgaaggcggtaattatgctgccaaagtgaatggtcaaaccattagtcgtgctcagttagagcaggtatttcaacaagataaaatgtcactacaagaaaggctgggggatcaattctctgccctgttaagtaatgagcaggaagtgagagctttgaagcgccagtcattggacagtattatcaataccgttttgcttgaacaatatgcaaataagctgggactatcagctagcgacgaacaggtaaaggaagaaatccgtaagcagcgttatttccagactgacggtaaatttgataacgaaaaatatttacaggtgctcacaaacgctggcctgaatccggataattatgcggagcagattcggcaggatctgatttcccgccagttgcgtacaatattaatgagtaccgaaattgctttaccagcagaaattaagcagcttgcgcagttatcgctacaggaaagaacggctcgtctagcaactcttgaactgaaatcaatcgaagcacagcagtctgtgacagatcaagagctgaaaaattactacaatatgaacagtaagcatttcactgttcctgagaaagtcaaaatcagctacatcaagatggatgctgcggatgaactgaaaaatgttaccgtgactgatgctgatattgaaaagtactataaaaacaacctgtcaaaatatacgcagccagaaagaaagaaatacagtcttattcagctggcatctgaagctgatgcaaaatcggttctggatgaattgaaaaaaggggctgatttcagcaaattagcagaagaaaaatcaacagataaatattctgctaaacaaggaggggatcttggttggatggaagagagctcctcacctgacgaaatcaaatcagctcatttaacagaaaaagggcaactttctgctgttataaaattgtctaatggttatgcagttttccgtctggatgatattaagcctcaggtagtgaagccacttgctgatgagcgctcagccatagagaaaacggttaagcaggaaaaagcgattgatgcattttatgcattacagagaaaagtgagtgaagctgcagccaatgataatgagtctttagcagcggcagagcaggcggcaggttataaagcagtcactacagactggtttgatagagaccacgttccggcagatatcaatttcagtcaggtcgttcaggctattttcttcggtaatttggttgatgataaaagcccttcaggaaccaattctgacgtgatatctgttgatggtgacagggcctttatcattcgcgttgatgaggttaaacctgaatctattttgccatttgaagaagccaaaactgaggtgactgagttggttaaacgtcagaaagctgaaaaacagttacaggttgatagtgaaaacctgcttacagcattaaaagcaggcaagggcgatcaagcactgaaaacggcaggaattcagtttggtgaaccaacggtaatggcacgaaaaaccagtccggttactgatgtattatttacgctacctcaccctaaagacggtaaacctgtatatgggttagcgtatgatggagttggtaatgctgttctgattcaattagataaagtcattccaggctctatttcggaagagcagattaaacaggcaatgatgatggagcagtatcagattagcaatactatgtttgaatccctgattaataatttgcgtgataatgctgagattaaattagggcaaattgattaaattgcgatgctattcgcaatttctcttgcaaaatagtaattgaaaaaggccactttcgtggcctttcgcatatatggatcttccctgttgtgttgaaattttgttatggcactcttttatccgtcaacaaaacatggaggaatttttatgaagtatctaaagggactatttaattcatttgttcttattctgggtatcagtatgccattgtcttatgctgttgcagcagaagagcttgttaataaaacgacacagcttcaaccaactgactctcataagataacggttgaaaaaagtgaattaaataacaaggaagaaaaaacgctctcaggcaaagtcaatatcaatacagcgagtgttgaacaattagcgaaagaacttaatggtgttggtgccaaaaaagcacaggcaattattgagtatcgtgaaaaatatggctcatttacagccattgagcagctacaggaagtgcaaggtattggtccagcatttatagaaaaaaatcgagataaattaatccactgattaaaagctttcttggtaaatacacaaatgattttatcaagggggctgtgatactgatcaagaatcattgattaaacaatattgtaattaaaatgttctgctattgttaatcactttctggtcagatgagtttaaggaaaagagtaatgagtacaattatcaaagtcagaggttatcatattgatgttttccaacatgtaaataatgggcgttacttagagtttatggaggctgctcgttgggatttgttttccgacagtgacacgttgcagtggttaaataataataaaattgcttttattatagccaatattaatattaactatcgtcatccagccgtgttaggagatgaattggaagtacattcatccatgcaggaattacgtaacaaaagtggtactttttttcagaaaattatacgtaaaggtgataacaggattatcgctgatgctttgagtacatttgtttgcgttgatttaaagacacaacaatcgttagtgctggaaggtgaattacgcgaaagattaaatgagtttaaaaatgaaacagtgaagtgagagatatttggtatctcccactgatagactgaattatttgtattagttcagttgcgttttggatttcatttctgccattgtcgactcggcattatttaaataaacatttaatccgttagcacgaagatggcaggctgcgcactcaccacagccatcgccctggataccgttatagcaagtgagagtctgagaacgaacaaagtccagtttttggtaataatccgctaacgcccaggtttccgctttgttgagccacattaagggagtttcaaagcgtatcttgcgagcgatgccaagacagactgcattgttcagggatttgacaaactcatcacggcagtcagggtaaccggaaaaatcagtttcacaaacgccagtaataacggcttcagcttcaacctgatatgcataaattgcagccagagttaagaacagtatattgcggccaggaacaaacgtatttggtaggccatttttttcgctttcactaaaatcgggtacaggaatgttatctcttgtcaggctgctgactgcaagctcattcaataaagtaacatcaagtaccctatgggcggctgcaccaagctctttactgatgcggctggcaacatcaatctcagcacggtggcgttgaccatagtcaaaagtgacacaatggacttcatcatattggcggagtgcctgaattaagcaagtggtggaatcttgcccaccactgaatacaacaacggctcgtttcatgatacctacctttttaaattgaaggaggtatgttactcataactatttaatttgggtagttgtgtgagatattgcgtgaggtcaccgatattattttttacccagtcgggattgtaataggtatcaaggtagcgttcgccgctatcacataacaaagttacgattgaaccttgctggttgttatcatgcatttgcttggctaactgtaaagctccccagacattagttcctgttgaggcacctgtttttctgccaatgagtttttccagccagtggatagtagcgatagacgcacaatcaggaacttgcatcatgtcattgattacatcgggtataaaagaaggttcagcgcgagggcgtccaataccttcgattctactgctggtactgctacggatttgtcggcaattctgttggtagcaatcatagaaaacggagttttcaggatcaacaacaataagcttggtagtgtgtccctgatagcgcatataacggcccagtgttgcggaggttccgccagttcctgctcccatcacaatataagttggttcaggaaagggttctaattccatctggcggaaaatgctttcggcaatgttattgttacctcgccagtcagttgcgcgttcagcataagtgaattgatccatataatggccattcaattcttttgccagacgttccgattcttcataaatcagggctgaatgttctacaaagtgacattttccaccgtaaaattctatttcctgaattttgcgtttagcggtgcaggtaggcattactgcaataaaaggcaggccaagtaaacgggcaaagtaagcttcagaaacagcggtgctgccggatgaagcttcaataatgggggttccttcatctatccagccattactgagtgcataaaggaaaagtgagcgagccagtcggtgtttaaggctaccggtaggatgagtactttcatctttaagatacagatcaatccctggaaacatgggtagattgagtttaattagatgggtatcagcactacgttgataatcagcttgaatagattttatggcattagcagcccataaagatgacataaattgaccctgggtaaaatatattttcaatgtatagaatactcttacatttggagaaataggttgttatctttttgaagctgtactttatttttaggaaaattttctacaggatataggtatgttagataaaacagaccgcaagctattaaagctgctccaacaggactgtagtctgtccttgaatacgctggcagaagccgttaatttgacttctacaccttgctggaaacgtcttaaaaggcttgaagatgaaggatatatcgttggaaaagttgcgttgcttaatggagagaagcttggattaggcctgacagtgattgtcatgataaaaactcagcaacacagtagtgagtggtacgagcagtttgttatcttttgttaaagagatgccggaggttttaacgttctatcgtatggctggagaatatgattatttaatgcatgtagaagttgttgatatgaaaagttatgatcgattctacaaacgcatggttaatgggatacctggcttgatagatgtaacctcaaactttgcaatggaaaaaataaaatatacaacggcgttacctataccagattagacaatgactaaaatctctttggtgaagtgggcgctgatcctttcattttttacctcgggaatagttttgtgagattattttctcaattacgttggtattttcttagtgaatggcgccgctatttaggagccattattttcctggtgatggttgcgatattgcaattaattcctccgcgtctggttggagttattgttgatggcatcagtaccaaaacaatgtcatccaatcagttattgatgtggataggcatcatgctcgttatagcggtagctatatatggtctgcgatacgtttggcgggtatggttatttggagcctcctatcgtttggctgttaagctgcgtagtgatttttaccagagattgagccgtcaggatcctgaattttatttacgtcacagaacgggggatttaattgcccggtcaacaaatgacgttgatagagttgtttttgccgcaggtgagggagtacttacttttgttgatgccttagtcatgggatgcgctgtacttattgtgatgagcgtagagataagctggcaattaaccctattatcattgttacctatgcctattatggcattagtaattaaacggtacggtcaacagcttcaccatcgttttaaattagcccaaggtgctttttctgcactgaataaccatgctcaggaaagtttaaccagtattcgcatgatcaaagcttttggattggaagacctacaatccagtcagtttgaagaagtcgccaccgaagctggccgcaaaaatatgcgtgttgcacgggtggatgctcgttttgatcccactatctttattgccatcggtttttctaacttactggcagtcggtggaggaagctggatggtagtaaatggttctctgacactgggggagctgacaagctttgtcatgtacttagggttgatgatttggcctatgttagcgctggcatggatgttcaacattgttgagcgtggtagtgcggcatatacgcgtattctcagtctgttacaggaacctttggtgatcgaagacggttcacactccttatctgcggagcgtggcgcattaactgcggatatcaacacctttatttatcccggttatagtgaacctgttttgcagaatatctattttcagttattgccggggcagttattaggtatttgtgggccgactgggtcaggtaaaagtacattactcgctgtattgcaacgtcagtttgatattactgatggtgaaattctattccagtcacaaaatgtttctacattgaggatggatgaatggcgctcacgactggctgttgtgaaccagacaccttttttgttttcagatacggttgcagggaatattgctttagggcgtccagatgctactcaagaacaaattgaggaagttgcccgtttagcaaatgttcatgatgatattctgcggttaccacaaggttatcaaacagaagtcggagaacggggtgtgatgctttctggcggtcaaaagcaacgtatttctatcgcaagagcacttctattagatgcagaaattttgattttggatgatgccctttctgctgtagatggtcagactgagcatcagatcatgaaaaacctcagtcaatggcggcagcagcgaactgttattatcagtgcgcatcgattatctgctttagtagaagctgataatgttctggttatgcaaaatggtatgatttctcaacaggggcagcataaacagctcattgcacaatctggttggtattcagaaatgtatcaataccaacaacttgaagctgcattggatggtgaatatgagtaacactggtatggaaaagcctaatacacgcaaactctggccgtctttaaagcgcctgctgtcttacagtaaaaatcatcgcaagcccattgttctggctgtaattatgttatgggtagctgctctggcagaagtcagtggtccaatgctcatcagttattttatcgataatatggtttcaaccggccacatcccgcttggtattgccagtggccttgcggttgtatttttgatattacaggtggtagctgctgcgttacattatttccaatctctactgtttaatcaggcatcagtaggagtcgtgcagcaaattcgaacagatgttatggattcagctctgcgtcagccgctgagtacttttgataaccaacctgtcgggcagttaatttcccgtgtgacaaatgatacggaagttatcaaagatctgtttgtgaatgtcattcctacggtttttcgtagcgttgcactgattggcgcaatgctaatggcaatgttctttttagattggcgtatggcgagtgttgcgctgactattttccctgctgtttttcttgtcatgatactttatcagcgtttcagtacgcctattattcgtcaggtaagagaatacctcgctgacatcaataatgtttttaatgaagccattaatggtatgacagttatccagcagtttcgtcagcaggcgcgctttggtgagaaattgtttgctactaaccgggctcactatcaggcgcgaatgcaagcattgcgcttggatggcgttctgttaaggcctttgttaagcctgttttctgctgcagtattgtgtggtttattactgttgtttggttttcagggaacagactttattggagtaggggtattgtatgcatttatcagttaccttggacgcttgaatgagccactgattgagctgacagctcagcagtcgttattacagcaggcggtggtttcaggtgaacgcgtttttgaattaatggatagccctcagcagcagtatggtgttgataaacagattctagagagtggcagaattgatgttgaaaatttaagctttgcttatcgtaatgacaaagttgtattagataatatcaatctgcatgtaccatcacggggttttattgctttagttgggcatactggcagtggtaaaagtacactggctaatttgctgatggggtattacccatggcaaagcggtgaaatttatcttgatgggcggtcggtatcttcgctttcccataccaccttgcgcaatggtgtggcaatggttcagcaggatcctgttattctggctacctcatttttcgataatatcacgttaggacgagatatttgtgaggaaaaagtctggcaggtactggaagtggtgcaactggcggagtttgtacgcaaattaccggaaggtatttattcaagactgggagagcagggaaatacgctttctgccgggcaaaagcaacttttagcaatggctcgggtcttggtgcaaacaccacaaattctgattctggatgaagcgacagcaaatattgattcaggaacagaacaatccgttcaacaggcattacggatgatccgcaaacagacaaccttggtagttatagcgcatcgtctttcaacgattgttgaggctgattccatatttgtgctgcatcgtggtgcaattgtagagcaggggcagcatcaacagctactggaaaggcgtggccgttattaccagatgtatcagctccagcaagtaggcgaaacattaaacgaacctctgcacatttagtgtgcatatcgggagtggctgaacaggttgctcccgttcttacatcttcttttaacacaattcatttataacccaatgactaaaaaagatttttaatttttggcattccctttgcaactatctcctgtaattcattcttgtaaatactatttggtaagtacagataaaaagcgggggagatatgaagttgatcactaccatcattaagccttttaaattagaagaggtaagggaagccctttcagatataggcatacagggcatgacaattactgaagtaaagggctttggtcgtcaaaaaggtcattcagagctttatcggggagctgagtacagtgtcaacttcctaccaaaagtaaaacttgatattgccactcatgatgaacgagtagaagaaattattcatgtgataaagcaggctgctttcacgggaaaaatgggtgatggcaagatctttgtctttgaattacagcatgccgtcaggattaggacaggtgaagttaatgatgcggcattgtgaatgggggaagagaaatgagaacacagcaattaatta

SEQ ID NO: 100 - DNA, 21094 bp, Xenorhabdus sp.
gtgccctaaagctttagtttattaagcaatcttttaattttttttgattagataccgataaggagtttccgctgtctcatgagcaagcagagtatgttccataaaacgacaaaaaccgggaatatcacgagtcgtcgccggatcatccgcaacaatcaataaagtctgtccgacatccatgtgacggaccgttttacgcaccatcattaccggctccgggcagcgtaatccctgtgtatcaagtgttttatcagggttggcaaaaacatcagacataacaatctctgtaggttcaaacaatctatagcggtggattatattacatattcacctcaatcaccgcattttgaaacccattgagtatattactcaacccgcgtatgatgcttctctcctgataattcagggaaatttgtttctgggttccctcaccccatccagcaaaaaggtacaatatgtttcaacttactcagcagcagaaagcttcggctttaatctggctttcgctgtttcatattctgatcattacttccagtaactatctggtgcaactgcctatttctatttttggttttcataccacctggggagcgttcacctttccctttatctttctggcaacagatttgaccgtacgtatttacggtgcgccattagcacgccggataattatgacagtcatgcttccggctctgattatctcttacttcatctctgcgctattttttcagggatcgtggcagggtttttcggccttaggaacgtttaatctgtttgttgcccgcattgcagcagcaagttttatggcttatgttctcggtcagatattagatgtcggcgtgttcaaccgtctgcgtcagaaccagcattggtggatggcaccggcagcggccatgtttttcggtaatatgcttgatactcttgcctttttctttatcgctttttatcgcagcagcgatgcctttatggcaacccactgggtagaaatcgcgttagtggattatgcatttaagctgtttatttgtatgctcttcttcctgccagcttatggcatcttactgaaccttatcctgaaattctttttttctcactcatcagataaggcactggcacagagccgctaaaacgacattgcgccctgagctaatcagggtgcagatcgcctttcagcttttcctcacaaatcgcgcatttcctgcttttacagataacctacgggtatgttttgtcgtatagtgttgacggacaggcaaacaaacacttttattcgaaacgactgataacctgtcacataccgatgctattaacaggttatgttgagtttccagtgaagaaggaatatttcttatgctgaaagttatccagtctccatccaaatatatccaagggccagatgcgatatcctacattggtcactatacgaaaatacttgctgaccacgtttttgttattgctgataattttgtactcaatcttatcggggatacagtcagtaaaagcctgaaagaaaatgaagtcaccagccattttgaagtcttcaacggcgagtgcagccgtaaagaaatagaacgcctgtcagccatcctactcactaatcaatgtcaggccgtaattggaattggtggaggaaaaacgcttgataccgcaaaagctgtagcacacgaatcaaaattacccattcttgtttccccgactctggcctcaacggatgcaccaaccagtgcactttccgttctgtatacagaattgggggaatttgatagctacctgttctaccctaaaaatcccgatattgtgttagtggacacgaaaattattgcaaaatcacctgtccggctgtttgttgctggtatgggagatgcactggctacctactttgaggcaagggccagcagtacagctcataatccgactatggcaggaggaacaacttctctgaccgggctggcactggctaaattgtgttacgacacattattgtcagaaggttataaagcaaaactggcggtagaagccggagtgacaacgcctgcggttgaaaatattgttgaagcaaatacctatctcagcggaattggttttgaaagcgcggggcttgccgctgcacacgccatccataatgggtttaccattctggaagagtgtcaccacctgtatcatggtgaaaaagtcgcatttggtacactgacacaactcatattagaaaatagccccagtgaagaactagaaaccgtactcgacttttgtgtacaagtcggccttccaattacgctggaacagcttggcctgcgcgatagtgaaaatttgcatcagaaaattatgcaggtcgctaaagtaagctgtgcagaaggggaaactattcacaatatgccatttaccgtcactccggagcaggtctatgctgcaattctggcagcagatcagatgggaaaagactggttatactaatttaatatcagcgttatttttgcggtttcagggcgagaaccctcgccctatttggtcacgccattaacatgatggataacataacgagtgcttcgtcctcccgcttctgttttttccagataccccaattctgtcaggtagattagatgacgggtggctgtagccctgctcactttagccactttctgatattggctactgttaattccctgagagaaatcaccgtctaacattctgttgagtaccttaacttgctcttcattgagctggcgctgatcaacacgacgccaaaaccgggttttcttcacggttccatcaatttgtttcaatttaacaatcagagtgttattcagggtttgtagaaaccatttcatccagcccgtaatatctaacccaccacgctgagtctgttccagcatttcataatattgtttcctgctttcgcagatactcacagacatagcataaagccggattgatcggctttctgcctgcgcgagtgccagatcagtcagaaaacgggttatacgaccattaccatcttccagtggatggagggtaacaaaccacagatgcacaatcgctgcccgcaaaataggatcaagattagggtcataataagagcggttaaaccatgcgataaactctgcaacctcttgcggcagccgttcggctggcggggctgaaaaatggacaacaggcttgtctattctgcccgacaccacttcgataccgccatgtcgcaattgcccaccactgatgggattaattaaccgataaccgacaggaaacatccactcatgccactgcaaaatgcgttcaagagttaacggttcttggtatttttctacgacttcaaacgcgattcgtgcaatgccatcagattgttcactgattggatacggggtttcctcactgatacccagatgattcgccagcgaagaacgtactgatgctacgtttagtttttctccttctatctcacaagaatagagaatactggctaagaggttatccagcgttgcctgctcattattttcagtagcagataagccgagtaacaatccctgattaaaattaatctcacgtagaatggagatcaactcacgttcattccattggaaatcaggccaatttttctgttcccatatccacatgaccattcacctcatgatatcaatcagttggtcattctactcactaaatgaggcaaataacaacactattcgcctcataaaatgaggcaaataatcgatctaattgcctcattagctggaaaataggttaattcagtccagtgctcgcgccagtaaactcatcggatgttcgcattttttgctggtagacatctctatctgccatttacaagtttcgcaatctgtgatcaccaaatcaacgccacttgcttcgatttgccggaacaggccagcaccaatcccctgagatacttcataattttcttttttaaaaccataagttccggcaataccacaacactgagagtccagaataattaattcaatacccggaatacgcttaattaactcaatcgaataagctgcccagcccattttttccatatgacatggcgtatggtaagccactttcaggggcatcggtttcaaaggcagatcacgcccctgatccagcaaccgataaatatagcgggttgccagctcaatatgatcacgtatcgggcgggtatctacgcccaaaatatgcggatattcatcgcgtaaggtaaaagtacagctggatgacgttgttacaacgggaatttgtcgctcaatcacactttctgttagtgagtgcaggttagctttcgcctgacgtttcgcgcgattaataaatccattggcgatcaatggcacgccacaacatttttccctcgtcagtaattgaacaccaatccccattccattaaagactttcaataaatccttacccagttgtggatggttataattgacgaaacaaccatgaaaataagcaacctgttctgtaaactgctgttggatggatgcctgtttgtgataccagcgccgaaacgtaccgaaagcgtattttggtaattcacgccggtgatcaatcctgagcgttttatccagcagatggcgcactggtttcaggctggtcactgaattgactatgggagcaaatggagtggaaagagtgcccatcatatcggtatggctgagaatgacatcccgcaatttagggcgctgtgaatgataatctgcttttgcccgcaggataatatcaccgatttttacatcagacggacatgcaacttcacagcgcttgcagttagtacagtatttcagtgcttcatcatataaagcaggatcttttaaacgcaggcgctctccatccgggccggcctgttttggcccgggataacccggattaactttaaccaccgggcattgagtagtacagacagtgcatttaatacagctttcaaaactgttatccgctatgttcattgtgcaatctccggtatccgctgttttgtgactcgttgcccggtgatgatttgttcagcaacaaataaggcactcaataaagaaactccggaaccacagccttcaaacaatggatcatatccccccagcacagcaccggcggcatacagattcttcacaacctgacctgattttaatggccgtaaatattcatccgtggtgacaccaaatttaagataaggctgaggagcaaaaacgttttgccgcgtccattgttcacgtgaggagtacgccagcagatctaaatcaagtaagggttcataaatccggttcaatttggctttcagcccattactgaaaaaactaccggttgctagaatcacgtgagaagcccgcagtgggatatcaccatgattacgggtatacaaaccagtaatatggttatctgccatttccacaccgttgaccgtatcacctgtcattatcactccgccaaaatggcggaaccgagcacgcaacaactgatccacccggatccccaacagagaaggcggtaacgtcggtaacaaatagacaggctttttcacctgtatctgcaatgcctgtacaacttgatcagtttccagaccaatacaggcaggcaggaacacagcctcatatccctgcgccagacggctgatttcctccgctatcagtgtcaggttttgaggcagatccagtaaatgggccgatattaacggagcgaaattcactggggttatcacgcagtctgtcgagaaaaggtaagtgaatctcctgcgcactggctttcaccccctgcctctgtaatgcactggcgacaatgccgggctgaaaatccagaaatcccgcaatgccgatcacaacaacactttcccatttaaatggccgttccagctcacaaaccggtactcgcgccgggcttaaccaagtcatgcgctgacggccaacgggcgtaacacgataatggttttgtgaagcagaaccggtcataaccagcccgctgtccctgattaatttttcagcctgataagccagtgatactacgtttttttcgcctatccgactgtaagggtgatgcggagcctgtctggtcagttcagacaaggcatgtaagggatgggtgacttcacctccgtcaggtagacgggaaagaaaatccatcgaaccagaagagaaataaagagaactttggcctgaactgactatcgcacaggatttacctgcttctgccagccgaataccactagtcagtcccgccagcccgcttccaataatgacagcatcaaatttcattgtcagtctccgttactggctggttatcggcgtcagtatcatgatcatctaaaccgcacagtccctgataaacccagctggtgaactcgctttcccgtaacgcatcaccccagacgacaggacggatccctttccagcgttcattcaggaactgtttcagttgctgctctgattcctgttctgtgattacaccgagacgattaagtagccctgccgcacgacaggcacacaattctccctgacaggttcccatgccaacacgagtgcggcgacgcaagtccagtaggttagtcaccgccaaagattccgttgcataacgtacttctcccgcagttaccgcttcacattcacataccaaacttttatctgatcgttcggtactcagtaactggctggcgcgatctccatgacgataaatggccgacccacgaatgggagcggagagagttacggtgctacaatgcggttttttactatgtgggcttttactgtgtgacgtgtgctggcgtgtttgttcggcggaattctctgagccgggcaatggctcctgtgcagtcgtacaatgcgcggtaatattaagtttctcgcaaatcttatcggttgcccattcagccatcaggcgatatgtcatcagtttaccgccagtaatggttatgaatccgtccagaccatcacgttgggcatgatcaagcagcacaataccacggctgacgtttctgcccgatggatcatcatcactcgcgactaaagggcggactcccgcataagcccgtaagatacgggtttgcgcaagccggggggataattttgctccctcccggattaagatatcgacctcttccttagtcacagacatgttatcaatctgatcgtattcaatgcgggaagaagtcgtgccgatcagcgagatagtgtcaccgggtacgagaatatcggcatctgcgggtttacgacagcggttgatcaccatattgttaatgcgatgccctaagatcagcaacgatcctttggccggcaacatatggactcggagatccgcatactccgcaattttctgcccccaaattccaccagcattcaccacgatcggcgcataaatgtcatacaggcgcttagtgcgatgatcataaacatgaacgccggtaattttatcctcttgcctgattaaccccatgacttcatgatacgttagtatttgtgctccatgctctctggcatccagcatattggctgccgtcagccggaaaggatcaaccgtcccatcaggcacaatcacagcgccgatcaaatccggattaaccgccggctcaaaacgtttcgcttcttcagggtcaatcgactgcgcatcaattcctgccttttcacacgcagcaataaaagtttgctgatattccagtgaatcttccggcaaggtaataaacaaaccgtgtgttttttcaatgcaatgtcgggcaatggatttgaggaccctgttttcttttatacactcttttgccgattcgctgtctgtgacggcatagcgtgcaccgctatgcaataaaccatgattgcgtccggttgcacctgtcgcaatatcatgccgctctagtaagatgcagcgtaagcgcctgcgggcacaatctcttgcgataccagcacctgttgcgcccccaccaataataatgacatcagtttctgttacaggagagccattcatcagagatgctcctttctttcgcttctatacacttcgtctttcaaattgcctttttgttggcttcgctcgttcaccccagtcacatatccggtcagtacatccggttaatgataaaaatatatccaaaatgagtataagttgtttgataaggaacaaaaacgaacctgaaacgcgtatttgaggcgataaaaaaaccaagatcgtgagaaatatcactattttttgagggggcgtttatttgcggtttttacgacataaaacgagcagaaaaaataagtggacacaacctctaataagttatgtccactacggataatattgtctgctcgtatatctatttagtgcatatcagtctgctttttagtgggttccggccatatacccgcaatatactcaagacactcggctttggggccttcttttcctgtcgccatccagccaatcgggatccgatattcgtcaggccagactgaatactgctttttactgttaatgacaactatccacagcgctgcttcatttccggttaactgttccatgaaaataccccctgtctgtaacttgtcggcaatacctgaggcaggaacccggtactgatcagataattcagtacctgacaaacatattcagaggtaataaccggacactgaatatcggatccttccagtgctgccaacgtctgtttcagctccagttctggctggatttcatggacatagtcaggatccagcgcgcggtaaggtttctctgtcatatcccgaatcagcggaatcaatggatacagcgaatgagaatcatccagagcaagaattctctctttcccttcattgaaaggaactggattaaggatataaccaaactcctgaacccaatcgaaaaactgacggatagaaacttgcaccggattaaacagattaaagaatttcccgtcagattcacgctgcttagaaatatgcaccagtgaagccgccacataatcaaccggtacgatatccagcagtaatccatgagcaggataggatcccatttccagataacctttcagggaagctacaagataatcattcccctgagcagctccggtacgggtatgtccgaggatcagaccggggcggtaaatactcactggcataccccgtttacgggcaatattgataatcccttctgatacccacttgctgcccgaataaccggaaggatcacgtattgtttcgctcatagcgcgatcatcttccataaatggtcgtggcgattcagtagcaaacaaagcattcacagaagaaacataatggaaatgtttcaggcgtgaagtagaggcaaactccagtgcggttctggtgccatcaacattaatgctttttagtgaactataaggatagataaagttaaccagcgcaccgttgtgataaatcacatccacatcctgcgcaagtttatcccagatttcaggcaataagccgaaacggggttgccccagatcacctatcacaaaatccacgcgatcaaggctattacctacatcaatctgataatgagtaaagccatcccggatcctctcaagcgcatgtgccttgtcgtcagcacggcacagacagataacctgagctgaagtctgtttcaacagttgttccagcagatgcaggccaagatatccggtcgctcctgtcagcagaacagtatcaggctcataccagttcgcatgcggtaatccatcaggacgtatactttctttcaggtaaacatcttttctcagcgtttctgcatgttgctgaataagcgcttcactacggtaaacactgttgaaaggaatcagattatttttgtgaacttcactcatctcatccagaatagccgcaattcgggcaattgtgggttcaacatagataccggaaatagggatcctgagtgagaatactttttcaatccgttccaccatacgggcaaccagaatagagttaccaccaatctggaaaaaatcatcggtaatgccaaaagtttccgcagccaacaaatcaccccagatagcataaacccgtttttctgtttctgtttccggctgtaccgcatcatgactggtactcagacgttctgccacttcttccagacgtttcctgtcccgcttgccactacttgtcagcggaatataaggaatacggtaatattcagaagggatccaggcttcgtgcaggctttctcgcaatgcgacctgagtttcacgtacccactcctccgatacaaccatattaggatcaaacaatacgaacgcctgtatcttggcaaaatcaccacttcccgcgacacggataatggcatcctgaaccccgtgttgttttctcaacgcgatttctatttcacccagttcaattcgataaccacgtactttgacttggtcatcctgccttcccatataaatgagggagccatcttcagtcatacgggccatatcgcctgtcagataggctcttttcccctttccgttgacatcagggacataccgtttagcggtttcaaccggattattacgatatcctgctgtcacacctaatccaccgatcaggatctcacctaccgttcctttagcgacaggacgcagattcttatccacaatactgatgctggtgccgggaatcggcccgcccagctgtactttatctccttttttcatgcggaatgccgttgaccagattgtcgtttctgtcgggccataaaggttccataaagtgccaccagatgccgttaattgatcggccagatcttgtgacagagcctcaccgccgcaaagcatgctgatatcagaacgcggcgtccagccggcattcagtgccattgaccaggttactggagttgcctgcgccagagtaaattgaggctcagagaacacacgggatagtgccatcgcatcacgctgagtctcagtgggtgcgatgtagatactgcctccatgaacaaccgtcagcagtagctcaagcactgaaatatcaaaagagaaagtagtcagcgcaagcatacggtcattctggttaactgataataatttgcccagtgcacacaggaaagccgccagattgtcatgctgcacctgcacagcttttggtagtccggtagaaccagaggtaaacatgatataggccggatgatcgcctaattcaggaataacaacatcctccgtaatttcctcaactgtataggcaaggcgctccatcggaatatgtgttgatgctttcagctccgctgataccgtttcatcagagaccagaatactgtcaggtaagctggcgagaatatcattcagacgtttttccggcatcatggtattaaggggaatgtatactgcaccgatctgccaggttgccagcattgtaataaaccatggaatacccctctcggctgcaatagcgacataacttcccattgttacgccatggcaacgtaaaacatgcgctgcgctgataacccgttgctgtaactcaccaaattccagaatcccatgcggatctgaaacagcaatatcatgcggtgctatttttgccagttttgctaaccgggatggtacattgtcaaaccatggctgaagtgttttttccatatagctgatatcaatgtcattaatatcagaagggttagagaatgaggattgttgcccaataaatgctgtgtgtaatattgccttgtgtgtgtaagtattcataatgatgttctcattctgatctccattttgttccatcattttttatgatgaatggagatatttatgctgttagtcaataaatatcagctattgtccacatttggctcctacaatgaccttatgttgaccttcactgaataaaaaaataaacttcaagaaaattatttaaaattaaagaattattatttaatatttatttgtaacttttaattaattacacaatcaacccacaattatatttttttactagtgaatagagtgtattacgccttatacaccacttcatcaccttgatataacttgtttttattttataaaacagctatccacaactcataaaaaccggcttcgtgagcatgaataaccatttgtagtaatatctattatttccgaatcaaaattcaatcattttatttataactgtgttataaaaaacgcaaaatatgtaaataaatataatcaaaattattaaataaaaataacagcaaaaaatagtaaatctcagttaagaaaacagacaataaatatcacgttttcattcatcactatatgtttagataatcttatatttgtttaaataagattcgtatgattaaaacggcgaatatattcccacaataataatagtcctttatgacaaaaagaaaataaacgaatggaatacgctcaaaaataaccgctaaacattcttaattgtgacggaaatcacgataattaaaataaaacttatttcaaaagagccataaatcgctcaaaattgtggtctttacgaaattatatccatatgttagcgatacttcacagatatattagtctgttttagctattctttctttcgatatagaaaaaaataaattgaaactttcgtttactgctggtcactactaaacagtggtgattcgctcatactaaaagtcatgtggagacaaacatgttaagtatattcagaccggcgcctcacaaagcccggctgcctgcgcaagaagtagatccactctatcgtcgcttgcgctggcaaatttttatggggattttctttggctatgctgcttattatctggtaaggaaaaacttcgcgctagcaatgccatatctggtagaacaaggcttttccagaggagatctgggttttgctctgtcagggatctcaatcgcatacggcttctcaaaattcatcatgggttccgtttccgaccgttctaatccccgggttttcttgccagctggcctgatacttgcggcagccgtaatgctgttcatgggctttgttccgtgggcgacttcaagcattgcggtcatgtttgtcctactgttcctgtgtggctggttccagggtatgggatggcctccttgcggccgtaccatggttcactggtggtcacaaaaagagcgtggcgggatagtttctatctggaactgcgcacataacgttggcggtggattgcctccattgctgttcctcctcggtatggcatggttcaatgactggaaagccgcactttatatgccagcattcgctgccattctggttgccctgatcatcttcgccctgatgcgtgacaccccacaatcctgtggcttaccaccaatcgaagaatataaaaacgactatccacctgactacacagaaaacgatgaaaaagaactgactgcaaaagagattttcatgcagtacgttctacctaacaaactgctgtggatgatcgccattgccaacgtattcgtttacttactccgttacggtatccttgactggtcaccaacttatctgagagaagttaaacactttgcactggataaatcttcctgggcttacttcctgtatgaatatgcgggtatccccggtacgctgctgtgtggctggatgtcggataaagtctttaaaggcaaccgtggtgctaccggcgtgttctttatgacgctcgttactatcgctacgattgtcttctggatgaacccggccggtaatccgaatgttgatatgatctgtatgttggtgatcggcttcctgatttatggccctgtgatgttgatcggcctgcatgctcttgagctggcaccgaagaaagcagcgggtactgcggctggctttactggtctgtttggctacctcggtggctcggtagctgccagtgcgattgttggctataccgttgatttcaccggttgggatggcggctttatggtcatggttggcggcagcattctgtctgttattctactgttgtttgttatgctgcatgaaaacaaacataagcaggaaatggcacaagcacataacagctaatcaataggctgttttaaatagagccatttccaatgtcgccactgtttcatttcgttcaacagtggcgacaataatacagtaacactacgttcccccttatattcagtattctaaattcatataaaacaccatttaattaccaaaatacaccttcattaccacaagtggagaaccccaatgcacacccccgttaaaacaattatggccggtcttctgttagcttcatcgatgtcaggtattgcgcatgcagcggataaaattgttatcgcgcatcgaggagcaagcggctacctgcctgaacatacccttcctgccaaagcgatggcttttgctcagggcgcagattatcttgaacaagatctggtgatgactaaggataatgaactggtcgttctgcatgaccattatcttgatcgcgtcactgatgtcgctgagcgttttccaaaccgagcacgcgctgatggtcgttactatgccattgactttaccctgccagaaattaagtcactgaaatttactgaagggtttgatatcaaggatggcaaaaaagtacaaagctatcccggccgttttccaatgggaaaatcagattttcgcatccacacttttcaggaagagctggaatttattcagggtatgaacaaatccaccggaaagaatgttggtatctatcctgagattaaagcaccgtggttccatcgtcaggaaggcaaagacatcaccgcaaaagtgttggaagtactgaaacagtatggttacaccaaaaagagcgataaagtttatctgcaatgttttgatgccaatgagttgaaacgtattaaaaatgatctggaacccaaattggggatggatctgaaactggtgcaactgattgcttacaccgactggaatgaaacctacgaacagaaaaccgatggaacatggcataactacagttatgactggatgtttaaaccgggtgccatgaaagaagtggcaaaatatgctgatggtattggcccggattaccacatgctggtcgccaatgactctaccccaaacaacattaaattaaccggtatggtgaaagaagctcacgccagccatatggtagtgcatccgtatactatccgtattgaccagttgccaaagtatgccaccagcggaaatcaattgtttgatatcgtcttcgataaagccaatgtcgatggtgcattcaccgatttccctgatttagcggtgaaattcctcgaagaacatcacgaacataagtaatcgaccttttattcatttaataccccgccgcaagtggcggggtattaaatcaggaaatgcctaccggaaaggctataacctcactgattcgctccgcgcccagagccagcataatcaggcgatcaacccccaatgccacaccagcacattccggcataccatgagccagagcttcaagcagatactcatctatcggctgtacaggtagccccattgattcgcgtttacgattatcctgctcgaagcgcagacgctgttctttgctgtctgtcagctcacggaaaccattcgccagttccatgcccttgaaatacacttcaaaccgctgagcaacacgatgatcttctttactgatctctgccagtgcggcctgagaggcagggaaatgataaataaatgtcggcttttcaataccaatatgtgtttcaacacccatggtaaaaagcagttgcagtaaagtatccctgtcttcttcacgatcagcaatattgctgagatcgagttttgctgctacttcacgcagtttttctttgctcactgtcagagggtcgatatccagataacgaataaaagcctgctgataagaaagggattcggcactttcgcaatccagaatttgctgtaatagatcatccacttcattcatcaagcggtacatatcataatgtggacgataccattccaacatggtgaactcaggattatgatggcgccctgcttcttcattgcgaaaactttttcccatctgataaatggagccactgcccgcagcaagtagacgtttcatgtggtattcggggctggtcatcaagtacaggggaagaccatctgctgcaccggggccgacaaacctcgtctgaaagggaaccagatggacgtctgtgacagtcgcctgactcatggcgggtgtctcaacctccaacaccccacgatctgcgaaaaagcgccgtatttctgccagaattcttgcccttttcaataaattagcgataggggctgttggctgccaatccgcgatttcgttcatattcctgtggctccaaaagaaaacaaaacgcgcagtttacccgcatcacgctcgccagacaaattattacattaaatcccttgtcgatggtctgctatttatcatttatttctgaacgagttataaaaataacccatctatataaaattttaccgaagatagattaactcttttcataaacattgttataaataaatcttaaacctagagataaatttaaaaaatattaaaaatataaaaaagtggcctgctttggcggccactatatttacctgctgattagttttagtcagaaatgtaaattattcaattaatgtcacgacgcgaaatttacaatacacatctaaattaactttatcaggtttaatgtaatcaacaccgccaactgttactcggctgagatatttacctgtatcagctttcagtgcaatcatattacaaccaacatcttcaatcataaaaattgaataaatgtctaccgttggtttaatagattcaataaaatcaccatttgaacgggttactctactaagataaagtttattatctccgataagagcaattttattaaggttatttggatcaagataaacaacggtaaaccgacaatattcatctatagatgattttacagcttcaatatattgaattccattgctatcaactctacttaaataaagattgttatccgcttgtaatgcgatggttatttttctaagcgccatgataggctcctaattataaaattggtttgtcacaaaaatatatctctatatattacaacttaaaatcaggaacgaaatacaatacatccgccagaaaacatacatcatttaactaaaatataaaataacaaaatatataaaccaccaatcaataacataaaaaataattaattatagtttttttttacaaacccataccttcattataaataaacaaagtgtataaattaccaaaagaatagaaatgaccttcaagtaaacattaaaaaaataaagaacttacattaaataaaaattcaaacttccttatttattgataagagacaccgatatcgcgttaatttaatgaatttaagcctcaagataagacaaataatatcgattaacttaacaacacattaataaaaaatgtccggatgaatggaaaacttgttttagatcaatttttattgataacaattctgccaaatcagcgttcatatcaagtttacttcagccaccatccgttataatcatatcagataaaaaataacagacagtgctcctaactcgttaaggtacaaaaaatttacttacaacactcagtcggacaagaaaaaatacctctgcaaagtagcaaggtcacaaatgacgagtgataacgcattaggctttctggctgaagtttattcatttcacttgaaacaatggagaagcacagtgcaaaccttcaatgctgatctagcaattatcggagccggtggcgcaggtctacgggccgccattgctgcggctgaagccaatccccaactcaagattgccctgatttcgaaagtgtaccctatgcgcagccacaccgtcgccgcagaaggtggatcagccgcagtcactcagtctcatgattcctatgactttcatttcaatgacacagtatccggcggagactggttgtgtgagcaggatgtggttgaatattttgtcaaacactgtccgactgacatgacccagcttgagcaatggggttgcccgtggagccgcaaagaagatggctccgtgaatgtgcgtcgtttcggtggcatgaaaattgagcgcacgtggtttgccgcggataagaccggcttccatatgctgcatacattgttccagacctcactcaagtatccgcaaattcagcgtttcgatgagcattttgtcctcgatattctggttgatgaaggccgtgcccgtggcctggttgccctgaatatgatggaaggcagtaaagttcagattcgcgcaaatgcagtcattatggctaccggcggtgcaggccgtgtttatcgttacaacacgaatggcggcattgtcaccggtgatggcatgggtatggctttccggcatggtgttccactgcgcgatatggagtttgtgcaatatcacccaaccggcctgccgggttccggcattctgatgactgaaggttgtcggggtgaaggcgggattctggtgaataaagatggctatcgctatctacaggattatggcttagggcctgaaacaccactcggccatcctgaaaataaatatatggagctgggaccacgcgataaagtttcgcaggcattctggcatgaatggcgggcaggacgaactattgcaacgccgcgcggtgacgttgtacatctggatctgcgtcatctgggtgagaagaaattactggagcgtctaccattcatctgtgaactggcgaaagcctacgttggcgttgatccggtcaaggagcctatccctgttcgtccgacagcgcattacactatgggcggaatcgaaaccaatcaacaatgtgagacccgtatcaaagggctgtttgctattggtgaatgttcttctgtcggcctgcatggcgcaaaccgtcttggctctaactcactggcagaacttgtcgtctttggtcgtctggcgggtgaggaagcggccaagtgtgctcaggaagctcctcccgccaatgaaaatgcactggctgcacaggttcacggtattgaggctaaactcaataaactgctgaatcagcagggcggagaaagctgggccaaaatccgcgatgagctgggaacggcaatggaagaaggttgtggtatttatcgcacccctgaattgatgcaaaaaacgattgataagatcgtagagctgaaagagcgcttcaaacagatccaaatcagtgatcgctccagtgtattcaatactgaccttctctataccatagagctgggattcgggctggatgtggcagaatgtatggctcactccgcgatgaaccgcaaagaatcccgcggtgcccaccagcgtcttgatgaaggctgtaccgaacgtgatgatgagaacttcctgaaacatacactggctttctacaacccggaaggtgcgccacatctggaatacagtgatgtgaagatcactaaatcccagccagcaaaacgggtttatggtggtgaagccgcggcacaagagaaaaaacagaaggagcaggcgaatgactgagatgaaaaacctgaaaatggaagtcatgcgctataacccggaaaccgatgatgcgccttatttcacaacatacgatgtcccttatgatgaccagacttcgctgttggatgcgttaggctatattaaggataatctggctcctgacctgtcttatcgctggtcctgccgcatggcaatctgcggctcctgcggcatgatggtcaaccgcgtacccaaactggcctgtaagacttttctgcgcgactatcagcacggactgaaagtggaagccttagggaatttcccgatagagcgggatttggttgtggatatgactcactttatcgaaagtctggaagccatcaagccctacattatcggtaatgaccgtaaaccctccgatggcccgaatgtgcaaactccggcacaaatggcgaagtatcatcaattctccggttgtatcaactgtggcctatgctacgcagcctgccctcagttcggcctgaatcctgagtttatcggccctgctgccgtcacgctggcacatcgctataaccttgataaccgtgatcatggtaagaaagagcgtatgccacaaatcaacagcgataatggtgtctggtcctgtacttttgtcggttattgttctgaagtttgcccgaaacatgtcgatccggcaggcgcaattcagcaaagcaaggcagaaagtgcaaaagatttcattatctccatgctgaaaccacaataagggaggtgaaagtcatgacaacaaaacgtaagccttatacccgtggcatggagcccaactggtggcaaaaattaggtttttatcgtttctatatgctgcgtgaaggaacttctgttcctactgtctggttcagtattttggtgctttatggtctgtttgccctgaaagccggccctgaaagctggggtggttttgtctcttttctgcaaaacccactggtattgctgatcaatatcatcaccttgctggcagcattattacataccaaaacctggtttgaactggcacccaaggcactcaatatcattgtcaaaaatgaaaaaatggcaccggggcccattatcaaattattgtggactttcactattattgcgactgccgtgatccttggcatagcgctactctgaccccaaggaggatctgatgaatcaagtaccaaaacgttccgatgaaccgattttctgggggttgtttggcgctggcggtatgtggagtgctattgtcgggccagtcattatcctgctattaggcattttactgccattaggattggcaccggaggcgctctcttacgaacgtattctggctttctgccagagctttattgggcgtgtttttttattgctgatgataagtctgccactctggtgcggcttacaccgcattcatcatgctatgcatgatctgaaaattcatgttcctgccggtaaatgggtgttttatggcgctgccgcaattctgactgttatggctctgattggtgtttttacgctgtaattaacccgagcttcgcttaagagaagtgaactaaagtgcctgaggcacgattaaagttcttgctaaagaaaacaaaatcgtggagatcctcaggcatgtataatttagaataactttattgctccgtcgatgacttttgccaaaaatttatccctctctggcatcaactttagagcacatggatggagca

SEQ ID NO: 101 - DNA, 20421 bp, Xenorhabdus sp.
acaggaaatttcccgggggtttaatacggatatgtttgccgatgtattagccaaaaaaggcatcctgaaaaagccagccagtggaaggagctttcagggaaaaacgccccgccttaagcatttagggggcattcagcagcgggcgtatgtcatggtactgatccctgaatcggatgaagaagcctgatttatcacacaagaactcaaacctgttgtctcagttgtctctgttgtctcatttttattaactctatgaattttcattatttatatttttaatttgagacaacacgagacaacacacagtgcatttgagacaacaccgtattgccgggaaagggaggcagtagagacatgttgaaagtatttaatcagttacactgtcagaaagaaaatagcgtcaagggtcggctgctgagggagagtgtaaatgcgtaacatgcagatgatattaagccagtggggagcatgggccagcgaaggtcacagtgcggttgattgggcacccattgcggccggatttaagggattgacacccagcacccgaaaaagccgtatccagtgttgtgatgatgacggatttgctatcgatgcagctgttctgcgattgaagaagcataatccgtattcctaccagctcatcgtattgcactatatcaaggcgctgccactcagaccgatgggaattaagttgggtatttctcataacgaagtcgccaaacgattacaggccgccgaaggatttattgaaggtgtactggctgtttcggatgtggttttggaactggataaatgtgcacaaaaagaaatcattgataaggttgcgtaattacaaaagtcagtatattgtgataagagtgatagcaatgtcacacagcttattaatttcagacctcgcactcgcggggctttttcgtatctaccaatagtcaatttagagttacagcccaactaccgaggattttcaggtagttcgaaatcccgtaagttcgtgatgttcagaggaatatctttgttctcccttttagggacttgaagacctgtttaaggtgcgtccactcaggctgccgtctggatgacggtattgttgaaagactataatcaccgttaccggaattccggcatcggaacaaattcaaatagttagtaattccgaacggttcattattcaaggctgcgcatggcgtggcttttttgtaattaatttattaatgatgtgacccttgactgagaaacatccacttattgatcgtattttctcctagcgtacgcaacaataggagaaaacgcatgaagtattacgttcatactaaaactgacaatcagggtgatcatgaggtgcaccgtgaaggatgtaatcgtatgccactagatgaaaaccgagtactcctcggtgactttactagctgtcgctctgctgtaacagaggcaaagcgacggggttacaatgcagatggttgttactggtgttcatcggaatgccacacatcctgatatcaataatatgaacataattaaaggtcactcagtggccttttttgtttacctacgcaatgaggaaattacccatgtacgcactaaagctaatcacagaaaaaaatggtcgttcagtagaagagtcatggatcttgggggacatgtaccgtctggagttttacccgaaagatgtcgctgagggcgttattgcctgtgtcgaacatacccagaacggcaatctgattaatcacgagatcaagaagacagaccaggcctacatcaccacgctgacaggtgacacggttcgcacagtatgtcgaggtcagcatagatttgtagctgcccccatacaataaccaatacagagcgtctatatctgggcgctcgaaattgattattgccaaatttgccaccgcaatcactcccataacctcagtatcacctattgcggctggcaacctatttactacaactcacaggggcgaccacagactcaccccacggacgcccattgttatgatggggtggaaatatgcgtatgactgaaaaagacacggagttctgggcgcatgtctgggactggttaattatcaatgcaccttttctgggtggtatgtttttagcggcatcaactgcatttgcccgggagaaaagggatggctcaggctggaaagcctcattagtcgaagcttttatctgtgcggcaatcagtgtggggattattaacgcgctggagtatgcacagttaccgctgagtctggctcagttcttcggggttctgattggctttttggggaccaagaagatcgggtcaattcttgatgcggtctttaccttctttaaaaacaagttcggggtgcacagatgaaaatcagcaataaaggattgagcttcatcaagcaatatgaaggtctgaaactgaaagcctatcccgatccggcaacgggcggcatgccgtggacaatcggctacggtcacacaaaagatgttaagccggggcaagttatcaccgaacagcaggccgacgcattcctgcatgatgaccttcagcctatttacctcacccttgaatccgccgtaaaggtatcactgagtcaggggcagtttgatgcgctgtgctcgttcatcttcaattgtggggcaggtaacttcgctcgttctactttgctgaagaaactcaatgccggtgacgatcaaggtgcagccgatgagttcctgagatggaataaagcagcaggtaaggtcatgaacggtctgaccaagcgtagggcatctgaacgccagatgtttttatcatgagactcaattttacctatggcgtattcacacaggcatttgagatgctatgaggtattgagcgatgatcatcattctggtgtcaatgatttacgttatcggttttattgcgacattcgttagcgttacattgagtgcgaagaaagaaagtagacgcgctcataaagaggtatttcctgtagttttattgatgtcgtggctttggccggtactggttattttgatgccgattgtttttggattctgttttttaaacgagaaatataaccaattcgtcggaaggcagtgactgagatgaaactcaacagccagtacttcaccctcagtgctctggtgattgtctctggcttgttctggttctactacagcgagtatcaggacaaggccgaagcatacaccagcttaaaattgcagtatgacgggcaggccatcgcgataaagcagcagcaagagcgcatcctgcacctcgctgaactggacaaagcccacattcaggaactcgccaatgccaagactgaaatcgatactcttcgggctgatgttgccgctggtcgtcgcaagctgcgcatcaaagccacctgttctgtgcgtgaggccacttcctccggcagcgtggtcaatgcaaccaccgtcgaactccctagagaaactggacaagctgttctcgatatccgagaaggcatcatcaacgaccgggcaaaactgagatatttgcaggattacattaagactgaatgtcaacgaacctctgagtaatcaggggttttttattatgagaaacaggagaagaaatcatgtttaccgttaaacagattatagaaaacgctacatcactgtatgaaaccaaagagattaccattgctcgcattggttcacctcaatggaagcaggcgtttgagttaacaaaagaactcggtattgaaacgcccgatgttattgagtttatcccaccgtcctattcagatgaggaaatgacacaggttgtggaagaagagcattcactcagtgtggcccgtgaaggggtaaatactgatgattgcattgctattgtctgctcaaatatccccagccccacattcccggaaattccagaactgggcggaggtgggtatcagttcctctacaaaggtgatcagctttatgtcaccaatgaaagtgggtctacagtagaagtggttaagtagggctatttatcaccccagaacaaataagtctggggtttcaggagtatgttaggacgcagtgtgggtgagaggacggtgtaagcactaccgtcctatcggaaattattataaagataggcaagtattgtaatcatggtaaagtgctatgcatgaagtcatacagctaacccaatccttaccattcatatactcgcaaatcgaagcgtaggtctgcattgaagctaaaagagtcgtaccagctactagacaaagaagaagatattttctcatagttattttccacctcattactatcacaaaaactggtaaatctaataaacccatcacaccgtaacaacaagcgaataatgcttaacaattgattaacacttgaaactaaacccaatatttctttacccattccctgagtggttaaaggaatacagataactcatgctgccacttcgttctcaccgcgtaccttacgcatacggactggcggcatttttatttgcgccgggttatcgccgtctgtcggtattagctatgacatgtctccttttcatcgagcgtactgaccgaatcaaaaataacccatacccctgagaataacaggccattatcagcaacatccgctgtaggcagacgaagtgatgtgacagccggagagacggcctgtattgccatcctgattcacgagtcacgattgctatacagaaaagcaaagtccgattatcggatattggattaacactatgagaggccactatgacagaaccgaactatgaagcgattggacgctgccaagtattaaaagagaagatagatgcactcaatgcatacaggaatcagcgcctgaataaattagcaaaggaagctttccggctgacagaggtgtattacccacagaagggatttccggtacttgatacagaaaaaatgaatgtactactggcagacattactgctgcggatattgacctcagacgggcgatcagtgagtttaacgactggagtcagactgcaggtgaagaacctatcaagatgaacatcccatcacaggattaacttcgggaggatacatcatgccaccccgcatcccccgagcctgtcgcaagcaaggttgccccaagaccaccacagatcgcagcggctactgtcctgaccatctccataccggctggcaggctcaccaacaaggcaagaaccgacatgcccgcggttatggcagtcaatgggacaaactcagagccactatcaagcaacgggataagcacctgtgtcagcaatgcctacgacaggggcgagccacgacgggtatcgggcggacatccagcctgcgatggaaattgtcttcaggcaaaaaacgtacaccattcaggccgtgatgccggataaccggttgaccctgcttgaattactctgtcaggagggtgtgaaacaatgaccacccttgatttttctgcgctcaacgacctttcacgggatttagcgctgctcagtaaggccgaaagtgacaaggtgttacgccgaagcacacaggcgagcgcgaaaatcctgcgcgacgagacccgccgacgcgccccggtcagaaccggtaaactcagacgcaatatccgaactgcgaaccggagaaaggggcgggacggcacgatttcagccggggtctatgtgcagggttcgaatcaatccggcaccaacagcgatacccgcatgaaaaaaactgacccccggaatgcctattactggcgatttctggaaaaaggcacctctaaaatggcccccagaccgtttattgacccggcgtttgaggctaaagcggaggaagcggctgatgcggccttcgcggttgccctgaaagccattgacgaggtgttaatgaaatgaacgacggtgacctgtttaaattattgtctccggttttgcccgggcgggtctttccttacttgatcccttcaacgcaaagagaaacgggttccccgtggtgcgtattttctacttaccatatgtataccgatgttctgagtggtcaatccctgaaaatgacccgccttcaggtggatgcttacgccaccacgtttgagcaggccgaccagatttgtcagggcgcactcaacgccgtgaaacacctgcaaccggttgacgtggagcgtgagaacggctttgaagaagacactgaactctatcgcgccaccctgacctgcaaaatctacacataacttttattcctcaatcctgccggagatcacccatggcaaaatacgaaaaaacgttaggcacctcgctgtctgtctcggcagaggccgcgaacgatgacagcaatcccgcgattaagtggatcgctattgacacctcggtaaaagaaatcagctacaccggcggtcagaaatccgatatcgaagtcaccaccctcggctcccgtgagcaggaaatgattaacgggctggctgccccggctgaaattacgattgccgggcactggaccgccgacgaggaaggacaggatattctgcgactggcctatgataccgatcaggcttatgccttccgggttaaattccccagcggcaatggttatacgtttctggcggaagtgcgtcaggaatcttggagtgcggcggccaacggcattgtcagtgcctcattcacgctacgtatgcaaggtcgtcccactcccttagtcaagaaaaccccctcacttcagaaggataaataatcatggatcttcgccagcttgcgttaaccccccgtctgggctttcgcaccaaaaccgtgaccgtgcaggagtggcatcacgccacggttatcctgcgtgaaccctctgccgccgcatgggtcgcatggaatgaaatcatgcagccggaaaccgacgaggaggaggtgcccctgtcagtcgcagagaaggtattgcgtaatacccgtgctgatgtcgcgctctttattgatgtgctgtgtgatgaacagggtatgccggtcttcaccccggccgataccgaggcggtgatgaaaatctatgccccggcgcatgcccgtctgttgcatcaggcactcagtctggtgactgacactgatgatgcggaaaaaaagtccgatccccgttaacccgctttatgctgacgctcgccctgcgactgggcaaaaccctgtctgcgttgcagcgtgagctgagtgccagcgagctgatgctgtggctggcgtatgatcgtctcagccccctcagtgaccagcgcggggatattcaggccgcccagattgcggccgctgtgtatcagtcgcagggcgtcaaagtcagtctgaacgaggcgttgctgcaatggggaaatcaagacgacgagcagcaggatgacttcgagcacttctttgctcatctcgcataggaaatactgtggcaaaactccgcgaacttattattaaaatatcggcgaattccagctcataccagagtgaaattgccaaggccgcccgcctgggggaaaactatcaccgggtgatggaaggcggtaaccgccgtgccgctgccgccgccagaagcagcagtgccgccctgcgtgatctgaataatcagttagtttccgtcaaagcgtctgcgatgggcctgaccggggcgtttgcgggcatttttgccaccagtaaattagtggaaacggcggataagtggaccaacctgaactcaaggttaaagctggcgacacaatccagtctggatctggcggaaagccagcgaatgctgatggcaatgagccagaaaaccggcacctcttttgaagctaacgcgaccgtcttcgcccgtgccgccacgcccatgcgggcgttaggttatgccacgaaagagattgtcggtatgaccgagaccctgtctgccgggttaagggtgtcgggggcctccgcgtcagaagccagttccgtgcttattcagttctcacaggccatgtcctccggtgtgctgcggggggaagaatttaatgccatggcagagaacggggggcgcattcttcaggccttagcggatggtctcggggtctccagaacgaaaatgaaggccatggcggatggcggcctgctgaccatggataaagtcattccggccttattgagtcagttaggtaaattaagagccgaaagtgaatccatgggggccacggttgagaaatcgttaacccgtgtgcagaactccttcatggaatgggtgggagacgttaacaaagccaccgggacaacacgtgtgcttgccggtacgctggatgatctgtctaaaaatatcaacaatgttgccgccgccgggatggtcgtagcgggcctgttcggggcgaaagccatcggtaaccggctaacggcgattcaggcttcaacctcggcgttaatccagaattcccgggccgaaatcaataacgctgatcaggcttaccgtaatgcgcaggttcaggtggcgaatgccagagcaacggagcttcaggcccagcgcaatgtcttagcggcgcgctcaaggttactgcaaaccaccaacgatcagcaatttaccgccgcccagctgagattaaaccgggcgatagaggcagaggcaaaagcgcatgcggtggtcactcagagtatcgccgccagagccgccgcgcagtcaaggctgaatgcggtgacctcgctgggtcaacggatggggggcgcgttgctgggtgccgtgggtggcatccccggtgcattgatactggccgccggtgccgcctatctgctgtatcagaatcagaaacaagccaaggaagaggcacgggaacacgccaaagaggctgctaacatcaggaaagaattgagcaaaatggaccccatacagctcagaatcaacaaggaaaaattgacagaagatcttgctgttgcgaaacaggatttggagtcattcagggaagaaatggcaataaaccgaagcagactcctgactttcatgaagaataaaagtcagggaaaaaatgttgacgataaaattaccgaattcagtacaaaactgtcagaaagtcactcggcatatgaagccacaaagaaaacgatagatgaaattactgccacacttgcaagtttgggtgaacagcaatcgataaacagtgagaaagcgaaaaagtttgccgctgcgattaccgagatgcaaaaaaccggtaatgtgatgcaggcgctgcaaaaccaagaactgaaactcactgtcagcctgctggaacaaattaaaagtttgggtattgatgtctcaggtattcgcatacccgtaccggaggtgaaatttgaacccaatgataaattaaaagcgcttttggccgaccaagaaagggaaatagatctctccagaagaaaggggctggacaaggctcagcgtgaggcacactacaaggctattgatgcgggactcaacccgaatgaccggcagcagaagccctacgtggatcggatggttaataatgccacccagatataccagaataccgaggcgatgcggaaacaggatgaagccgcccgggaagcccggaatgccgcagaaagagccactcagaaagccgccagagcggcggaagattacgcccaaaaagtggcggaactgaacacccagttagccacagaagcggttcgttatcaggaaggtaataccgccgctgagcggtttgcggcggctcagggcaatgtgacgaagttcacacaggcgcaaaacacccagctcaatctgttaaaccagaaactggaagaggctaagcagcgttatcaggatttacaggctgctattgaggctgatccgttccgccatgttgccaaaagaactcaggaggccactgaacaactccagcggcagcaggccaatggtcagattgaatcccccgctgagtacacttaccgaaaaagtgaaatctggaaagacgatgtgagaggcaaggcggaggccagccaacaatatgcggtttctgcgaaaaatgacctgctgggtgatgttgatccgattcaggatattgagaaccagctggaacgcaaaaaagccctttatcagacttatgccgacgccgaagttatctctcagcaacgcaaaggtgaactgattcttgctgccgaacgtgacacggacagtaaacggattgaagccgccaaacaggtctttgcgagtcagggtgagttacagtcacttgccgtcacgatgtttgagaccacgcaggagcggatggggaacatgatcaccggcctgctgaccgggagtaaatccctgcgggaagggatgtcggagctgttcgcgtcactggcgcaggatgtggtgaaaagtctggtcaaaatggcggcacaggccttgatcactaataccattatgaaagggatggggtcaatgggtggcggcggtatgttcagtggttttgcgtcgatgttcacccagaatgccaaaggcggcgtttatacctcggccaacctgagtcagtacagtgggcaaattgttaatagcccgacgctgtttgcttttgctaagggggcaggtctgatgggggaagcaggaccggaagcgattatgccgttgaagcgcggcgctgatggttcactcggtgtgcgagctgttttccctgctgggaatatggggggagcgccgaatattcagatttatatcacggaaggaaaagccgaaagcacatcatccaagggggagaatgaagctttcggacggcgatttgcacaggctgtcgctcaggtttattacactgagcgggatcgggatttgcggcagggtggagcaatcaataaagccatcagggggcgataatggaaatatttaaatggctgccgcgcgttaacgccagctctaatgtggagtttgctatccgaaaggcaaaattcggcgatggttacgaacaggtttctggtgcggggattcaccctaaatcaatgagatggaacgttgattttgtggggagtgaaaaatacatcactgacattatcgcttttcttgaccggcacgcaggccatcagcctttcatctggcagccaccgttagcgaataaagggctgttccgctgtgagacctataagtatcaggccattgactacaaatcctacgcactttcaaccgaatttattgaggctcatgcaccttaaggagtggtgatgtttactgctgacgtacaaaaactccatgccgggaacattgtccggctatatgaaattgacggcacgaaatttggggcggatgtgctccggtttcatgcatacgggatgcctgtgaccgacgaagagattgaagcagctgaaaagaaaggcagcccaccctcaccaaaatccctctggtggcagggaaaagagtatgcaccgtggcctgttcagatagaggagctggaaatgtccactgatgggcaggcggcccggcctcgcttatccgtatcgaacattgagggcagggtcaccgcactctgcctgcaatttgatgatatggtgcaggcgaaagtgacgatccacgatacctttgtccattatctggatgccagaaactttacagaaggaaaccctaccgccgatccacagcaggaacgccagttaatgttctatgtgaaccgaaaggtgtcagagacggacagagtggtcgtttttgaactggccagcccggcctctctggaaggattattcatccctacccggcaaatacacggggtctgcacatggtgcgcccgtggctggtatcggacaggtaagggctgcgactacaccggaacgcgctattttgatatcaataaccacccgaccgatgacccgagtcaggatcgctgccccggcacagtcattgcgtgtaaattacgtcacggcgaagagaatgagttgcccttcggtggttttccggcctcatcccttatcaggaggtaatcatgcgcgataaaacgctggacgctgtttttgcgcatgcaaaagctgactacccgaatgaatgctgtggtgtggtggctcagaaaggtcgagtagaaaaatacttcccctgccaaaatctggcatgcaatcccaccgaacagttccagctagcccccaatgattatttaaacgcttccctgtggggaacggttaccggcattgtacacagtcacccggatgcaaccacataccccagtgagttagacagggcgcaatgtgatttcaccgaattaccgtggcatatcgtgagttacccggaaggggatttcaggaccatttatccacgcggtgaactgcctttgactggtcgtccgtttgtgttgggtatttatgattgctatggcctcattatgagttattaccgtcagcagtacggtattgtattaaaggattaccgggtgaattacccgtggtgggaacagggtgaaaatcgctatatggataattttaagtcggcaggttttaccgaggtttcggagccacgggtgggtgatgtggtactgatgcaggttcaggctgatgtccccaaccatgcgggcgtgctgcttgagggaaatttattgctgcatcatctgtatggacagttaagtcagaaggtgccttatggtgggtattggaaagacaggacaataagtgttgtgaggtatatccatttgaaataatttcactttggaaggtatgtttattgatggaataaaaaagctatccttgatttaaatattaaattgagctgtcattagtaatacgataattctttattaaagagcaaagcatgaataaattaagtcctaaagtaataaaacaaattgaggatgaaaacaacgcaaaaataaagaagcaattgaggccgataaaattatttggttttatctttatcaccattattttatatggaatttactatttatactctactagcacgagtggcgcgaccagcttagtacagaaagcagttggttatcagcactctctccatttttgggatggtacggcagtgagtagatacgatagtaactacgtatgtggtagttattctacatacccatccgattttacattgcaagatgcagaattcttcgacaacagacctcgctatggatttgttgttaatgctagcacaagaaaggtttatttagaggtcagagatagtgatttcaatacggtatttataagaaaatgcctcggtatgataattaattgataactgctaaatattaaccctcttcggagggtttttttatgaggtaaatatgactctgacagatctcccgcttcgtaccgtccggcttcatggcgtactggcgaccaaattcggcgcaacatttgaatatgccgccagagatgccctgcatgcttttcgtgccatgagcaagcttattgtcggtttcgaagcatttatgctcaatgcccatcagcagggattcactttttcggtcattgtgggcggcagaagctataacaaggatgaactggatatgaccaaaggccatgccgacatccatatcatgcccgtcatgatgggaagtaagcgagccggattgtttaatgttgtcttgggtatcgccatgattgctgttgcatggtggaacccgctgggctgggcagcttcaactgcgttatttgtcggtgcgtcaggggcggctatggcaatgggcggcgtttctcaaatgctggctccccaaccaccggggctaactatgcgtgaatcaccggaaaataaaccctcgtatgcgttcgggagtccggtcaatacgactgcgcagggtaacccggtgcctattctctacggctcccgtgaaattggcggggccattatctcagcaggggtctacaccgaagaccagtatcaaaccgaacagattgaaaatcagcgtaaatagccactcagaccgccagctgcggccttttatttcagggggagatcatgacacggcacattattgaaggcgcaaaaggcggtggtggtgggggcgggcgtacgccttacgagctgcctgataacattcagtccactgctaaggcgcgggtattactggcgttaggtgaaggggagctggttgacgcactgagcgcaaaagatatctatctggatggcacccctttacagaacagtaatggcaccctaaattttgagggggtgaaatgggaatttcgtcccggcactcaacaccagccctatatcaaaggtatgccggcggcggaaaatgaaatccgtatcgccacggaactgaaggataccacaccatggacacgctacgtctctaatacgaaactgtctgccgttcgtgtgcgtctcggctggcctgcactgaggatgcaaaaagagaatgcagataccgtcggttatcgcattgattacgccattgagttatcgactgatggcggcagttaccggctaattacgatccggtcaaccgcacgtacagtggcatctggaacggcacgtttaaatgggcgcacagtaataacccagcatgggtgctgtatgatctgttactgaatgatgtatgcggactcggtgacaaaatagaccggacacaggttgacgaaaccgagttgtatcgtgtggcgcaatactgtgatcagcttgtcccggacgggaaaggcggcaccgaaccgcgatttaccagcgatgtctacattcaatcacgcgaagaagcgcataaggtgctgactgatatcggggcgatattccggggtgcggtttactggggcgcgaatcagttcgttgccacggcagacaggccggacgacatgacctatattttcacgcaggccagcgttatcaatggtgaatttatctacagcagtggcagtgagcgcaaccgaagcaccgttgccatggtgagctggtcaaacccggacaaccattacaaagacgaagttgaggtggtttcagacgacggcttaatccggcgctatggtatcaatcagattgatatcgccgccattggctgtacccgtcagagtgaggcacagcgccggggaaaatgggcgatcctgaccaactcacgcgataccctgatttcattccgtgtcgggctggatggtcaaatccccatgcccagtcagattattggcgttgcgcataaaaacagggccgggcgcgttattggtggtcgtattcagtcggttgataatcgtaatatcactctggacagaaagccggatgtgaaagccggtgatcgcctgttagttaatttgccgacaggaaaatcagaaggccggacggttcaggccgtgaacggcaatacggtgaccgtgacgacagcatacagtgaatcaccggtatcagatgcaggttgggcggtggatgccgatgatttatttattcagcaatatcgcgtcattggcatcaaagataacaacgatggcacgtttgaaatcaacggtatttatcacgatcctgataaatatgaacgcattgacaccggcgcgaggattgatgagagaccgatttctgttattccggccagtgtccaaccaccaccggattcggtcacgcttcagggtttttcttttgttcagcagggtatctccaccacgaccgtcatgatctcatgggcgaaagccgatggagccgttgcttatgtgggtgaatggcgcagggacagcggtaactgggtgaccattccccgcacatcatcaccggaatttgaaatacccaatgcgtattcgggtcgctatcaggcccgtatcaaggccataaacgcatttgatataccgagcttatttgcttcatccgaagaagtgaatatcaaaggcaaagccggggagccgcctgccccgttaggctttaaagccacaccgattgtgttcgggatccagttagactggggctttgcccctcatacggacgatacgctgaaaaccgaaatccagtacagcccgacgagtgacggcgagggattgatgttattgtcggatattccctacccacaaaagacctatgtcatgcagggactggccgccggcgtcgcgttctatttccgtgcccgcctggtggacaaatccggtaatccctccccgtggaccgactttttgcgaggggagtcttccacggatgcgagctggattactgacgccgtcggtgatcagcttatgacagccgaggccggaaagcggctacaggcacaactggattatcaggcggaagcggacctgattaatggggtcgctattcaacagaatagttttgagctgatggcaagggatggggaaaacaaggccgaaatcaggcgacttgaccgggtgtttgctgaccgtgaagtggcctgggcgcaatccattaaagaagtgaaatccagcgtcggagagaatcgctcttccattcaggaaaaccagaaatccatcaataaattagacttgtcatttgcagagagcgaacagcgtgttcaggcgcaactaaaagatcagcaggcgatcatcagcaccaaaatgcaagccgagtttaatcagcccggcaatggttacgctattcatagcgtgaatatcactcttaagcacaatggggtgaagtataacgccggggggatggtgattagtggcgagattaaaaacggtcaactggaatcctatattgggttttctgcgaataactttgcgttttataaccccgctaacgggaaaatggagccgtttatggtcgccaaaaatggtcagttatttgtacaggatgcttttattgatgtggcgaatattcgcaagttggttgtcggggatgaaattaaatccgctaacttcgatccccggaacagaaccggcttcaggctggatatgcgcaccggggaaatgaccagttacggtcagggttcaggcggttactgggtcgaaaccaacaacctgaagcaactgtttgacagtcgcggacgattacgtatccgaatggggttttggtaatgggcatgggattagagatttatgacgagcaggggcgggtgattatcaccacaaacaacattattccgcgttttctcgggacgcatatgatcccgctgaacaaaaccggtagcctgcatttgccgggcttgagcgagggcggcaatgtcaccgcccggttctttttgaaaatgtatggaaagcatcatggcttaattgcttacagcttaagtaacgagtttacaaaattcagcgtttccggctcttcatttaactattacgtggattatgacgaatatcgttgggagcatgagggccgagggggaggtcaatcaaccacatgggcaaggatggaaaatcgcgtgacaatttgggtgatttaagatgctgggattagagttttataccgataacgggctggtgcaattatctgataaagcgccgtcactgggttttttaagaaaggccggggaacatgaaagtaatgtaggcaatgagcgctactataactatgcggaagtctacggcgcgggtggaaagtatttttttgcgcctatttcagagttatctgtccagggtaacagtgggctggaggtctacagtgagcacggtgaactgatgttctcttccgccatgaagttattgtcatttgtgcgatatttttatgtcgatgtgcccaataataaaaccagagccatacgtcatataggtgaaaaaggacgccgttatggttatatgaggattaaggatcaatctcgtcagcactataaaaacgtgagatttctcgatggcagtaataatcctcccttttacgatgatgagtgggaatatgatgtctatttagagtcattcgagccaaaatatggcgatggaagtattgagattacctattcataccaataccgagggagagaatccgatattcttgaccccggcacatggcgcggcccaccgcccttgatggaaggctttatcgtcgatttaaccatgatagaaggttaaccctctccgttttattcatctcaggaatccaaccatgatttacacccaaggtaccctttccacggtgtccggctcggcgattgtccggggtacgggcaccaaatttaaagataacctgaacggcattgcaccgggacaggtgatacttatccagtccggcagcagtaatttactgcatatgatacaggccgtaaattcggataccgaactggtactggcggataatgtcaatgtgacgctgaataacgtcacttaccagatccagacgaccgtgcccaattccatttccgatggtgtccggcatatgtgcgccattaacagcaatatcatccagtttctccagaatatggatcaatggatgacgcagaacggagcggtggcggtgacgctgccgaatggacagaccgtgtcactgcaatcgataaaggcgattcaaacggcagtggatgaaaaactagataaaacaggcggcacggtaaagggtaatgtcaccacgacaggctggatgatggggcaggacgtctgggttaagcgagaatcggatggcaaagaggaaagggtttatcatccctttaataaaccgactgccgctgatgtgggggcattcccggtaacaggtggggaaatcaccgggaaagtttttgccaaaagtgatatggatgtagcaggctgggttggcggtagtcaattatatgatcgtcatgctaatggggggtggtcgcgtgcgtacagtgaagcatatccccctaatgcggctcaaataggagccttagcactaacaggaggaacggtaacaggcgatatttatgcccaagaagcaatcagagtcacgaaatgggtcggggcagagacgttatgggaaggtaaagaaggtgcttggaaacgagtctggagtgaattgaattcatgggcagataacagtggctatctcagaaaatcttctcccattcttcaaattcaccccgatggtaaatttaccaccaacgacgaatccgaaggtgctaccgtctctaaacccggcctcggtcgttatcaggtcacaggcgtattgagctataacgcggatggtgcctggggtgtacatgggggtatttcctcaccgaagaacaacaacggactggagcttatctacattgatgacaaggtgaacaaagacggtagtatcacgattgaaaccttccaccgtcagcatagccacttaccgatacgcttccagaacaagcggataaaagaaatagttaacggggaaaaggtgtactatcaggacggtgaaccgtgcgatatccccgaaggttgtcgcttggatgttcgtgttcagatgccagagaattcagtgtggaatgtgaagcagaaggcggcagaggttacgactgatattgatcaggctgaacaggtggagtgaagtcagcgaaatgatgaacccgcaaaaaaattgcgggttatccttgagattatttattttatttcttggagaggcgaataacgtgactctattttaacgttgacatcaaagccaccagaattatcttcataagcgctatctaaaaatataagggttaactcaccctctgtgggaactgtcctgtggagtacaccattgccaatttcataggtattatcgccaatctttgcgactaaagctcctccgggagggcgaggaggtacgccttgaggggcagaccaaggattgggtgtattatcaattttatactgaacccatcccgaagcagtcacagagattacatcccctttgtggagtattagcccagtaggttgaccttgttgaagttttccagaaacagtcccagaccaatcatacatagtattacctccaaattatattttgaaagtgacagaagaattaagattgtgattattcagtgtcaggcatttgcacccgaacagaaacaaatctgccatcaggaatatcgattaaatcaccgtcagcgtaaccttcacgtatatttctggcgaaaactggggcatctgagtgttctcggtggtaggtcattaattttatggaaccatcgagtagaacttcgtggttgacccagattaacgggagtttatttttacataatggtatttctattccattatcaataccgccccatgcaccatcgatgtttaaccctgtaacacctttgataagatatatgcctttagaaatacgttctgctgttgcatctttagactcgtcatttgtttcaaattttccatcaccccaaagattgattatggttgaagataatttgaaatttccatttgcatccatgaaagtgttagcacccagtattgagaattggctccagttgttaaatgcagaattatgctccccctttctggtgcgtatccatgccatcttactgtatgaatcgaatgccaattgtgtagcccatgaatctggtcctatagacaaatacttagctgcttgccatcttttctctgggttatcagatggcattggatatgagcccttctgataaaatcctgtttttcccgccaaactagctatagtttggttatctgctaattcaattccagagccaccaattccaaaatccccaaccttcagcacatcccctaatcctatattttttacaaaatccgatttactcggaatatcggccccgttttggtttttagctaaacgagtattggcaatgttatttgcattattagcactctgattagcaggagtcgcaagatc

SEQ ID NO: 102 - DNA, 21271 bp, Xenorhabdus sp.
gcactatcaaacgagccccctgacagtagggggaaaaaaataggccgctataaatagcagatgactgcgaggttggcaattattcctaccattagttttgcaatggtgtgaaggcagccgtgtttactgcctaaatatgctgcaaaactcacctcatcagcatgatctgtttacaaatcatcccattgatacaaaaggcaatttgtgacttagaaccatcctgttttctgtcatgctggccccgtaacagattacttcgacccctaaattgcatgcttgttccaaaagaaaagcataatcgtggtcaatatgttttgctgccataacgtgactaatgccggaatgtagcacggcaaagcacaggacagcccgctgtccctgttgtgctatcaatgatagttcacgtaaatgtttttgcccacgaattgtcacagcatcaggaaaataaccattatttccctgcaacagggtgactgatttcacttcaatatagcagttaactttttgttttgactctaacaataaatctatccggcttttctcttttccatagcccacttcacggctgattttttcgtaaccggataattctgaaatgagatcgttttcaatggcctgaaaaaccagatcgttggccctgtgtgtattgacacaaatccagtgcccgtcctgagtctgcgttaactcccagctattggggtatttacgttttgggttatcagaggtggaataccaaacggtatcacccggtgttgcgcatccggtcattgctccggtattggcacagtgtatggtcagcgtttcaccttccggagtcagaacatcggccagaaaacgtttataacggcgaattaatgtagcgtgctttagcggtggtgaaaattccataaactttcctttatacctgaaccaacagtttcatgatgacttaacctgcacggagtcacatgaactaaaattaaacggaaactgaaattaaagtcgctaatgctacaatggcactcattgaaagttaatcattatggtgaacctttgttattacccatttatgacgttgtggattcagtcatagctcagctggaaacttcaaaacaggtattactgcatgccccgaccggtgccggaaaatcaaccggcctaccgctggcaattctcaacaaatcacggtttagtgggcggatcatcatgctggaaccccggcgtattgcggcacgtagtgttgcggagcgtctggcagaacaattgaatgagcctgtcggcagaacggtgggttaccggatgcgtctggaaacaaaagtcagtgctcacacacgtcttgaagtcgtcacagaaggtattctgaaccggatgttgcaacaggatcctgaattgagtggtgtctctctcgttatccttgatgagtttcacgaacgtagcttacaggctgatttggctttagcactgttgttagatgtacaggaaggattacgggatgatttgcgtattctggtgatgtctgcaacgctggataaccagcgcctttcttctttattaccagaagcaccggttgtggtttcagaagggcgcagttatccggtaacgagaagctatcatcccctgcctgctcatctgccttttgaacaatcagtggcgtcaacagtattacgtttgttgcagcaggagtctgggtcattactgctgtttttacccggtgtgagggaaattcagcgggtgcaggcttacttagaagaaaaagtcggtagcgatacattattgtgtccgctatatggtgcgttatcgttaacagatcagcggatggcgataatgccagctccggcaggaaagcgtaaggttgtactggcgaccaatattgcagaaaccagcctgactattgaaggcattcgtctggtggtggatagtggtctggaacgtaccagccggtttgaaccccggacaggattaacccgtttgatcactcagcgtatcagtcaggcatcaatggtgcagcggacggggcgagccggcaggctggaagcgggtgtctgctggcatttgttcagtcaggaacagggccgagcgggcagcggaacacagcgaacctgagattctgcatgccgatttgagtatcgttctgccatcagtctaaaacagtggggacccatcggcagtggtctaatacgctgggtggataatccaccacaggctgcactggctgttgcccgcactctgcttgtacggctgggagcactggatgataagcagcagttaaccgcccgtggctggcaaatgacagaatctggttgtgagcctcgcttagccgccatgttgtgcctggctaaagaacagtatgacaggcaggattcagatcggggaatattggcaacggcagcaaaacttgtcgcaatccttgaagaaccaccgcgccggggacagttggatctcactcattgccttaatactcttcaaccgaactggcagcaacggtcaaaacagttactcagggaactggcgggtaataatatggcaaatgttgccgatagtaatgtgaagtatatacctgagttactggtacaggggttccccgacagaattgcaaaaaatcgtgataatctcgggcgattccaactggctacaggtctgggagctatgcttgcacgggaggagccgctttcgggggagacatggctggtggcgcctttattacagcagggtaataagatgccagatgcacatattttgcttgcttgtccattagatattgagcaaatcatccggcaatattcttctttgtttacagaacagacagctattgaatgggatgataataaaggcaccttgcgggcatggaaaagactgaaatgtgaacgattgacggtcaggtcacagcctttagcaaaaccctcagatgccgaattgcaggaagctctgctgaactggattcggcaggaaggtctggcagcgctgaactggtcacaggaagcattgcagctgcgtgttcgtttacagcgggcgcaggaatggttgccggaaacgcaatggccagcggttgatgatgaagcgttattggcttctcttgaacagtggttacaaccggtgctggaaggtgtgagaaatttgaaaggattgcagcaggttgaactgtcagccgctctggtgagtttacttgactggcagcaacggcaagtactggataatgaattgcctactaattacactgtgccaaccggaagccggattggtatcgaatatttttatgataaatcccccgtactatccgtaaaaatgcaggaaatgtacggagaacagcaaaatccggctgtggcaaaagggcgtgtacctgtcgttgttgagctattgtctccggctcagcggccgttgcaaatcacgcaggatcttgcagcattctggcagggggcttaccgtgaagtgcaaaaagagatgaaagggcgttatccaaaacacttatggcccgatgatccggcaaacacagcaccgacaaggcgggtaaaaaaatatatttagttgttaaataaagcatttaactggagaattcggtatgtctgatgatgatcgtcagccaatcggacgtaagggtcaaaaatcaaaatatcgtcgtgggcgtcaggcaaacaaacgtcatcggcgggatgactatgatgattatgaatataatgatgttgaagacgaaaatgacaccgatgaggaggaactcatgacgaaaaaagggaagaaatctcctcaggtaaaaaagggaagtaaatggatctggctgctgctattgaaaatcttgattgtgctggcagtactcattggcatatatggtttttatctggatggcaaaatccgtcatcgcattgatggtagagtgtggcagctccctgcggcggtgtatggtcgtatggtaaatcttgaacccggtatgaattacagtaaggctgaaatgattcggttactggaaggcatgcaatatcggcaggtaactaaaacaacccgtgcaggtgaatttgtggtcagaggcaatagcattgaaatgctgcgtcggccatttgattttccggatggcaaagaaggccagattcaggctcgcctgactttcgatgacaatcagttaaccagtattgaaaacatggagaaccagcgccagtttggtttcttccgtcttgacccaaaacttatcacaatgatgcagtctgcgaacggtgagcagcgtttgtttgttccacgttccggttttcctgatctactggttcagaccttactggaaacggaagatcgctatttctacgaacatggtggtatcaggccactttcgattgctcgagctgcactggaaaacctgctggcgggccgtgcagtgcaggggggcagtaccttaacccagcaattagtcaaaaatttattcttgacgaacaaacggactttcagtcgtaaagccaatgaagccttaatgtccgtactgctggaggctcgctacagcaaagatcgtattctcgaactctatctgaacgaagtttttctggggcagagtggcgatgaagagatccgcggttttccgttagcgagtatttactatttcggtcgtccgattgatgaactgagtctggatcagcaggcattgttggtagggatggttaaaggagcttcgtattacaacccgtggcgtaaccctaaaagtgcattggaacgtcgtaatgtcgtattgaaaattctccagaatcgaaaagtgattaatcaggaactgtatgacctgttaagtgcgcgtccactcggtgtaaaatcgaaaagcgatgtgatagcacctcaacctgcatttatgcagatggtacgtcaggaactacgagaaaagctgggtgagaagattgatgatttatccggtgtcaaaatcttcacaacattagatccagtggcgcaggatgcggctgaaaacgcgatagaaaacggtattgaggcattgcgcaaagataaaaatcgtccggtgcctaatctggaaggtgcaatggttgttgttgaccgtttcagtggcgaagtccgggcaatggttggaggctcgcagccacaatatcccggttttaaccgcgcgatggatgcgcgtcgtttaatcggttcgcttgccaagcctgcaacttatctgactgcattgagtgaaccggataaatatcgtctgaatacctggttggcggatgaacctatctcaatacctcaggcgggaggaaaaccgtgggagccgagaaacttcagccgaaatttcagcgaacgagtgatgctggttgatgcgctggcacgttcaatcaacattccgacagtcaatctggggctggacgtgggattggatcatatcgccaataccttggtgttactgggcattcctgctaaagagattcagaaagtaccggcaatgttgctgggaggtataaatctgaccccgatggaaatggctcaggagtttcagaccattgccagtggaggaaatagagccaaactctccgcactgcgctctatcattgctgaagatggcacagtggtttaccagagttacccacaggcggaaagagccgtacctgctcaggcagcttatctgacgttatatggtatgcagcaggttgtggcgcggggaacgggccgttcactgaccgggaagtatggtaaatataatctggcaggaaaaacgggaactaccaatgaattgcgtgatacctggttcgccgggattgatggtaaagaagtcgcgattgtctgggctggattggataacaacaagccgactaggctgacgggagcaacaggagcattgaagatttacgaacgttatctggcgaatgagactccattggcgctggataatcgtgctccggaaggtattgtcgatatgtcagttaatgaagatggctcctttaactgcaccggagagggtatcagaatattaccgatctggacggatgatccacaggcgttatgtcagcaatccgtacagcagccaattgaggagggccaagaagaggctccgggctggctgaaagagatgtttggacagtaaagagttatctttaataggctgtaattacatgtaattccccacttttacaggtggggaattttaatgaatttcattatgcttgatattaagttcaagagtgtttttctatcaccaaatcaacaccttcatttaaaagttcattcagggattggcccgttgcttgagctgtaattgccaaagcatggtgtcgctcaggagtcagacgagctgcaattttaccactgtaattcttatagggttttattccgtcttttttacattcatctagaaaaattgtcagtgatatcactgcttcctttttcagctcatcgacactataagcgtagaaatctgcaccaccatttaaaccgataaattcgccacgaaacatttctatttctgggtcgaaagagataacagcagtgtgaccatcgattttaagtgtattattcatcatggttttattcctaagctttccaaccagatacgaatggagttaatttctcctttattcatggagaactgaattaagtcaagatagcgagctggtatcttactcagaaactcaatccccttcgcaaaaattaagcatcaagatatcttgcctgctataggctatggcacaattttggaattaatattcatttattgaataaggttaaatcgttgggagttgctatgggatataaattaaagaatgtcgtcatatttcatgtgaaagacaggatatgaatatcgttatcctatctctattatttattaccgctgctttattacatggcatcagcggcattggtttccccattgccagtacaacggcactaagtctatttatgccattaaaagcggcggtggttttagccttatggccaacattattggttaatttgttaagtgtcatttccggcggaaaaattggctcgatattacataaatacagtttgctggcactattttccttagtcggcagttttattggtgcaaagcttttatttctggttaatcccgcttatttgcaattactattaagtggaattattgcattttacattatcaatagtattcgtagcacgaacctccgtttatctccaaatccggttgttttgtcactattcggcttggtagcgggcattattggtggggcgacaaatgccatgtcacctatattgataatgtgtctgctggcaatgagcagtgatcgtcatgaaatcgcacgggcggctaatctctgttttttgctcggaaaaatcagccaactggtagtattgcgtaacgaagcctttgaactattctcttcggattatttgtggcctgtactgttattgacagtattatctgtcctttttctctttattggtactcgtctgagaactcgaataagtgcacagcattttcgttggctgatgctgattttgctgggagtattggcagtaatgtctgcaactcaggcgatacgggtgttggtgtagtgcaatgtatttttcagagaaaaatattctgatttaaggagtcagcaagatgagttcttgggaatctgtacccattttagcagcattagatatggatgaaatgatccagttttataccgcaagattaggttttacctgtgactctcaattcggtgaacaatatggaatagtatcgagaggagatacagaattacatttttggtcttgtgatgataaatatatagcggaaaatacttcatgttatatatacgtagaaagtattcaggaagtatttgatgaacttaaagataaagttgaaatatcagatataaaagaaactagttggggaggattagaaatgtatctatttgatcccagcgggaatctactcaagtttggtcaaactccatctaattaaaacagaaaattgagtgtgttttcataatctggtgctatttattcggcaccactgaattgtggtgccataacaaaaaacttatttcagcttagcaaaacaacgagcagcagcatcaacggtacgctgaatatcttcctctgaatgagcgatagacataaaaccggcttcgaatgcggatggtgccagatagacgccttcatccagcatgaaatggaagaacttcttgaatcgttcaacatcacatttcatcacatcctgatagcaggtaacgttttccgcatcggtaaagaaaataccgaacataccgccaacgtggttaataaccagaggaatatcagctttagcagccgcattttttaatcccgttgccagtttatccgtcagttcactcaggcgttgatggacaccaatctgagcaacttctttcaggcaggccaaacctgccgccatcgcaatcgggttgccagaaagggttcccgcctgataaacagggccggttggagccagtttttccataatttcctgacgaccaccgaatgcaccgacaggcataccaccaccgatgatttttccaagagaagtgaggtcaggtttaactccgtaatattcctgtgcgccacctaaagcaacacgaaaaccagtcatcacttcatcgataatcaacagagcgccgaattcatcacacagtttacgtagccccggcaaaaactctggttgcggtgggatgcagttcatatttccggcaaccggttcgacgataatacaggcaatctcttccgggaatttttcgaatgcttcacgcactgaatttaagtcattgtagacgcaggtcagagtatgtttggcgaaatcggcaggaactcccggagaattcggttgtccgatagtcagagcaccggaaccggcttttaccagcaggcaatctgcgtggccatgatagcagccttcgaatttgatgattttatcgcgctgagtatagccacgagccagacggatggcactcatcgttgcttccgtaccagagttcaccatacgaaccatatccattgaaggaatcagctctgttaccagttttgccatttctacttcggcagccgttggagcaccaaaactcagaccacgttcagcagcttcaatgacagcgttgcggatagcagggtgattatgtcccagaaccattggtccccatgagccgacataatcgatataggcatgaccatcgacatcataaagataggcaccattggcacgttggataaatacaggtgtaccgccaacgccattgaaagcgcgaaccggagagtttacaccgccggggataacatgttttgcctgagagtaaagtgtttcggactggctcattaatcaatgctcctgaaagacaacagatatgtagattcgccattctaaatcacccaagtaggtaagccaaattagaagcaaaggaataagtatgtctggcaaaacttgaacgaatcagtcaggtattagataatcgccactaactgatctgaaggtttatgccccctattgggtatacagtaactttccgagaatttttaccggaaaaccggactggagtaaaaatatgagcgatgatgctgcattacctttgcagtttactgatgccgcagccaacaaagtgaaagtattggttgctgatgaagagaacccgaatctgcgtttgcgggtttatattacaggtggtggttgtagcggtttccagtatggtttcactttcgatgatcaaatgaacgaaggtgatatgacaattcagaaacagggtgttgaactggtagttgacccgatgagcctgcaatatttagtaggcggctgtgtcgattataccgaaggtctggaaggctcccgctttatcgtcactaatccgaacgcaaaaacgacttgtggttgtggctcttcttttagtatctgattttggtatttatttttccatatgacaggttaaaaccaccgtctttagacggtgactttgactttaatgttttgacctacgcgcgtttacgaggtgcgtggttcgacgactttcagtcgtcagcaccgaagtgcgctaacccacctacttcagtaggtggtagttaagttatcgaagttcagaatgtgggggcaatggaaatattgcccttatacacttcgtctttcaggttgcctctttgttggctgcgctcgttcaccccagtcacatagttatctatgctcccggggattctcttccttgccgccgcgacgcatcttgaaatccattgtgtatatatttatgtttatcagttttattccgcgttatatcaattttctggttttttttcgaattcagcacctaatttgtgcatttcatccaaaataatagacaaagtagtttcatccagagctaattgggctgcaatgaaaaataggatatgttgattcaatgctcgtggtttttcaccaccagtatattttctccattggttactgttagatatccctgctaattctgccatttgttgtccagtaaaacgcagcttacttttgagacaagtcaaagagtctattgatggtggaatataattatcaattaatcgcatagttcttccgttaaaatgagacattacagtctccgatattaacctatgaaaatgtattttatagcagcgataacgacagcaaccccgatagtgataattaattttttcaaccaatcaatatcggttttaatagcagttaaatcagcttttaaattggcttcggtttgttttatatcttcttttgttgctacgctaatattttgtaaatctgttataatttcgacaatcttttctgcttgtgtttcatccatcccggattctttcagggctttaatggcattgtgtgtgctcattgtcaaagctgacatttgctcgtcctcttgggattgatggccactgagtatcagttgccagttgatatttacactaataccaagggggcttaaatgcaagttttttatacagttaggtggggcccttttataagtttaacgcaatgtttttatagcctgtcctatattatttaactgaatacacaattgctcagtcgccagaataatcctcggcccggcacggctgaaccagtcatcattgatggtaacaattctgacattcaactgtggctgccagaattcggctactcgctgtttttgatcttctgttccgcccatcacaataacttccggtttgcgcaccagaacctgttcacggttaacctgaggccacggtacggggctatcggcaaagatatttctgcctccacatgcagaaacaatttcactctgaatggtatggctggatgaagtgaaaatgggatttataccaaattggataaatactggtgtagggtttgctttggcataagtttgttttagctgactgaatttttgccggatatccgcagcggcttttttggctgtatccggatgtgaactataggctgccagccgctctaaatcagtggcaacatcctctacttttttcacatcagagtaaaaaatcggaataccgagtgcagcgagttgctccagtggcctttgtggattgccaccgcgccatgccaagattaaatcaggtttcagggcgatgatccgctcaacattgataccctgccagtctgcgacctgctccagtttttttgctgcttcaggataatcggagtaagcactgacagcgacaagctgatcgcccatgcctgcggtataggcaagttcagtggtggagggggcaaggctgataacacgggacgctgctgcgtacagtggcgcactgaaaacacttacaaagctatacagcagaaataagaataccatccaaaccgagtgataagcggtggttttcaaatagaatttcattaagtgatattccagactttagagcctataaaataggctctaatcaattactgcttgctgagttcagtcagcattgcgttgatcatccgtgtggattcctgtgccgcgacaaccagaaactcatcaaagctaatatgagattcctgatctgcaacgtcagaaatagcgcgaacaacaacgaaaggcactttatattgatgacaaacatgaccaattgcggctgcttccatctcaaccgctgcaacgttcgggaaagtcgcccggatgcgtgccagtggttctgaaccgttgataaaggcatcgccactgcaaaccaggccacggacagcgttcagttccagagactggatacatttttcagctaaagtaattaatttttcatcagcaataaatgcggcagggcattgcgccatctggcccggttcataaccaaaagcggtaaggtcggcatcgtggtaacgtacttcttcagataccacaatatcacccactttcagtttcggatccagaccgcctgctgaaccggtgttaattacgatatccggctgacagtgttcaattaacagagtagtgccaagtgcggaagagactttaccgatcccggatttcagcaaggcgatatcaacaccattcagcttaccggtatagatttcacatccaccgcgcgacaatgtttgcagaccttctatctgatcgcgtaacaaagtcacttcctgttccattgcacctattacaccgactttcatgtgtcatactctctttgttattcccgtcgtctttcaagttgtctctttgttggctgcgttcactcaccccggtcacatagttatctatgcttccggggatgagctctcttgccgccgcgatacaacctgaaatccattgggaatattagtgggttgtgcctacttatataggcctgattaatgcggcagtgtatcattaaataaccgtctgccagagattccggctataaataatcatatcattcgatatgggggattgatgcttaagattgatttcaagcaaaaactgaattttcagcgcaagtacaaaaatgcttctatccatgatgctaatgaagagcagataaaccggcagtttgaaagtgatcgcgggcggatcatcaactctgcggctatccggcggttgcagcagaaaacacaggtgtttccgctggagcgtaatgcggcggtgcgcagccggttaacgcattcactggaagtgcagcaaattggtcgttatatctctaaaaccattattgccgaactgacaaaacagaatttgctggaaaaatatgggctgagtgagcgtctgagcgcttttgaaagcctgattgagatggcctgtctgatgcatgatattggtaatcccccgtttggtcattttggtgaggcagcgattaaggactggttctcccgccggttagatcctgactatttacctgagactgaattacctgagaccggacagagcaaacggcaggataattgtcaggttgcagcattacgcttgagcggggaagagaaaaaagatctgttccgacgccagttgaggatggatctatgccagtttgaaggaaacgcgcaggctatccggctggcacacagtctgcttaaactgaatctgacgtatgctcaaatcggctgtattctcaaatatacctgtccggcttatcgtctcgaagaatctccggaagaattcagttacctgatgaagaaaaaaggctattactggtcagaagattgttttatccgtgaattaaagaaagagctgcaattgggagatttctgccgttttccactgacctatattatggaagctgccgatgatatttcttattgtatcgctgatctggatgatgcggttgagaaaggtatttttaatgttgagcagctggtggaatacctgaaacaggaatggaaagagaatggtggtcaccataaaggcgatttgttcgaatcgacggtaattcaggcttataaaaaaacaaccaataatgaagcccgccgtaatattcatgaacaattttttatgtatctgcgggtgtttattaccggcaaattagtcccttatacggcacagcgttttattgaacatttaccggaaatttatgccggaactttcaattatgctttactggaagccaacggcgaagagcaccgtttactgagtaccttaaagagcgtgacgcgcaaacgggtattcaatcacccggaagtggaagaactggaattacagggctaccggattattaccggtttgctggatgtttatagcccgttactggaactatcccgagaagatttctgggagttacaccagaataacttccacacaaaatactttatcgaaacccgcctgttacacaagctttcaactaaacaccggctggcttataacgaagcggtagagggaattattgccactgacgaaattgaaaaagacgtgatcgaattttactatcgggcacgtctgattcaggattacattagtggcatgacagaccattatgcttacgaggagtatcgcaagtttatggtatcgaagtgagtgctctggtggctctcagtatgtcaggagctgccgcaataacatggtcgatttcgtcaataaactccagtagttcaggctctaaatcagccagagaaatattctgtttcaactgtttttcgatcagttcgcaaaccatctttaatttaggtacgccgttatagcagcaactgccgtgcagctgatgaacatgatgcaaaaactgtttacggtgggcttcaccttccacggtcaatgcctgctcaattctcgttttcatctccggcagagattgcaccagcattgccagcatttccagcgccagtgattctttgccggcggtttgctgtaaagccagcttccagtctatggcttgtggttttttggttggactgtattgatgcagtaagtcttttaagcgagcctcatccagtggtttagacaaacagtcgataaaaggagaatgtccctgattgcaggtttcatcgcagataaaagcggtgacagcaacaatgggggtttgtttatgttccggcaattgatgaatttgctctgaagtctggattccatccatatctgccatctgaatatccatcaggatgagatccagagaatgttttttcgccattttcagggcttccataccactgctgcacagaatagtgttatccacttgttcgcttaaaagtgtgccgattaatttcagattagccggattatcatcgactgccataaccgtcataggcaggcggaatgacgagtggggctgagataaatgtgcaggcactgaatctaacaggaactcctctttttccagccagatatcaaaataaaagactgtccctctggtgggttcactgatgaaatcgatttctccgtccatttcattaaccagccgcttggtaatgcttaaccctaacccagtgccgccgtaatgacgtgtaatgctggcatcggcctgattgaatgcctgaaacagaatagggcggtactctgatttaataccaatcccggtatcagttacggtaaaatcgatttgcaccatatggtgcttttgctggcgcaactttatttccagtgtgatattgccttcatctgtgaatttaatcgcattgccaattaagttagtgagtatttgctgcaaacggatgggatcaccaatcatcaggtttggtagctggtcatcgatatagtggtgcaggggaagatttttcgcactggcagaaggtgtcagtaattctatcacctcattgacggtatcacgcagtaagaaaggtatttgatctaatattagtttattggattccagacgagaaaaatccagaatgtcattgatgattttcagcagattgttggcggaacgttcaatgacatgaagatattctgcctgttgataggttatcggtgttttcagcatctggcgggtaaaaccgataacaccgttaagcggggttcgcagttcatgagacatattcgccagaaattcggtttttatcctgactgcttcctgtgcccgttttttagcgatagtcagttccacattttgaatttccaactgttccattgtaatttgtaggtcagaagtcgcctgatcgatatgcaactgcatttcgtctttatattttgacagcgattccgcgacggtattaatcccattctggagtgcggataactcgcccggcatggctcccgttactcgtgtattcaactgcccctgccggatacggttaacggctttgaccatacattccagaggctctgtaactttacgcaccagaatatgggcaaacagtgccgttccgccgaggcagaggatcagcaaaatgatagaggttgcaatctccttgtattgctggagttgagcggcccgtaaatccaaatcaatggcgatataaccgatggggacgggtttatgtggtgtttccggccacccgttagaagcgctgctttccgagataatcggcattttcaggataatgctgttgctgtcttcttctttagtcagtgttgtcggaataggatcattcggcctgagtcgcaacagattgacatcatatttatcattggaaatttcgaacagctgatggtgttcatcaaaaatcgcaatggccataacgatttcaaaattccggcgatgaaggcgatttatcaatgattttacgcccttactgttatccagatttattcctaccttgctggcaatggacagaggctcaataatgctgatcccactgcggactatcaggctcttcaactcataatagcggtatgagataaatgatatactcacaagtgttccgaccaataagacaggaaccaaaatcaggctcatcatacgggtgcgcaggctatatttggtcataagcatccattgtgggaaaatcaaaactcaatttttcaaagtcagtcagaatcatggtgcaattttactccccaaatcgccgctccgtaaaccgaagcattatttccgttaccgcagacaatcttgatgctcaggggcagggtattgcccgccatcaaggaaaaacgatctttattccggggttattgcccggtgagcaggcgcaagttcaactgacagaagagaaacgccagtttgctaaagccaaaatagttaagcgcttatcagacagcccgtttcgtgtgaatccgcgctgtccacatttcaaaatgtgcggaggttgccagcagcagcatgtcgcacctgagttacaggcgaaaacgaaagccagtgtactggaacatctgatccagcgggagacaggcatcagtatcagtgcgcagcccattattcacagccctgagtatgggtatcggcgcagggcaaggcttggcctgcaatatcaggccagacagggtaaattagtgatgggattccgtcagagccagaccaatgatttggtggatatcgggcattgcccggttatgcaccctgaactggaaaaattattgcagcctctatccctgtgtttaaacagcctgaaagtggtgaaacgactgggacatgttgaattagtgctggcagataatggcccgttagttgttttacgtcatctcgtccccataaagcatgaagataaagaaatactgcgggtttttgcgaagcaaaatcaggtgatgatttatctggctggcgatgaaactcctcttgagccgttgtctcctgaagaagagcaatctgagccgtggtatcaggtggatggtttaaaattagtattcagcccgcaggattttattcaggtgaatgatgcggttaaccagaaaatggtcgctcaggccctttcatggctggatttgcagccggaagaccgcgtactggatctcttctgtggtatgggaaatttcactctgccaatagcggctaaagttcaggcggttgttggtgtggaaggcgttgcggcattggttgcaagcgggcaatataatgctcggttaaatgggcttagtaacgtcaattttttccacgaaaatctggaatcggatatccatcagcagccgtgggccgcacagggcttcaataaagtattattggatcccgctcgtgcaggtgctgctggtgtcatgtcacatatagtaaaactggctcctgaaaaagtggtttatgtttcttgtaatcccacaaccctggcgcgggacagcaaagttctgctggaggccggttatcatcttgtcagtgtgcggatgctggatatgtttccgcacaccggtcatctggaatctatggctttattcagccgagagccgatgactatcgagtagggagaaattatggttgcagtaagaagtgctcatctcacaccggcaggtgaatttgctgtcgataagtggattgcgagtttaaatattgttaatccacaatccagtgaaaaattagccgaaacatggcattactgtcacgaaaaagttcagaatcaccctaatgccgagttgttattgtggcgtggggttgaaatggtggaaattctgtccacactgagcatggataatgacagcatgcgtgcggcactgctttttccccttcttgatgcccgcttgcttaacaacgaaactgtgacagaaacgtttggtcaacccatcgtggatctggttcatggtgtgctggaaatggatgctatccgccagttgaaagccacgcataccgatgctacctgctcagtgcaggtggataatgtacgccggatgttgttggcaatggtagaagatttccgctgtgtgattattaaactggcggagcggatcgcctatctgcgggaagttaaggatgcgagtgaagatgaacgggtattggttgcaaaagagtgctccaatatttatgcacctcttgccaaccgcttagggattggtcagttaaagtgggagttggaagatttctgcttccgctatctgcatcccgatgaatataaaaaaattgctaaacttttacatgagcgcaggattgaccgcgaacaatacatcgaaaaatttatcacgacgctgcgccgttatatgctcaaagaagggatttcgggagaaatttacgggcgtcccaaacatatttatagcatctggcgcaagatgcagaaaaaatcgctggcgtttgatgagttgtttgatgtgcgtgccgttcgcattgtcgttgaacgtttacaggattgctatgccgcattgggaatagtgcatactcactaccgccatttgccggatgagtttgatgattacgttgccaatccgaaaccaaacggttatcagtcaatccatactgtggtgttggggccaaacggtaaaacacttgaaatccaaatccgcacccgccagatgcatgatgatgctgaactgggtgtggctgctcactggaaatataaagaaggtacggcgattggcgggggtaaatccggcagctatgaaagtcggattgcatggctacgcaagctgattgcatggcagcaagagatggcggataccggagagatgctggatgaagtccgcagtcaggtattcgatgatcgtgtttatgttttcacgccaaaaggcgatgtgattgatttaccgacgggttcaacaccgctggattttgcctatcacattcatagcgatgttggtcatcgctgtatcggggcgaaaatcggcggtcgtatcgtgccgttcagttatcagctccagatgggagatcagattgaaattatcacccagaaacaaccgaacccaagccgtgactggctgaatcctaattttggctatgtcacgaccacccgtggacgggcgaagatccacaattggttccgtaagcaggatcgcgataaaaacattattgccggtcgccagatgctggatagtgaactggcgcatttgggtgtcacgatcaaagaagcagaaaaagagctgatagcccgttataacgtgaattcgctggaggaagtgttggcgggtattggtgttggtgatatccgaattcatcagttggcgaatttcctgcaaagcaaatttaataaaactacggctgaagaggcggatcgggaagcgctacgcactcttgagaacaaaacattcacacagcggaatagtaagaaggataatggtcgggttgttgtggaaggcgtaggtaacctgatgcaccatatcgcccgctgctgccagccgattccgggggatgatattaccggatttattacacgcggacgcggtatttccattcatcgggcagattgtgatcaattaactgaactggaagcaagtgcgccagaacgtgtggtggatgcggtatggggagaaagttactccagtggctattctctggtggtgagagtgcttgccaatgatcgcagcggattactgcgtgatatcacgacaatccttgccaacgaaaaagtgaatgtattaggtgtcagtagtcgcagtgatgtgaagcagcaactggccactatcgatatgaatattgagatttacaacttgcaggtgctgggtcgggttctggcaaaactgaatcaactgcctgatgtgattgaagccagacgtctgcatggaaattaaacagttatggataaagtaaacacgcactcagttgcaaatatgactgatagtatgaaaagcattgaaagactgaaagagattatggcgcagttgcgccatcctcagcacggttgcccgtgggataaggtacaaacctcagcgactattgcaccttacacgctggaagagacttatgaagtcatcgatgccattgagcgcaatgatgcccatgccctgaaagaagagttgggtgacctgctgttccatattgtgttttatgcccaaatggcgcaggaagaacaacagtttgatttcgatgatatctgtgaggctgtctgtaacaaactggaacgcaggcatccacatattttcaatcaacaggcgggtatcagcagcgaggaagctattggtagctgggagcagcgcaaaaccgcagaaagagcggaaaaagaccagcactcagttctggatgatattcctaccagcctgccatcactgatgaaagcctataaaatccagaaacgctgtgcctctgtcgggtttgactgggataccgtcggccctgtgttagacaaggtgtatgaagaaattgacgaggtaatggatgaagctaaacaggcagttgtggatgatgagcgcgtagaagaagaactgggtgatttgttatttgcggtagttaacttatcccgtcatttggggcataaacctgaaatggcgcttcagaaagcctgccagaaattcgaaaaccgcttccgtaatgttgaaaagctcatcctcgatagcggattaacaatggaaactgccacattagaggaaatggataaaatgtgggagcaggtgaaaaagcagaaagcttgattctacataaaagtccggttatctctggagaagccggactttttttgatctgggccgtgattaatttctcttggaaattgctacacttaaatagataaagggagggcaaacgggtctaatttatacagatgaaaatcccactgtcaggattttcatcatat

SEQ ID NO: 103 - DNA, 18510 bp, Xenorhabdus sp.
tgtgctctaaaggtcgagtctgctgttgagccatcatccagctttagggtgaaatgtaataaaacagcactgtgcgcttgcacctgaattgacatatcgctcaaaccttttaataaaaaacgattgcagttatacctgtcgtttttctaagttgcctctttgttgactacgttcactgacttgccactgtgatgcaacctgaaatccattaggtattgatggaatgaccagccccggttttattaccggggctggtttcttattgttttttagtgactatttttcgatgactgctctttcgatgaggcttttttatcacccgggttggtaaaactctcaatgatgatgagtgctgccccgatgcaaattgcagaatctgcaatattaaaggtaggccagtgccattctccgacataaaagtcgatgaaatcgacaacaaagccgtgtaccagcctatcgaacagatttcccagtgccccaccaatcaccaaagcataagcaatgttgctcagtttctgcttggcactggaacgatacatcataaccagcaatgtgatacagatggcaattgcaatcaatgcaaagaaccaacgctgccagccgcctttgtcagccagaaaactaaaggctgccccaaagttctgtgcataagccagattaaaatagggtattagcggtatggattcatacaggctaaaattttgcaagactaattgcttgctgcccagatccaatatcaataccacaacaactaaccaaagccagcggaggccagtggaacaaatgggtttcttcatcaggcaaatttacgctcttcaccgttaccggcaacgttagtcacacagcggccacaaagttctgcgtgttccgctaccaatcccaagtctttagcatagtgccagcaacgtgggcatttttcaccgtctgctttacggaaggcaattttaagaccctgaagttcgctttgttgcgcatcatcaccagcagtgtcgtacgcagcaacttctgcctgtgaagttaacagtacaaaacgtaactcatctgacagtttgttgagtgttccggccagtgcttcatcagcatacagtgttactgaagcttccagtgaactgcggatgtgtttatcagcacgagcctgttccagtactttgttcacttcactacgaatttcgagcagctcagcccagaaagtatcgttcatatcttcactatctgccagaccgaacaggccatcgtaccactcttcggtcagaacaaactgtgcacgtttacccggcagttcattccagatttcatcggcagtgaaggaaaggataggagccatccagcgaaccagtgcttctgcgatatgatacagagcgctctggcagctacgacgtgcaacactatcgcttttcgcggtgtattgacgatctttgatgatatccagatagaatgaacccatttctacggagcagaactgcatcagacgctgaacaacggcatgaaaatcgtattcatcatagtgtttgaggatatcagcctgtgccgcctgcgcacgacctactgcccagcgatccagagtcaccatgtcttctgctttcaccatatgctgctcaggatcgaaaccattcaggtttgccagcaggaagcgcgcagtattacggatacggcggtaagcatcagcagaacgcttcaggatctcatcagaaaccgcgatttcgccggagtaatcggttgaagccacccacagacgcagaatatctgcacccagcttgttcatcacatcctgtggactgacggtgttaccgatggatttggacatcttacgtccgtgctcatccacggtgaagccgtgagtcagaacctgacggtaaggagctttgcctttaatagcggtagaaatcattagcgaagacatgaaccagccacggtgctgatctgagccttccagataaatatcggcggaatgaccattgaattccggacgggcatcgacaacggaagaacaggtacttcctgagtcaaaccaaacatccagtgtatcctgagctttcatgtaatctgccgcttcatcacccaacagctctgacatgtccagatcccaccatgcctgaatgccatccacttcaacacgcttggcaacttcttcgatcagctctggtgtacgagggtgcagttcctgtgtttctttatgcaggaacagagacattggtacaccccatgtacgctgacgggagatacaccaatccgggcggttttcgaccatggattcgatgcgtgcttgtccccagcccgggatccactcaacgcctttgatttctttcagtgattgttcacgcaggcctttctgatccatgctgataaaccattgtggcgttgcacggaagatgattggctttttgtgacgccagcagcaagggtagctgtgctggatttttgccagactcagtaatgcgcctttttcttgcagcatctcaacgatgatatcgttcgctttgaacacaaactgaccatccagtgatggataagttccggagatgtaacaaccattcgggccgaccggatttgcgatttcaaggccatatttcaggctgatagtatagtcatccgggccgtgaccaccggcagtatgtacggcacctgtacctgcatccagtgtgacgtgatcacccagaattgcaggagattcaaagcccatgaatgggtggttgaagcgcatcagctctaaatcagcaccagtgcagtcgctcatgacttcccatgaagtgatacctgcacgctgcataacaaattcgactaattctgctgccagaatcaggcattcgtcgttaactttaaccaattgataagtgatttctgcgcccagtgcaattgcacggttagctggcagtgtccacggtgtggttgtccagatgaccagagaaactggcagattctgtggttgtacgccaaatttggtgtatacggcctgtgcatcaacagcagtgaaacggacatcaatggaaggggaagttttatcgtagtattcaacttccgcttcagcaagggaagaaccacagtcagtacaccagtgaacaggtttaacacctttcagcaaatggccattgccgatgatacgacccagagcacgaatgatgtctgcttcagttttgaagtccatggtcaggtaaggtttatcccagtcacccagaacacccagacgtttgaaacccgctttttgtgtttcgacctgagtcattgcgtatttgcggcactcagccctgaattcggcggcggaaaatttttcccccggcttaccaataatctgctcaaccttgagctcaatcggtaaaccgtggcagtcccaacccggaatataaggcgaatcgtagcctgataaccctttggacttaacaacaatatctttgagaattttattaactgagtgaccaatatgaatatcgccgtttgcatatggagggccatcatgcaaaatgaagctcttcttgccggattttgcttttctgatggcctgatacaaaccttctttgtaccaacgtttcaacatatctggttcgcgcttggctaaatcaccgcgcataggaaaccctgtttccggtaaatttagggtgtctttgtagtcactcattatagattctcagttccaattttccgctatacccccgctagtggggttcaagtagatgattaggatcgctgcaaaaagtattctcttgcagagaccacatcatttgcgatttgctgtttaagcgcatcaagcgaagcaaatcgctgttcatcacgcaatttcttgcgcagtaccacatcaatatgacgcccgtacagatccatttgggtatcaatcagatgtacttcaagttgctggccctgaccagaaacggtagggcgatttccgatattggcaacacccggcaaaggagtatcacctaaaccgtaaacttcaacagcataaactcccttcacgggagcaaccagccgtttcagaggtaagtttgccgtgggaaaaccaatagtccttcccagacgattaccgtgaacgacccggccacttatgctgtaaggatgccccagtaatgtttcagccaatgttagatcatcatgttgcaatgattgccgaatggcggtactgctgatccgcagcccactgtcacaaaagctgtctgtactggcaacatcaaagccgtattgtttacctgcctgctgtagatagtgaaaatcaccaagacggtttttaccgaaacggaaatcatcaccaaccgccagaaacttaacacccagtttttccacgagcaaccgggaaacaaatgcttccggtgaattggcagcaaaatttctgtcaaatttcacacataacaagtaatcaacaccatactgggataaatattttattttatcccgtagccgtgtcaggcgggctggtgctttatcagcgacaaatacttccagtggctgcggttcgaaaatcatcaccattgtcggtaacccgagacgcagcccttcttgcttcaaatgtttcaataaagcctgatgcccgcgatggacaccatcaaaattaccaatcgtcagcacgcaaccatggtgacgcgcccggatattgtgtataccgcgaattagctccatagctggctcaataccgtgaaaattgccggattataccttgtacagcgcacaaggttaacccacgatcacaaagggttttaattaataacctgattcatacaataaaaacaggttagatgcccgaaaaatatttaatttatcgcatttctcagtgattcattgagttttttattgtgaaaggctgtattccctttcagtaagctgataaaatcctgccccatcacaacgtaaccagcgtcgccgtacaacgacgcttatttgcacaaatccattgacaaaagaaggctgaacaggcatattcctcggcctttgaattgtcctcgatagaatatatttgggagttggaccttggctaatatcaaatcagctaagaaacgcgccgtacagtctgagaaacgccgccagcataacgcaagccgtcgttctatggtgcgtacttttatcaagaaagtatacgcggcaatcgctgctggcgataaagaagctgcacagaacgcattcaatgacatgcaaccaattgttgatcgtcacgcctgtaaaggtctgatccacaaaaacaaagcagcacgtcataaatctgctctggcagcgcaaattaaagcaatgtaattcgttgttttaattatgctgaaaaaaccggcttttgccggtttttttgtatatacccttcgtctttcaagctgcctctttgttggctgcgctcgttcaccccagtcacatagttatctatgctcccggggattctctcccttgccgtcgcgatgcaactcgaaatccattgggtatactcattgagttgatatcggtattatctttctggtttgttttttaacggaacattgaataaatcagagaaatctttgttacatacgcgctgaacagccggatgttggatcattctttcagcaaagatgacataatactcttcctgtactgattccagtctgcctatctcaataatatcgctgtcagcaaaagtatcattggcatagaaagacggagcgataaaaatagcattatgatacatgccaaacgctttcattaacgctgcgtcgtcaaactctcccaatacctcaacctcaaggttcttattgcgtatccatgtcagcagttttctgcccagcattgaacgacggccggggatcagtaaacgacgttcttccagacattcagggaaaggtttttccgggatcggttcgcggcagtaaaaactgatgctgcactctcccagcttgacggaaaacaggccttcctgttgagtggaatcaaccgggcaatcagataaaatcatgtccagtttatgttgactgagttgttcaagcagcatttcatgggttgattcaaagcaacgcagatggattttctcatgttccactactgcggtttctaataccttactgaccagacgtttggacagggcatctgcgaccccgacatcaaacagcaggtttgattctctgctgtaggtgacgatgtccagcatttcctggctgagcataaacatcttatcagcatagcggaaaatgagttgtcccagctctgacggaactaatcctcttccctgacgcttaaacagttttccacccatgcgttcttccagcgccttaatctggccggtaatagtctgtggcgtcaggtatagagcctcagccgccccgacaacagaaccttctttacaaacatgccaaaaatagtaaaggtggttaaagtttaaatgtgaaacccgcatatatttatccttgtgtatacctcacatctgtacaacagccgtgcccatacgtttcaggctgccagattatgatgctctcctgttttcttctaatatgaatattcacggtacagcaggtgagacgttataccgtgaatattaagaggatgaattaatttggaattgtctcgattatgcgcctaaattagtctattcgacggcatttggctatatttttttctttgctaagaccttctttggcaggagtttattgagcaaaccatagccaataacagcagcggtggttgagccaatcaatatccctaaacgtgagtaggtactgaagtcttcactaagaccttcaaatgccagaccggaaataaaaatagacattgtaaagccgattccacacaggacagagactgcaaagatttgctgcattccaattcctgccggtaatttggcaacacccagtttcactgaaagccagctaatcaggaaaatacctaacggttttccgataaacaggccaagagcaacaccgacaggtaacatcccgcttaaaccttccagagagactccttgtagtgaaatcccggcattggcaaaagcaaagagtggcaggattagatacgctacccacgggtgcaaaccatgctcaagtgcttcggaaggtgagtgaccgtttttacagcgcagagggattagaaagccgacaatcactcccgctaacgtggcatgaacacctgatttaaggatacaaacccacagaatgaccccaaccaccagataagcggatgttttggcaacaccgcgccagttcatccataccagcagccctatcattgccgcagccagccccagtgcaaccattgaaacacttttggtgtagaacagggcaataataataatgacgcctaaatcatcaataattgccagagcgagcaaaaatacttttagcgctgtaggtacgcgatttcctaagagagccatcactccaagtgcaaatgcaatatcggtggcggcaggaattgcccaaccctgacgggtgatttcatcattaccgttaaagagtaaataaattaatgccggggcaagcatacctccgacggctgcaatggcaggaaaaatggctttatcacggctggctaaagaaccttccatgagttcccgtttaacttccagaccaacaatcaggaagaaaacagccatcaatccatcatttatccataataataatggtttattgatttccagcgcagcaaactgaactgcaacgggtaagttaagaaactgatgatagatagtctgtaatggcgtatttgccatcaccagagcaataatggcagcaataatgaggaggatccctcctgctgcttctaattttaagaattgacgaataattgcagtcataaattaataacctataagatgaattaggttgtcgatacaattgttgcagagacaatagttacctgaatattgggtataaatattatttttataaataatgcggctataaatatcgtgattatggctaatgaagttataaatactacattaactttgatttcggaaaaagtagattatttatgcgatataattcggtatattcgatttaatgtgtttttaacattgtgttttccgaggattactcgagagaaattaagtttgactaacttggggatttatggaggatgactcattaacttaataaaaactaatcaataacaataaaaaaacaaaggtaaatgcgattatggaaacactagtattatttgccgtgcttggagctgccttattacatgccagctggaatgcagtgataaaagtgagtgctgatcgatttttaggaattgcacttatcgcgtttttttccgggttaatctcaaccttggggttattctgggttggattaccgacaatcagctccctgccgtggttaatattatcttgtgtcctgcaaattggttattgcctgtttttaagccgttcttatgaaatgggagatttaaaccagatctatcccatagccagaggatgtgcgccgcttattaccgctttgctgagttgggttattttacaggagacgttaccacctttagcgatgctgggtgttggtttaattattgttggtgtcatttttattgcatttccttatgggaagaaatctctccgactggatcgcagggcattgattgcagcgatgacaacttctgtttttactgcctgttacacattggttgatggtgtgggtgcccgtgccagtgataatgccctgacttatattctgtggctgtttgctgtctatggctgggtgatgggcgggatgatgtatttcaaatacagaaatactgtcagacaaagtattcgccaatattggaaaccggggcttcttggtggatttatgcagttggtcagttatggtattgccatttgggcaatgagccatgttcctattgtactggtcgctgcattacgcgaaaccagcatattatttgcaatgctattatcggttttcatcttacgggaaccgtttagcaaaatgcgattgctggcttgtgttgtgattgtcagtggggttgtcggaatgaaattagggtagggggatgattccaacttgtcggggacatttatcgtcttctaagctattttttgctggctaagagcattcgctccagtcacacagttgtcttatctatgtgactggggaactaaaaccagcttttggctgagtaaattcgttctgacgaataaactaaattacttagtcaaatcatcaaaaaactttttcacgccatcaaggaagcttttggagcgtgggctattggtttccccgctttttccgccaaaagactcgcccagttggcgcatcagctctttctgctcttcgttcagtttaaccggagtttccacgacaacacggcacagtaaatcgccctgtgcaccgccacgaacggatttaacgcctttgcctttcatgcggaacaatttgccggtctgagtttccgccgggattttcaggctgacgcgaccatcaagagtcggtacttcaatttcgccacccagtgctgcagttgcaaagttgattggcacttcacaataaaggttgctgccatcacgttcgaagatgtggtgcgctttaacctgaacctgaacgtacaaatcacctgccggagcgccgtgttcgccagcttcaccctcaccacttaaacgaatgcggtcaccggtatcgacacctgccgggattttaacagacagtgttttgtatttttcaacgcgaccgtgaccgtgacatttgttacatggttctttgatgatttttccacggccatgacattgaggacatggctgctgaacagtaaagaagccctgacgcatatgtacctgaccagccccttgacaggtagaacaggtttcaggactggtgcctgcttttgcaccactgccatgacaactttcacaggattccagagttgggatgcggatctctttggtcacaccacggacagcttcttccagtgttaagtccatgctgtagcgcaggtcagaaccacggcttggacgctgttgacgacggccaccaccgaaaatatctccgaaaacgtcaccaaagatatcgctaaagtcagcgccaccaccgaagccgccagcacctccgcccataccaccctgttcaaaggcggcatgaccatattggtcataagctgcgcgcttctgagagtcagtcaggatctcatacgcttctttaatttctttaaatttggcttcagcttctttatcaccctgattacgatcaggatggaatttcatagccagtcgcttataggctttcttgatctctttttcatcagcggtcttggagacacccaaaacctcgtagtagtctttttttgccatcgtattgtttacccctaacacgcacaaacgggcgtagagtgttacctcaacgcccgtgctagttaacaagtaacaggcgtcctgttactttgcccgctaagggctattattttttgtctttaacttcttcgaattcagcgtctacagcatcatcatctttcttcgcggcattgcctgcatctgcatcagctgcgcctgcctgagcctgctgctgtgcgatttcctgaagtttcttagatgcttcaaccagagcctgaattttcgcttcgatttcagctttatcttcgcctttcgccgcagtttccagttcagcaacagctttctcgatagcggttttttcgtcagcagtcagtttgtcgccagcttcttcaacttgcttacgagtgccgtgaaccagttggtcagcctgattgcgagtctgaaccagctcttcgaacttacggtcagcttctgcgttagcttctgcatcacgtaccatttgctggatttcttcttcattcagaccagaagatgctttaatggtgatgttctgctcacgaccagagtttttgtctttcgcagaaacgtgcaggataccatcggcatcgatgtcgaaagtcacttcgatctgaggcataccacgaggtgctggctgaatgccgtccaggttgaactgacccagagatttgttatcgccggaacgcttacgctcaccctgcaatacgtggatagttaccgcagactggttgtcttctgctgtagagaatacttggctgtgcttagttgggatagtggtgttcttcgtaatcagagaagtcatcacgccacccatggtttcgatacccagagacagtggagttacgtccagcagcagaacgtctttcacgtcacctgccagtacaccgccctgaactgccgcacccattgcaactgcttcatcagggttaacgtctttacgtggttctttaccgaagaagtctgcaacagctttctgaaccattggcatacgagtctgaccaccaaccagaatgacatcctgaatgtcagatacagacaggccagcgtcattaagtgcaactttcagtggctcgatagaacgtttcaccagatcttcaaccagagattccagttttgcacgggttactttaacgttcatgtgcttaggaccggttgcgtctgcagtgatgtatggcagattcacgtcagtctgctgagcggaagacagctcgattttcgctttttctgctgcttctttcaggcgctgcatagccagtgggtcgttacgcagatcgataccttgttctttcttaaactcatcaaccagatagttgatcatacggctgtcgaagtcttcaccacccaagtgagtatcaccgttggttgccagaacttcatacgttttttcgccgtcaacttcgtcgatttcgatgatagagatatcgaaagtaccgccacccaagtcgtaaactgcgatagtacggttaccaacttctttatccagaccataagccagagctgccgcagttggttcgttaatgatacgcttaacttccagacctgcgatacggcccgcatctttagttgcctgacgctgtgcatcgttgaaataagcaggaacagtgataactgcttctgttactggctcacccagatagtcttctgcggttttcttcatttttttcaggacttcagcagaaatctgaggtggtgccattttctggccttttacttccagccatgcgtcaccgttgtctgcgttggtgattttgtatggcatgatagcaacgtcacgctgtacttcttcgtcctgaaaacgacggccaatcaaacgtttgatggcaaacagggtgttttgcgggttagtaacagcctgacgtttagctggttgaccaaccagagtttcaccatcctgagtatatgcgatgattgaaggggttgtacgatcaccttcgctgttttcaagcacacgtgctgttgtgccgtccataattgctacacaagagttggtagttcccaagtcgataccaatgattttacccatctaaacgcctccacaaagaattcatatattcggtcaagttactacgctatatgaggatgaatgttttcttttcaatggcactgtctgccagaaattcctcattgtatgttttcagccgttactgaagtgtcagtagtaactgtagttgagacttagatggggtcattcatctcagcatcaagggggagattgaaaaaaaattgagatttaataaaaaaatttttctgagggcattgtgtagttgatgccatcacattatgatccgccgccttttatggttttctggcatagaaaagtgctatgagaatcttttttaatactttgttttatttgaatttatagggaaaatatgagttctaatcagttggcgaatccaggcccattgggtttgatgggttttggcatgacaaccattttattgaatctgcataatgcagattttttcccattaacgtctgttattttaagtatgggaattttttatggtggtttggctcaggtgctggcaggcatcattgagtacaaaaaaggaaatacattcggtgcaaccgcattcacttcttacggaatgttctggctgagtctgattggtgtgctgttcctgccaaaaatggatctggcagaagcaaccagccctgagttcctcggcgtttatcttgcgctgtgggggattttcacgctgtttatgttctttggcactctgaaagctaaccgcactttacagttcattttcggtagcctgactgtactgttcgctctgctggcgattggtaacatcactggtaacgccagccttctgacttttgctggttttgaaggtgtgatttgtggtgcaagtgctttctatctggcaatggctgaagttctgaatgaacagtatggccgtaccattctgccaattggtgagaaaaaacacgcctgatatcagctataattagctgactggtaaaaaggaacaggatgagtcgttttactcatcctgtttttttatttatggctttagccagtttaagtcgcgttagcgtcttaaacataaaaccacccgctttgcgggtggagttcaaaggttataccaagaaaaacacctttccgttacgatatgaaaaacacctttccgttacgatatagatgtacaagctaatattcgtaactcaaataaggaaaggtgtttatgggcattaaagcacaaagctcagcgcatacaaagtggctgtgtaaataccatatcgtcttttcgtcgaaatatagacggaaagtgatttttaataatattcgttcaagtgtgggagagatcctcagagacctttgtaagtataaaggtgtggaaataatcgaaggtcatctcatgccagctcatgttcatatgttggtgagtattccaccaaagctaagcgtttcaagctttatgggatatttgaagggtaaaagttcgttgatgatctttgatagacacgccaatttaaaatataaatttggcaacagaaagttttgggcggaagggttctatgtcagtacggtagggctaaatgaagcgacaattcaaaagtatatcagagagcaagaaaagtcggatttaatctcggataaattgagtagtaaagagcatgtagaccccttcaaggggtaggccaaagcagcaaagacacttagcttgaacgaagagaaagcagcgtcatttaggcgcagtcggtaacaagcccttatagggcaagagcaaaccacccgttatacgggtggttatgattatatcaaattatatcaaatggttattgaaattatttctattccagttcgttcatggcagcaatgctgaacccgccatcaacatgcaggatttcaccggtaataccaccagacaggttagaacacaggaatgcagccgcattacctacatcttctgtagtgacggtacggcggataggtgtgactgattcacagtgtgccagcatcttacggaaatctttgataccggatgctgccagagtacggattgggcctgcggaaatagcattaacacgaacaccttcagcacccatagcattcgccatgtaacgcacgtttgcttccagagaagcttttgctaatcccatcacgttgtagttagggattgcacgctctgcacctaaatagcttaaagttagcagcgctgagtcaggattcagcatactacgacatgcttttgccaatgcgacgaagctgtatgcgctgatatcatgtgctattttgaaaccttcacggctgacggcattaacgtaatcgccatcaagttgttcggctggggcataaccgatagagtgaacaaaaccatcgaatttcggccatactttacccagttcaacgaacaatgtgtcgatactttcatcttgagccacgtcgcatggcagaacgatgtttgaattcagagatgctgcgaattcttcgacacgaggtttcaatttgtcattctggtaggtaaaagccagttctgcaccttgttcgtgcattgctttcgcaattccataagcaatagacagtttgctggcgacgccagtgattagaatgcgcttgccggtcatgaaacccatatcagttccttattgttcttaatgttcaaaataccagagttaatagtgtagtgtattaaaaatataacctacataaatcgggtattcgttgttagtaaacggaggagattctaccacgccagagaaaaatgtgttgagtttccactactgttccgatcagtaaaggtattctttttataataaaacaaatgattattgttttttgtgctattggggggctaagagatagcacccagatatgaatttcaattaattaggttctatcacattaacagagcgctagcgagagaaaatgatgtgatttttttatacagtcaattgatggaaaaagtcggtgggtgaaaggaaccccctgatccttgcagatattgacctttacgcaatgtattgattcattcaataccggccaataacgttggaggagcaatggaatcaaacggtgaacctagcgaaataacgtagaaagatcaacggttatgctgcactcagccatcacctctttaaggtttcgtaagctcagggtataagtgaaatatcaacggacatcccgcgcgatagtatcggtaggatagtatagtcgtttgaaaccgtttcggattaaacacattgacgactcactctgcaaaaatgtgtatgttcaccgatctgttcttaatgcgacagagctgcctcgcggcatttacaccaacggtgtgctaaagttcatttttttactactattaaagttggaaatagatgggggttgttcaaaaagcaaatcattaactcagtttttataaaaaattctagggtatttgcatatgctaatatacgcaagaaaaataattcgtttttttattttcctctatgcgctgttcatgccttcagcaatcattaatgctgtagcagaaaataatattcaaaataatcagttgaatgctcaattagcaaaaaatgatgagatctcagaacctgatatacccccaattattggcaataatgttcacatggtgaatagtcttttatctactccttcttcagaactcattgaacaggccaaatcttatgctttgggtaaagttaacaacactatcttcttccgaagctcaaaaatggttatccccatcgagtacagcaaaaattaactttggttttgacaaaaaaggaaggctggaaaataattcagtagatctgctattgcctatttatgatcatcaagccaactggttctttttttctcaattaggttaccgcaacaaagatagccggaatacagttaatctcggtttggggggacgttatttttctcaggactggatgtatggcctgaatactttttatgactatgacgttacgggtaaaaacaggcgggtaaggttgggggggggagctttggggagattatatttaattttccaccaatggctattatcgcttaagtgactggcaaatctcgcgggattttgaagaacatcacgaacgacccgccaatggctatgacattaacggcgaattcttcctatctgcctaccctaatttgggaggcaaatttttttatgagcaatacttcggcgataatgtgacgttatttaatcgaaagaccaagcaaaaaaatcccagtctggcaacaatgggagtgacgtatacaccaattccattgataacaatgggtgtggattataaacaaggagagaggggacagagtgagacccaatttctgacaaactttaatttcagattgggtgtgccactgagtgcacagttatcaccggataatgttgcgtcaatgcgaacactggcaggcagccgttatgatttagtggaaaggaataataatatcgttttggatcataaaaaaatagaaacaatagaattgattgctttaccaccaattattggctatgggcatcaggaaatagcgattagtgcgcctttacgatcttttaaaaatataaataatattagctggaaagtagtagataaggaatttgaaaaatataatggaaaactttctgctaaatcaggaaaaaatattaccgttacgcttcccagctatcaggatacacataaacaggattataccctcgacatcgcaattactgataatcagggcataactaaaaatacgcaggttccggtaagaattttaccttttttgataaaaggaacagtaaatattacgccaccgaaacatccagaagcgacagggaaagaagaaaatggctatacatttgatgctccagttattacttatcaagactcacttgatggagcatttgttaaaaatggcaaaattgataatgtgagctggacaactgaacccgctttaggcgaggaatctaaattaaaatttagatggaataacaaatctgctcaaactaatgaaaaaggtgaattaactgatagtagtgggaaattactgacaaatgttttagttagtaaaattccgaaagataatgttgatatttatatccagcttgatggtgctccacgacaaaaattaggctcagtaaaattcagtgattacaaaatagaaaacaaccaacttaatgtaacacctgatcccaaaaaggcactgattgctgatggtaagaataaatataaatatacagcaaaaatcattactgataataatttacctgttgatacagttaataatgtgaaatggagtgcagtagggaaaaatgcaaaaggccacgaagttaaggatatttttgtcgatggtccaacaggaacagttaagacaaataaaggagtattagaagcaacgttaagtagtttaattccattaaatgacgttgtggtaacgctttctatcgaaaataatcaatctgtttcagcaaaagctgtttcttttattgcgggcactaaagggtatcatgttgaaaaaatccgtattgataaaccaagcccacttattgtcaatgatacctatacttataccgcttatattgtcgatcaggatggcaagcccgctcctgaaggtcaggtaatctctaatgtccgatggaatataaataataatatgtcggagattacattcacacataaggatggcaaggatacaaccggactaggtggtacacttaccgcatcattgaagagcactgtgtctgtaaatggggtggaggtttcgctggcagtagaagaccagataacaccgattcatgcaacagcagtttcatttaatgatgatcctaaattcaaccatgtcaaaaatatcactgtcgggttccgccgaagaacccccaaaagtgacgattctgcggtcatgacttccagaatgcctgttttaagtgttgttccaacagctcagccagtgcagcaacatcaatggatgttttgctcgccttcttgaaactgtaacgaccagtaaagaacaagtgctgccaggcaatcggcgatattctcgcaaatttttccagtatttcttccggcacaccttcaaataccatctttttatacactcgatttaggatcatggcgttgtacgccacaatacagttggcgactaacctggcagcatgggcgctgactcggttatcggtgattttcctgcctttgaacacgttgttgtagattttacggataatgcgttgtaattgatggtacgactccgtacggttcctggcagtccgtattgcttttcttagatgcatatcatcaatcagattgagcacatgggtgcttttgaaatattctgtgtattcatacagggcagctctcaaccgggcata

SEQ ID NO: 104 - DNA, 23621 bp, Xenorhabdus sp.
cgaagggatagagtacgctaatgccaaaaagattatcttaaaaagtgcgaccatgaatgggtcatggattggcagcgataatcaggtgtcaggcattaagtcaacacgggagccgaacacttatctgtttgcctttgctgacggcacttacaccaaaattcataaaatccagcttcgcaatgatcccgcaaccggaaaactgacctaccactctaccgcctggtataaaaagggtaatcaccttcaggggcttgaaaaacaggatatctctgcgcagaacggttttgtggatgtgggaattgacggagcctataccctgtcaaatctggttgttgaacaccagcaatccaccacgattcaggcagtagaacaaaaactgacagaaaacgaatggatgaagtatggcagtggcgtgcgtattaaggctgccgatgtcattttatccgatgctaaaatgggcggctatgcggtttatcaggatggcaccaaggttgatgtaacagcggttaaatcccatcgccagccaaacacctatgtgtatgccaaaaaactgggtgtttacaccaaaattgtggtgatcgagttaagaaaccatcctgaaaccggaatactgcaatacattgcccgcccctggtataaggaaggcgaccatacggtcaatctggcagataaaatcatctcagaaagctacggttataccccgatgggaaccggcggttactcactgagtgatctccattacagcgccagaatggtacagacaactaccgagcgtgttgccagcacacacgaatacagtgaccagtcactgtttccggtgactgagcgtcgtgaaacttcaggtgatgtccgttttgaaggtgctggtggcggtaacgttatcaaatccaatgttacaaaaggcaacgtttatttcagtggtgccggaattgccaacgtgattgagcacacctctgaatttggcaacacggaatttaacggtgccggtggtgcaaacgttatcatcaaaaaaggcaaggaaggcaatctgaaatttaatggtgccggaattgccaatgtgcttcttcatcaagggaagcgcggggatatggaggtcaatgccggtggtgcagctaacgtgctggttcgtgtcggtgacgggcgctatcttgcccatcttctggctgtcggtaacatctccatccataaaggaaatggtaacagccgcgtctcaatgggcggtggtttcaatactcatactcaaattggtcatggcgatgcggtctggtcgggtgttggcggtgccaatgttctgactcagatggggcagggaaaagtgtctgccattctggccggaggcgccaatattctgaccaagattggcgaaggctctcttgaatccggcatgctgggtggcgcgaatattattacccacatcagcaatcgctcagatgcgaccaaatctgataatacaaaagtcattgctttgggcggagctaacgttctgaccaaaaaaggcagaggtgatctgctgtctgtgatgggcggcggggctaacgttctgactcatgtcggggatggaaggacttccggcattctgttgggcggggcgaatatcctgaccaaagtgggtgacggagataccactggcatcatgctggggctgggcaacgtcctgactcatgtcggtgacgggcaaactctgggcgtgatggcgggggcaggaaatatcttcactaaagtcggtgatggcgaaaccattgccgctatgcttgctttcggtaatatttttactcatgtcggtgagggtaatgcgtatgcactgatggcgggtggcggcaatatcttcactaaagtggggaatggtgatgcgctggcactgatgctgtcattcggcaacgtattcactcatatcggtgatggtatgagtgttgccctgatgatcgccaaaggtaacattgcgactaaagccggtaacggtgatgcacttgctgccatgatcggcaaagggaatatctttacgcaaatcggtcatggttccacttttgccgccatgattggcggagccaacattctgacaaaagtcggtaatgatttgactgcggcattaatgataggcaaggcgaacatttatacccatgtcggagaaggcaccagcatcggtttgtttgccggtacggccaacattatgaccaaagtcggtgatggcacaacactggcagcgatgtttggcaaggccaatatcatgactcacgtcggtgatggtatgacgggtgtactggcgctgggtaaagcaaatatcgtgacgaaagtcggtaatgactttatgggcgttgtagcgtcctcagaggccaacgtagtaacccatatcggggaaggcacaacagccgccctgctgaacggtaaagggaatattctgaccaaagtgggtgacggaaccgctgttggcctgctggtttccaaaatcggtaacatcatgactcacattggtgatggtgacacgatcgggtttgccaaaggcgaagccaacatcattaccaaagtaggtgatggcacgggcgtgaatgcggtctggggtaaagccaatattctgacacattatggtgacggagagcgctacaacttcgccaaaggggaagcgaacgtcatcactaaagtgggtgatggtcaggaaattaccgttgttcaggggcaggccaatattattacccatatcggcaatggtgatgattacaccggctcgtggggcaaagcgaatatcattactaaagtcggtgatggacgcaatgttgtactggctaaaggtgatgccaatatcgtgactcagatcggtgaaggggacagcttcaacgcattatggagtcagggtaacgttgtcaccaaagtgggtgatggtattcaggcaaccgtcgccaaaggtaaaggcaatatcaccacaaccgttggtgatggtttgagtgtcaccgcagttcatggtgatctgaatgttaataccaaagtgggtgatggtgtctctgtcaacgtggcatggggtaaatacaacgttaatacccgcgtgggtgatggcctgaatatttctgtcatgaaaggcactggtaatgccaatatccgtgtgggtgacggtctgaacatcaacgcctcttacgcacggaataatgtcgccgttcaggttggtaatggtgacttttatagtctggctgtggcaaccagcaatacccagagtaacaaactgggcgcactgtttgataacatcaaacagacattacttggctcagcaggcagtcagggcatcagttatctggtaaacggtgatgaggccaacacatcaggaacccgcaaagggcgcggagctattaatctgcccgaagtttcctcactggatggctttaaactgacagaagtgaatgaagttacttctgacctgcacaacagtctgcaaggtgcggtatcggaggtgaatacaccggatactgaggcaatgcagcgtagtctcagccgtgaaaaacgtcagtctgataatctgatcgtgaatggtgattttgagcaaggttctgcgggttggcattccactaacgggattgaagctcactcttccgctgcatcttatggtttaagcaaagaggggcatggtgagcgggtcagtgaacttgatgtggatatcaacacccgtatttatcaggatatcgacggactggctgagggagaacctatcagcgtcagttttgattacgccatgcgtgccggtctgtctgacgataatggaatagatgtactctggaacggggaactggttttttccacttgggcggatgataccggtaaagcggaatggaaaaataaaacgttaaccctcactgcacaggcaggcagtaaccggctcgaatttgccggtactggtgtgagtgatggcttaggctttgtgctggataatgtcgttgcccgctctgaatggtcagacaaagatattgctgattatgtggaacaggatcaggcagccacaaatgccttgcaggacaaggagaaagcagaagctgatcgccagcggctggcacaggaaaaagagaagcaactggcggccatttccggtactcaggctcaactggaaaataccgatctgacggcgctgaatgccaatggtcaattgcagcgtgaagccatcagggatgaagcccagtcgatcacacaagagttgatagcaaaaaccaaagggctggaagcgctgaatgattactctacgcatgatgggcaatccggtcagcagtggcgtgatcagtatgctgacggtttattaggcaacatccagactcagctcgacagtgcaaaagagacggcacaacagcagctggaacattcacagcaggcctcagcggagcatctgggagaagtgaaagacgccgttgccaaatctgaatcaggggctgataaaggtgagcaggatcgtcagcaatccatgcagaagattgacgatgcccgtgctgatattgaattcagggagcaggaggctattgctcatcagcagcaggctgagaaggcaggccgtgacggaaaatccgctgcccagaaggcggaacaacgtggtcagcatgccgtatctgcggcagagataaaaacagctcaggtacagtcagatgccaaagctgcaaaacttgatagcaacaaactaccgaaccgtgagaaagcggcgggaagcgggttgtcaggacagatccctgctgataccgatactaaaaagcaggctgaaaatcaggccgggaaaacgcactcctttattgatgctgaatctgctgttcaggcagaaaacgaatttgctccggaactgcaatatctggaagaagatctgggtgagctggataatgcaaaagcagcattggatcgtttgcaaattaatgcgggtatacgagccagaaagcagcatataaccccgaacgtagataatacaggaatagcgcagccgtctgtcagtaagccatcatccactgtcagcacggataaaacaccagccacgtctgtcagaagagagctatcaattaccggtctggatctcagtgggctgaatgcactgggagcaggcaaaagccagccggaacatactgatacgcaagaaaattccggtgcagcgctcagggcacagaaagtcgctaatatttatcagtggctggatagcgataataacctcgcaacggaaaattatattccggtgccgggtttcgagcgtgtggatgcagatattcccgatgcgctcagacaaaaaatggtgacgtttgttgaaggctacctgaatggcacggaaaacagcatcccgaaagaacagagaacctcgctggcaaaactgtttgttgatgccaccattgattataactgggataagcgggtcgaattcgtctcaaggctggaacattatggttatagttttgagcctgtgcatggcgataaaagcatagtctcgttctggtcaggcagaaatttcaaacagtaccgtaatattctcgatgctgcccagacggatggcaaaaaggttgtttacgatattgatgtaaaaggtaattcatttgccatcgaactcaacaaaaccctgatgcgttggggaggcatattccttgacccggatgttgctgagcagaatgcgctgaaatcagtgattaacgcatcggcacggagtaataccggtttctggagttctctgtacgcaaccggctcacgtgatgatgtttatgtcatcgcagaaggtggcctgcgtctgggtaactatttctggaatgttgaactgccggtattgcgccagttgcagcgtgaaggactggtcggggaaattcgtctgctggacaaagcagccaaagaatatcagggcgtattaccggaaaatatcgggcgcagactgacggatgccggtgtttctgtcaaagcacgttttgattcactcagctttgaagaacaggaaaggctgctggctcagaatcctacgggttataagccggataccctgattgatctggatatcaaaaccagtgccatcgacacattgctgaatcaggcactgccattctacgggttgcgtactgagcgtaatctgctggtgcgtgaatctgatgattacgatggttttgaaatccgcccgtggccgggcaggaacagtgatggctctgaaatcaccagcttcaaaaacattattgtggaagacacagataataccgaacagatcaaagcgatcgaacgttttattcttgccaactatgacaactaccaacaactgcctgatacgctgtatctggtagaagaccgcattgtttcccatgataacggtcgtacccgtattctggctgaaaaaacagacggtagttggcgctataaaccaaaaactgagctgatgtctgctgatgagttgcaggcagcggcatacgttaaaggtaagatccgtggtgacagttatcagcacgtgctggatgcactcgcagattatgagaacgagctgaaaaacagcagggattatgatctggaatccattgaaaaactttctggtctgcgccagcaggtggaaggctatcttctggggcaccctgattcagaacgtactccggcactgaaaaacctgctatcacaaattcaggtgcgcctgaatgaaacactggcgattgccgaatccgctgtagaaagcaccgcgaaaggcagtttcagtgatctgtacaacaaactgagcaatgccagcctgaaagaatccaagcatctttatattgatgagcaggggaatttcgttacccgtggaaaatccaatattcagactgtggtgaaaacggaatgggcggaaaaagcgattgaacaggttaaaacctcggttgctaaagagtatggtcagtcagtagcggaagcggttttctccaacctgcatccccgtgatttagcgaaagatggtaaaggacttgatgtctccggcctgaaaaaaatccacaaggccattgaacagcaattgtctccggtcagtgccacactgtttatctggaaacccagtgatcacagccgattgggacatgcagccctgcaaatcgggcacggtcgtatggaaattacggctgaaaatgccgccgagttcaatgaaaaacactatgtcagctggtggccgaaaggcggtaaatcaaccagtgtccgccgtatttttgatgtttccaccgcagagcatccggatgtaaaactgcgctggcgtgatctcagccagccggcgggacaaaatgacgcgctggagctggatgttgcttccgaggagaaagataacttcggcctgcacgatggctcacgtaagctggagcggtttattgaaaaattacaggtcgcaaaaggcgttgatgcaagatttgaggagatcagcgaaggttttgcgatggcagcccttgccaatcctaacctgctgaaatctgccggcgtgccggaacatatctcccgcccgttcatgcagcagtgggaagacggcagcatagatatgctggaagtgggtaaaaactttgctgaggcattacggacagcggcaaaacagcagacaccagagctgactgaaaaacgcgtggctaatgtgatccgccagtttgcagaacgtgaactgagcaatattcaggatttcaaggccagtgaaccggatcaggggcgtgttttccgcattaatctggcggggctggatgtggccgcaatgcaggctgaatggcataaaatcagccagaaccctgacgctcgttaccagctgttgaccggtaactgctcaagcattgttgccaaagtgctcaaagcgggcggtgcggatcaggttatcgggcataaatggcagcctcattttggcgtctggacaccaaccgagctgttcaattatgcgcaggctctacaggaatcacaggcagcacaggcagaaaatacggtcaggaagcaaaaccgtcgcatgggcgaggatctgacagatcaggatcagactgaaggtaacgacaagaaccagataccggaaatcgttgaaacgaaaagagtggaaaaggtggctattgagaatgatggcacaccaccacaggatcaggaaccgtttaacccggtgaaacgtttcctgaatcatgaacttttcggtgccaaagatgcccgtcgcaatatcaatgaagatacgcaaatcctgctggattatgcagtggaaagcggcacggcggaaaaagtcacgctaggtggagatgccggacgcctgacaggttattatcacgtatctgatcaaaggcaggctgaacaagggagtgatgcagccactagccagaatccatccagaaaagtggttcttttcattcatggttccggttcatcagcggaagaacagtcaggtgctattcagaatcattaccagaagcaaggtattgatttactggcagtgaacatgcgtggctatggttccagcgatggcagcccgaatgaaaaagggttgtatcaggatgcccgtacgatgttccattatctggttaatgatcgtggtatcaaaccagaaaatatcatcatacatggttattcaatggggggcgcggttgcggccgatcttgcccgttatgcagaacatcatggtcagccggtatccggtttattgctggacagaccgatgccaagcatgaccaaagcgataactgcccataaagtaccaaacccggcaggtatcactggtgtactggcaaaagcggtgaatggtcagttctcagttgagaaaaatctacagggtatttcgaaacagacaccaatcatgttgctgactgataacgaagggctgggtgacgcgggtgaaaaactccgtactaaactggtcgcagagggttatcaggtatcgggtgaacagactatctatgatcatacagccagcaaccggttaatgaaccagtatgctgaacagattgtatcaggtctgcttccggcaaaagattataacgatacagctatcagtgaggtgaaaaaaccgcttaaagataatacgccagaagctgttgaacgtgtggttaacaatcagcatgtcgaaacatgggagaaagttgcggttaaacctcatgctgaaggcggagaaagccgctttaacagtcagatcattattcagacagaaaacgatcctgttgctttgcaagccgctgtgagtctggcagggaaacaccctgataccagtgttattgtccagcttgatgccaacggtcagtatcgcgtggtttacggtgatcctgctcagctttccggtaaattacgctggcagatagtcgggcacgggcgtgatgaatcagcccagaacctgacccgtatgggaggatacagtgccgatgagctggcgttgaaactgaaacggttcagtgaaggcttcagacaggccggaacgcctgaacatatcagccttgttggttgttcactgattggtgatgacaagcgtaatggttttgcccgtcgctttatttcagcacttgacgctcagggactgcgtactacggtatcagcccgtagcagcgaagttgcggtagacagtaccggccgcaaacatacacgggatgctcaggaacagtgggttcacaagctggtggacaacaaaattgtgttgggctggaataataagggtgaactagagtcatattccgaacatattcgccgtggtatctccgaaagtgatattgcgctgtctcgagtggggcactccggtgctgaagccgaggcgaaaggagcaatcgctgaaaataccgagacattccatgcacccaaacagcgtaaaaaagagaatgacagtgctccgaatagcaatgccccgaatgatacggcttctgaccgtcatctgagttattccggcagtattgatggacaggttggtgatggtgaatttaccaccattaactggggaaccagcaatgtgaggttcaaggtgggtaacggtggtttcaaatcgctggctttcggtgataacaatgtgatgtttcacatcgggaacggagacagcaaacacagtgttgatatcgttggttatcaggcatttgaaggcgcacaactgtttgtgggtaaccgtaacatcagtttcaatctggggcgcagcaatgatctgattgtgatgctggaaaaatccattccgaccccgccattaattaatccatttgatggcgcagcacgtatttccggggtattgcagagtatttcatcacaaaactcgactggtttgtttagttcagcagactggctgacggcgcaggatcaacagtggacactggagggcgcgaagaaatacgtcagtgatttatccggtcttgatctgaccagtagtgtcaaatatgaaactctgacggaacttaacacagagaatgagcgcagcagtcgtgggctgaaaaatgatctcgaaaacacgctgaataagaaatacaaccagtggctggtaggagaaggtaataaacctgaactgagccaacttagtcgggcggataaattccgtcaggcgaatgagaaactggcctttaactttgccgttggcgggcagggtgcggatattcaggtgacaaccggtaactggaatttcatgttcggtgacaacattcagtcgatactggataccaatctgggttcagtgtttggcctgatgacgcaggaatataccgccacaggcatggcaaaaactacgtttacattcagcccgaccgatttgccgcgccagattaaaaataaactgctgggaaatctggccggtgtcagcgcgaataccacgctggcggatatttttggcgttgattacacaccggacggacgtattgtttcccgtagcggccagccagtggatggcgttgccatcatgcaggaaatgctggaaatcattggtgaattcagcggtgatcagctgaagtcatttactgatccgcaaaagttactcgacggcctgaaagcggggttgaacaccggtactgatggcattaactcctttgccgaaagtcacgggctgaaagcgaaagcccctgatgacacttcagaagataaaatatccctgaatgaaggagataaacctatagagcaaactgaaagtgagcagccggaacgcgcattcggatttaatgccctgaacctgccaaacctgtttgcgacgctgttcagtcaggataaacaggcagaaatgcaatcactggtgagtaatctgaaagaaaacctgacggcagacctgctgaacatgcaggataaaacgtttgatttcctgcgtaacagtgggcatctgcaaggtgatggtgatattcacatttccctcggtaactacaattttaactggggtggtgatggcaaggatctgggcgcgtatctgggcgaaaacaataacgtctggggtggccgtggtgatgatgtcttttactcggtaggaacctccaacatcttcgctggcggcgaaggtaatgacctcggggtgctgatggggcgtgaaaatatgatgtttgggggggcaggcaatgatgttgctgtgctggccggacacattaattacgcctatatgggagagggggatgatcaggtctttgcttttggcgaagatggcgtgattgaaggtggtaaaggacgtgactatatcgtggcttcaggtaattccaaccgtattgatgcgggtgaagatcaggattatgttgtcaccatcggtaatcacaatcaggtcttactgggcgcgggtgatgattttgcaaccgtattgggcaacgatacccggatagatggcatctcaggcaataatgctattaagctgatgggctatcacgcagtgattaacggtggggctggtaatgatcatctgattgcagatgtagtttctaaattcagccggtttaatggcggtgaaggtaataatctgctggtgttgggcggctatcagaaccacttcaaaggtggttctggaatcaatagttttgtcgtcagtggtgatgtgattgataacgtcgttgaagatatcaaactgggtgaccggattattttcaacaatatcaactggcagaacctgtggttccagcgcagcggctatgatcttgtattgctgactaatcgcaatatttgcgatacatcggaacaagggcaatttgaagcgttggggtctgtaactttcactgattactttaatggcaatcgtgcggatatcattacccggatggggaataaagatactcagggtgagtgcgagtataccgccctctcagccagtgcagtggatacattagtacaggctatgagtgggtttgcacctgatattggtgacagtgggtttattgattttctggatagccagacaaaatcaaccattattactgcctgggcagacaccacaagcgggaaatctaagttaacctgatgactggcagtattttattgttccggtgttttgcttatccaccagataacaccggcaattaatctcgctttaccagttagcaaaatccgccgtaaaccctcgatggggcgggaagcagcctcgtagatatatcgttatttaataaaaatggctcactaatgtgagccgttttttattaaccttacggaaagacttctttattcactgcttatccagaaggaaagcaccgaactcattattgtcaccgaccttgccaattattccgcttacaccggtagcctctttatcagtaaatccccatactatcttcttaccttggaaaaaagagaatttataatccgtagcagtaaaaggagtactaccgaaaaacatatgattaccccacgtacttttctgtgtttctgaagccaaattagctactgcactgccattatgctgaattgagccaccaaatgtaacatcgttagattgtttgttaacatctagcgtcatagttaaatcatggcgagtattgtctttagcttgctggaatactacaggaccattataagtgacgagaccatcacccttagggttcggcgccatccaggggcttgcaaggaatacatgcggatctttatgccctaatgttgcgttacgagctttgtttttaaataacttataagtgggcttatcggggtcttgtcctatagcgatagactcacccgttggaccaagttgaatataataatacttaccgggagcttgtgtgttttgtccccaatatttttgattttcggactgagcggtccctttcacataatcaccagaagcggcaaaccacacattattcccaacgtcgttacctaccagatcctcggccacattaggcggatctggttgataagctatataggtgttttcaggcgattgttttggcgttggagtaccaccatgctcaccattaccaccattaccaccattaccactaggatcaatccaagaaccatgggatccccctcctttagaacaggctgtaacagaaagaaccagagcgagagctaaaaatattttagactttgcgttcatataatgactccaatctgttttttaggaaaaactaaggagatactgttgagattaagtttaagttaaatattttttttttcaaattttaggaggatttaatttttcaaattaaaacaagcagatatcagcgatggaaaactttgttccatatttactgttggggttttcaccccgttcatacgatgataacgtataaccggagtatatattgatgacaatggttgtgcattttattaagtcagcgtgtttctatctaaacctctctgttcagttaaactattaaaaattactcctgaaatcaacaaaaatatctttttcattataggaataaagagaatgggtacttttattttttatataagaaaaagtgagggttgggtaaataccaaataaattaatattttcatttgagagtgaaagagaaatggaatcagtaacatcttttcttttgaattcatatatatacgaattccaagtagtaggatcattgaggttcatatccggaaatatcctaattgaagtattaccctggtaatttgttttcatctttcgatagcttaactctactaaataatcatctaaaaacagttttctgattagaagaccagcgcccttgtcatgatgactatcttctttagattttctgtctgttatgccatagctcccggataatgacatatataaatcattaaaaggtataaagattaatgagctgctaacgaaattaacgtctccgttaagttcttttctcttgctataataatcatttctgttttcataaaaaatagagtatttgaagttatcatttaaactcgataacttaaacaggtcaaatccaattgcgtcataataaggttttaaacttgcttctttagatgaaccaccaccaccataaaatgccttcatataaaaaggtttgaagtataaataatttgaataatcttcaaatccgaatttattacctatcctggcgttgaattgattaaatctttcttctttccgataattaattccataaacatcaatgtcaaattcagagaataagccagaatcaaagtaatatttttttctcatacttgggttgtaggaaaacccgacatcttttttccttatattgtcgtggagacccgtatatgttcttttatcagtaattcttgtgatatttgaatctattttgaaggagaaacccatatcaaatttaacttcttttcccttttcgatatgttttatataatcatttaaaattttcttttcctgttcattacgggttaatagtaataagtcgttgaaaactttttcggattcattgtatcgtttattgagtaagtaaagtatagccaaatcaaatttggcagttgggttatcatactttttgacaaattgttctagcttattgatagcctcctgatattctctttttttcatgagaattttcgcctcagcccaaaggatcaggtaggggtcttgactgtgcgatcttttgtaaagattaagtaatttttcaaggttatcattttgttcataaataaaagagacaattgcattttcaagtaatctgggttgccttaatatttcatcttccgtatatacatttgggttttttattacgccttgaggttttgtttcttcggctattacaacatgacttatagggataagcagagaggtaacagcagttataaggatggattttatttttttcatagagttttcattggcaatgatagcagttaaagggtaaccaaatgacctttgccttaattgtagttatgtacagcatctacaatgccgctaatactgtcattctccggttaatctaatccagaaaaaaggattgaccatcagagaaataactgctgaattacggccttatcctcccttcttttaaaataagctactacagagagaatcaaagaaatggatacgatgattttggatttcatataatgatcctagcctgcttaattaaaattaacgggatagttttaagcttaatttaaaattaatttttttcaaacaaagagtaaatctgaacaaaagtatatgtattttttcaataagagcggggacatcatagttctgatgtattcctggcagtaagaacagcgtacattttagttgccagcagagttcggtgatggaggtaatccgtgcagatggattaattgctctggatagctatccttttaaagaagcgagccttcaccggccagactacgttgtggcacttgttactacaccggatgcgccagacggaaactgcttgctcagtttatggggctatcattggtatcggtgagttatgggtgacaataaagatggcagaattcctttatcgtcgggatgcatacttcaatccattgttggttgtttgaaagcagattaaaaataatagaatgttttttattcttattgggtgaggttattcggactcactatagtggttaaacggactttatctctaccgtatgttgattttaaatctaaatttaagatattttcatttgaagtgataagttcaccattctttattctggttgttatcaattattgaattatacacttcgtctttcaggttgcctctttgttggttgcgttcgttcaccccggtcaccgtttttatagacatacggttatctatgctcctggggattactgagaggctcctgcctctcaccggaggccagcctttggctgggcaaattcgttcccgacgaatttgttactcccttgccgccgcgacgcatcttgaaatccattgtgtatagagcttatccgattaggctctgcgtaaattgatacaactaaatgtggttaattattaactgatattgaaacattttaaaacctatttaacggtatttagttgtatgtctgaaaaatttgttcaaaccatttccagcgtcaattataacaaaggcgtgttctccctctactttgtcgggccagagcctaataaaatggcaaatggtgtattagctgaaaacgatcaggaactggagttaaagcaggttattcatatgcctgcatctggttttatgtatatggtttctatggtgaagaatatgctggaagaccctcgcatggaagctgaaatcaataaattaatgactgcgggctttctcgctgttcctgctgaggttgcagggccttctgatacgacgactccttccaataccgaaagcaaataaatggctgtcgagtattttttcatcattttaatttaacctgttttattaacactgaaataaacatcaacgcccagttgctttttgtgattgggcgtttttgtctttaattctggcatttaatttagagattgaactatgggaaaaccgttctggcgaagtgttgaatacttttttacaggaaactacaccgctgatgatggtgataataatattgttgctatcggatttggcggccaaattcatgcgtatggtggtaatgatcatatcgcgttaggttcaattgctgcctcggtttataccggttcaggcaatgatactgtagtcggtggttcagcatacctgaaaatcagcgataccagcggtaacctgaatgtaacaggggcatccgggtatgcggaaatcgaaaaagaaggtgaaggtaatattgttttttccggggcagccggtggtgcggttatccagcataatggccgatccggtcatctgaactattcaggcgcgggtgcttacaatagccttaatcgtcatggtgaaaatggcaatatcacattttccggcgctggcggttataaccatttctactcagatgttacccacggcaatatccattttatgggagcgggtggctataaccagatcacgcggaaaggcacggatgataatttcggcggagaaggtatggcctatgcaaaagcagaagagatggttctgatgtcggcaacgctggcaggcaactggatccagaaccatcagaaagtcaccgccgttaaatcagcacgggaaaccaatacccacctctttgcacttgttgatggaaacgtaaccaaagtcaataagatccatctgagcaatgatccgcaaaccggcagactgaaatatttcacgacatcgtggttcaaggaaggtaatcaccttaataatctggcatcacatgatatctccgaacgtaacggtttccagattatcaaccttgataacgcctataccctgtctggcctgaaggctgaatatcatcaggcatttacgatacatgcgatggagaaagaactgccggaaaatgagtgggtaacttatgctgacggtgttcagatcgcggcagaaaatattacgctgtcagatgcccgaatggggggatatgccatttccaccgatggctcaacggttgatgtaaaaccggtaaaatccaatcggatggaaaatacttatctgtatgcccgtgtgttgggggaatataccaaggttgtggtcgttcaactgaaaaacgatcctgaaacagggaagctgaaatacatcgccacaccgtggtacaaagccggtgatcaaacggcagttatggctgatcaatttatcggccctaattacggttattcctctttgggtaaaggcagttatacgctgagtgatgtgcattacagcgtcaataccgtcagggtaacatccggaactattgctgatgtgagcagtgcccgtgaacaggcattattcacgtctgatataaaaaaaaatgacggcagcggtgatgtccggttcgaaggcgcgggagggggaaatgttattaaatccaatgtggcccgtggcaatgtttactttaaaggggccggtcttgcgaatgttattctgcacaactcggaaatgggtgataccgaattcaggggcgctggtgcggcaaatgttattttcaagaaaggcaaaaaaggccatctgaatttcaacggtggcggtatcgccaatgttattacccatatcagtacgtctcatcttacctccgattcatccccgtctgatttaccaaaaaccgatgacagccagagtcgggttatcgctttgggtggcgctaatgttctgacccgtaaaggtcatggccgggtcttttctgtgatgggagggggtgccaatgtactgactcatctcgggaatggcgaaacaaccggtgtcatgatgggcggtgccaatgttctgaccaaagtgggtgacggtgataccaccggcatcatgctgggactgggcaatgtcctgactcatgtgggtaacggcagaacactgggtacgatgggcgctgtcggtaacatctttaccaaagtgggtgacggcgaaactattgccgcgatgctcgctgtcggtaatatttttacctatatcggggacggtgaagtctgcgcaatgatggctggtggtggcaatgtctttaccaaagtgggtaacggcaatgcgctggcgctgatggtggcgctgggtaatgtgttcacccatgtgggggatggcctgagtgtcgctctgatggtggcgaaaggcaaccttgccaccaaagtagggagtggcgagagtcttgctgccatgattggtgtgggaaatgtaatgacccatattggcaacggtaatacctttgctgcgatggtgggggaagccaatattttcactaaagcgggtaatgaactgactgcggctgtgatgattggcaaggcgaacatttatacccatgtgggtcagggcaccagcctcgggttgtttgccggtaatgccaatatcatgaccaaggtcggggatggcacaacactggcagctatgtttggtcaggctaacgtgatgactcacgctggcagcgggctgaccggcgtactggcattaggtgaagccaatgtggtgacgaaagtcggacatgagtttatgggggttttagccgcggctaaatccaacgtgatcacccatgttggtcatggcgttaccgccggtgttttgctgggcaaggggaatatgctgactaaagtcggtaacggggcaacggtcggcctgcttgtttccaaattcggcaatattatgacccatgtcggggatggcaataccgtgggttttgccaaaggcacgctgaatctgatgaccaaaatgggagacggtctggcggtcaatgcagcctggggtgatgccaatatcatgacccatgtgggagccggggatcactataactttgccagagggaaagccaatctggtgaccaagatcggcgatggtcgtgcggttagtgttgtacaaggctcggctaacattttgactcatttaggccgtggtgatgattacaccggcgcgtggggtaaagcgaatgtgatcaccaaagtggggaatggccgtcaggtcacactggcgaaaggcgatgcgaatattgtcacgcacgtggggcagggcgacagctttaatgccctgtggagccaaagcaatgttgtcaccaaagtgggtgatgggatgcaggttaccgcggcaaagggtaaaagtaatatcacaaccagcgtggggaatggcctgagcgtggttgctgcccacggtgatttgaacgtaaataccaaagtgggtgatggcatctcggtcaatgtggcctggggtaagctcaatgtcagcaccaaagtgggtgacgggctgaatgtctcggtaatgaaaggcaccggcaatgccaacatccatgttggtgacgggatgaatatccacgcttcctatgcccgcaataacgtcgctattcagataggtaacggggatttttacaatctggcgctggcctccagcaatacggaaagccataaactggcgacactgttcggcaatatcaaacagacgttactgggagctatgggcagtcagggaattaactttctggtgcagggtgatgaagctcatacatcaggtagttaccgtgggcggggtgccatcaatttgccggaaataaacagtctgaaaggctttgaactgacggaaatcggtgaagtcagctccacgctttccgccgatctgcatgcctcggtgagccagctgaaaacaccggatgtcggcaggctggaatccatcatgaatggggaagagcaacccacgaaaaatcagaagcctaatctgattattaacggggatttcgaggccggtacacagggatggcaagccaccaacgggattgaagcccagcatccggcggcgtcttatgggctggatgacgcaggccacggtagtcatgtgactgaactggatgctcatgccaacaccaccatttatcaggatctccatcagcttaaagcgggagaagtcattacccttgattttgactttgcactgcgtgcaggcagcaccgatgataacggtatagaagtgctctggaacgatcaggttgttttctcagcttcggacgataggatcgcctggcggcataaacagctggtactcattgcacaggccggtagtaaccggctggcattcagcggcaccggcagaagtgatggccgaggttacattctggataatattgttgcatgctcaaatcgttctggaagtgtcaaagtgaagcagacaccacaaacctcagtagctggtgaggtgctggatgataaggaaaatgctgaagccgacagtgaacgactgatgcaggaaagagatcaacagctggcggccattgcggatactcagaatcagctggaagcaacggatcttgatgccctgaatacgaacggtctggcacagcgtgatgtcatcaggcaagaggagcaggctattactgatgatctactggcaaaagctaaggcgctggaaagtctcgataatctgccaaacaggcatcatcagggagattccggtacacaatggcgtcatgattatgcggcaggttgttggatgatctccagtcacaactggataaagcaaaaaatattgccgagcagcaactggagtcttcaaattcatctattctgcaacaccagaatcaaatcgatacggctctggaaaaatcagaagcgggtattgtcagaagtgaacagaatcaacggaatgcgcagcaggatattacagatgcccgcaaccgggcagaattccggtcgcaagaggcacagtcacagcagaaacgggctgcacaggctgcctctgatggatataacactgcccagcaggcagagcaggatgctgcaatcgaagcgaaaaacagcagccagaaaaccgcccgcagagaaaacaaggggagtggtttattcggcccggcttatgaaccaaatggtgcagaacatatcggcagccatattactcaggatatatctgtgcagggtgaggggcgtttcaggctggacctcccggagtcagacgatagtctggtgccattggctgatgcaaaacaggcgctggaccgtttacaaattaaagcaagcattatttccagaaagacaaatattgtgcctacccggcagccagatgagcagccccgcaatatcgctctgcctgatgaggttaatcgggaaattgatgcgtctgaaaccctgagcagggcattgcctgatatttcagctacggtgacagataagctggaagcactggggaatgagcgtttagtcggggattatggtttaccgcaaaacagactgactccgtcaaactctgcctcactatccacgattacggcaagggcacaaaaagtcgcggatatctatcgctggctggacagtgacactgagcgcctgatggatttttcagcggatgattatatccctgtaccgggaattgcccgtattgataccgagttttatgagagtaaccgacaaaagatgatcgattatatcgaaggtcatctcaacagtattaaacacactattccacgggctcaggtatcctcactggcaaaattatttgtggaatccaccattgattatgactgggataaacgtgtccgtttcatggctcagttagagcagtacggctaccattttgatccggctgacggtgaacagagcgtagtgacattgcgttcggggaataattcccagcaataccgtgaattactgaatgctgcccagcctaatggaaagaaagtcgtttatgacactgatttaccggggcatgcgttcagtaacacactgagtgaaagattgctggattgggcctcacattcgcttgaccctcatgatattcgtcaaaaagagcagcaatcggccattgaggcttctgtccgcagcaatatggggctttggagttcagtgtatgcaactaaagcccgcggggatgtttatgtgatagcagaaggtggcctattgttgggcagcaccttctggaaccttgaattgccggtactccgccagttgcagcgtgaagggatggtcggtgagatccgtttactggataaacccgcttctgaatataaacatctgccattgaaacagataggcagccgtctgaacgataatgatattggcatgaaagtacgtttcgatgccctgaatccggttgagcaacaaaaatatcgggagataaatgccgatcattatcagccggatacattagttgatttgaacgtcaggctgggtgctattgatagtatgctgaataaagcactgccgttttatcgtctgcgttctgaactgaatattcttattcgtgaaggggcagataatacttttgaagtgcattcatggccggaaaatcgccattctccgattaagatgattaaggtggaaaacccgaaagatccggcacagcttaaagtcattgaacaattcattctggctaattatgagagttatgatcagttccccaaagaactgcatttcatcgaaaataatatcgtttcttatgatcaacggcgtacgcggattttggctgaaaaaattaacggtcgctggagttaccgcccatctgctgaattgatgtcagccgatgaattgcaacaaaaggcttacataaaaggtaagcccatgggtgagagttaccgtaacgtcattgacgcgctgcaacgttatgagcaggcgctgatggaagaccgggattattcactggatgccatcgaaaaattaacctatctctgccagcaggttgaaggttacgtgcttgggcacgcggattcaaaacggactccggcgatgcaacaactattatcccaaatttatggacgcctttctgaatccatgactctggcggagccgacactgagaagttcaggtgaaggcagcttcagcgaactgtacaacaaactgtccaactctaagctcagtgattccaaacacctctatattgatacgcagggtgatttcgtcacgcagggcctttagagcacattg

SEQ ID NO: 105 - DNA, 23596 bp, Xenorhabdus sp.
gagccatgtgctctaaaggctcgaagcgtcagaggctgccattgttgagattaagcacgcgcaatctgagaccgacaaggcttttgcggaatccacctcgcaactgcgggctgagatccagtcgggtgataaagggctacaaggtgaaatcgacacgcaggctggcgagttagcattaatcagcagtgcattcactgcgcagcaaagcatttaccggggccaatattgtacgggcagaaactggcaattcccgcgatttgcggttcagttaatgacactttgatattacttcttacccatgcaatggcctgttctgcttctttaacgttgaggtcattacattgactctctgtcagtttcatcccttgccgaacgggaacaccctcaattcgggtcacgccccggcagattgtccagataccgcctgcatcccggtacgctgataaccggttgccttctttctcatccaagaactgagacagaatggctgtcgcacctgcgccggagataatcagacctatgaccgctgtcgtgagcttactcgtctttttcatgtttgctgaattcccgatgcttgtagtaccagttcacagcaaacgtgcctactgtgcagatgatgccgataataatcgcccagtcgttcaatgataacgcaccaagcatggcagtaaatgcgccccatccgtaggcagaggggctggtgtatttgtccatacgcctattccatcccattagcacaatgggcgtccgtggggtgaaataggttcgcccctgtgagaaatgtaataagttaataattaaggtatgctactgtatcagccgagtattaactgaccgaagtgatggctgagtagcttcggagtgagaattttaaatgtcttatcaatctattgatttagcagctttaatcgtaaaaattgaagcgcttgaatcagcgttgtctattacactggctagcttggatacagctatcccatcagttaaaaatgatgtgatagtcaatcttcaacaatttgccgagcagcaccaaaatccaacggtaaagcaagtctatactgaattagccaacagtattaataagctaaacgtgaccataaaataattgtcttaagatttactaattattgcgtgtctaattacagctgaatctgctcttagagcgtcaatatcacagctcactgacttttgaatatcagagagctgtttttccaactcaacaacctttctttccagttcttcaatacgcttttccatcattttcctcactagtgagttatttgcatcatatggttagcaaattctaacgactgactcttagcccactccgttgctctgaattcaaattctgaaaatgtcgatttttcattgtattgctcaacataaaagagttttacgtgcgggattttattagaaggcatttcatcgttttcttgcggataaacatacacatcagcttctagcactgcgactcgctcagacgagaaagacaatatattttgctgtgttatgccttcattcttcttaaatttcgtcctcgaattcatcttaggaaaagccacatcaatcttcatcattttcctcgctagtgagttaatagggtgccagccgcaataggagatactgaggttctgtgagtgattgcggtggcaaattcggttgacattgcatacatcaaatgtatactgtatctatacaatatacggcgttacacaatgatcaaaagttttaaacataaagggttagaaaaattctttaaaacaggctctacagcgggcattcaaacaaatcacgctgtaaaactgaatattcaattgaccgcgttaaatgccgccaaaaaacccgatgacatgaacgcacccggctggaaattacatccattaaaaggcgctgatttaaaaggccactgggccatttctgtcaacggaaactggcggatgacatttcgctttgaaggcgaagatgccattttggttaattatcaagattatcactgaggaataacaccatgaacagaatgcataaccccgcccatcccggccttgttttgcgcgaatatttaggcgacatttctgttacagaagcagcaaaagcactgggagtaacccgtgtagcgttatcccgtattttaaatggcaacacaggcatatcagcagatatggcactccgtttagaagccgcattgggaaccagtgccgaaatgtggacgaatatgcaatcccaatatgagttgtggcaggcttcccaacaacagcgtcctgaaatcaggccgatatacaactgcactccagaacaactcattccataatccagcggccccgctcaggggtcgttcactttggctgaaatacaaaaaggctgcgcattgcgtagccttaaattcagtgtgtagattcagataaatctatatccaaccacaatagaaacgaagtgtgttacctacgttttgttgtaaaataacacctaatttttgtgcatcatcattgtcatacgcattgtcaatttcatattcatattttgaatcaatggtcaaacttaaacttttaccaagattataagtcaccccattaactgttatataaagttctttagtcaggaagaaacctaataattctgcaaatttttcttgattagcattaggattagcgatccaaagaatcacattcttattgctgccgctgactgtatgccaataaaatgacgatgttactacaatatcggtcttattttggataacgttcaaatcaccgaacgatttcgaccactcatgctcatcccactcatacccagcttttacatatccccaagctgtatgcccttctgagcctgctaatgttgctttagcagttgctatagtcatatcgaaagataataagcaatctatccaatcacaagctagcatatcttcctgtgttggttgccaatgggctggattatttggtgtatacttctcaatgtaaggatcattatcaggcacacctgcaaggcgtacatactcggaaggaaaattccaattactgcgatacattttcttccctaagtagacttgaatcatagcccatggatatgaaccgataggtgcaactgtatcatttgaaatcgcaaccttatatttgtcaggatcaaacggacattgtttatcatccagcttattaacatcagacataaacacctcactttattattcgttaaaggtcatttcatcctactgctaactagccagttaatattactgaggccggatttttatctcaattgaataacctgtaacaaaatcaatacgccttaaagtagggcagctcattataaaatctgtctgttaatcgagtgcgtgattcagtgagttgtaaactcaaagtttactactgacagaaaatatttcgtttatctcttgctcggtttgcttaaaccgttcctcttccagttccacacccaacacacggcgattcaatttcaaagccgctttcagtgtcgccccggaacccataaagaaatcagcgaccagatccccttcccgactactggactgaataatatgcgtcatcaaatcagcaggcttttcacagggatgcttgcccggataatactgtacaggcgcaaactgccagacatcggtataaggcacatcagccgtgaccgtgaacgaacggcgcattaaaccgtattcctgccgtaattcgtcatactgacgcgacagggtaagatgagattcaaccaattcagggtatggcttattcagttcgccacgctggtgcttttctttagcgatacggtcaaacaacacctgcagtttttgatagtccccttcattgggtaactgccactggctgtcgctgaaccaatgactcgccatctgttttccggtggcagcgtgaatttcttttgccgtgacgcctaacgctttccgggcatcacgaaaataatcgattagcggcttaaataccgactgtttcagctcccggcattggcgggaatagccatcgcctttcgggtgataggggccttgataatgttcggcaaaaataatacgttccgtggccggaaaatacatccgcaggctttctttattctgcctgcgccacgggccagacggtttcgcccagataatatggttcaacacattaaagcgttcacgcacgagcagctcggtatcccagccgctaatgaatggaactggattaagtcagcgcctgttatcaaaacgaagaagccagtaagtaagcgcataagatggctgacaaaagatgaagcggcaaggctcattgagtgtatgcctgaaagtatcaagccgattgttatctttgcgttagcaacaggacttcggcgttctaacatcatcgatctggagtggcagcaggtcgatatgcaaagaaaagtggcatggataaatccagagaacgccaaagccgggaaagcgataggtgtagctctgaatgataccgcatgccgggtgttacgggatcagataggcaagcactcaaggtgggtctttgtgcataccaaagccaagcaccgaccagacggaacattaaccccagcagtgagaaaaatgagggttgatgataatagtgcctggaatattggccttaaaaaagcaggaatagaagacttccgttttcatgacctacgccacacttgggcaagctggttgatacaatcaggggttcccctttcagcacttcaagaaatggggggatgggaatctatcgaaatggttagaagatatgcacatttagcacccaaccatttaagtgaacatgcttgcaaaattgatgtgctttttgaagataacgacacaaatacgacacaagggaaaaatcaagcgggtctgagattggcgtaacatattgattttaaagccctacaggattcgataaaatcatttattacattgtttttaaatgattttatttagttcaattttctaccataccccctataatacccccatattattttgcctctgtctgtcagatttctttctggttggctcaagtgaaagtaggccttgcattgcaaaaatatcatcaataaaatacatattgctaaaaatgaaataataactccaaaagaagcctacacatctcgatacctcatatgaccatgctactactaaaactggtttaaatgatgttccaaagcctaaaaattatttacacatctcataaactacataaaccatgataaaatcattagaaaaaatgatttactgtgatttattatatgcagtacatctacattaagctaatctaacacagaaggatttaaaatgtatgacactatttttgatttcaaaaactacccaatagtatttattgggtctgggatgtctaaaagatatttggaaaactctccaacatggcaagatttattggaagagtattggaacaaaattgataataacaatgtcaacttttataattaattatcagaaataaaagacaattatatagaagaaaacgatgagttagatttagatcacaaggtatattctgatgcagcaaataatattgaaaaagaatataataaattatttaaagcaggtaagatttcattagaaggattgacaccaaaaagagtttttgatgagggtatatcaccatttaaatattccttatgccagagattcaaccaaaatgaattaaagtcaaatattgataaagaggaatttgaatcatttaaaaaattcttaaaaaatgcaaagatgatcataacaacaaattacgactcatttattgaaacacttttatccgaacaaaatgttgaacctaaagtgtatattggtaatgaaggattttttgatgacactattggatggagtgaattatataagatacacggggatataggatcacctaaatcaatagtaattaatagttcagattacgaaaaatatgataatgaatcatccattctaatcagtgccaaaatattatcaagcatgataaaaagttcaataatttttattggatactcactaacagatagaaatgtaaaaaaattactagctgattcttcttcacagctaccaaaagaagataaaagaaagtctgcggaaagaattattttcattgaattcaaagagaatgaaatgaatactttcaaaacacatagaacagatgataaatcacaaataacatatacatccatagagacagataattataaaaaaatatatgatgaaataagtaaaatagatgaaggattacctccatatgatgttcttaggtatcagaaagctataaaaaagcttattttagatgagggggaaaaaggaaatttaggtagcgtattggttacaccttctactttggatgaattagataagaatcctaatcttagtaagaatttagttgtcgccttaggggacaaacaatttgtttacattagggtaaaagaaattcaatacttggaagattatatttttgaaaaaaatggaataccaaataatgcagctattgattttatcactggcttagcttcaaacaaaaggattcctttttctaaattaatacagaaatgtgactttcatagcattggattatcaaaaaatgaaataaataaaatagaaacaagaataaaagaacatggaaatattggcgacataattaaaacaatcgaactggataaattatactcagaaaagaaattcaactccattgaatctattaaaaaagaagaaataacgaagtataaagaattatctataataattaaaaatataatatacatagataaatttgagctaaaaaaatacattcaagaagaagcattttcattatttaaagaaactgaaaatagttctttaaaatcacaattaagaaaattatttttggcatttgacttactaatgaatggtaatttaacttaaattagcttcattaaaataaaaaagaaaacaaaaaatcactagtgtttggttatttgaaaggttaagaatataggtggggtgacaaccccactatgatatacttatctaatctagttgtgaaactttgcgaaccttgcgttcaataagctggccgtaactatcaaaataacggctcggccaaatttctgagggatgtataccaagataattcgcaattatccattcacctttcggccatggtctgctgaaagcatttgccagtgtcgatgaactgagtcccgcttcacgagaaacagccgctaaggttgtaccacgtttacgcaatgcagcaattatatcggcttggtgccagtcatttctaatgttgttattcattcctgttaccccttccattaattaatattgatggtggcgattcagacagggttcgcggaccgggtaactatgaccggcaaggccgaagccttccctgcctgaaccaccattgaaagggtgatagcagacgcactggtagaaacttcctaccagtgtatagttacacaaggccgcgacgccttgaccatcagattttgccaatggcaggaatactttaactgattgttttacctgatacaataaccgaaccactaagtttaacaactataaacccgctcaacataacgcccacgaccatcaccatgccccagatccattgaaaccaatgctcgtgcttcttgacggctaaaaccattttgttgataaaaattaagggcatcctgtgcccacgcatagcgcaaactgtggggagaatggcaaccggttaaaccaatccttgtggtatatgtccgccagtagttcatggcctgtttgagatcaggcttatcaatcagtttgccgccacgttgttctgcaaaagcaattgcttgctcgacggcttcttttactgctgcaacatccaatacacgagtttgtcttggtcggccgccttttgtaccgaagacaacatgcagtttcggctcggatttctccaactgtttacgccagcttttcaatgaagcactgcattgtaccgcttcctgagaacgtaatcccatcaaacgggcaagtttcagtgcgatggcaaatccggcatcacgttcaagcgccttctgataaaccatctgaaacgtagcatcagggatcgcctgcttcgttccggcgcggttggttccatttaaccccaatgcctgattgctcaaacgaggtgaagtttccagtttctccctgcctgccatgcggaaaatattgcgtagcgcagccatttcattttgcactgttcgtttggcaattccctgagataaacgggcatcaacgtaatgttccacatgtttagctttcaaatggctgagacttttcacctgaatattcaggctcaataacagcgcccccaaacgcccggcgatccgaatacggtcgtgacaggtcttatgactacctccacctttccgagcaaaaaattttaattccttaatcaatcgactcatctcattttccctattgatacctaacgatatgcgatctctggcgcgcgtcagtgcggcaaaacaaaaagtatctgccttgcccttgacggatatctgtgcgccagagtgaacgcaggttgaggtattgcggggtatcggttgagtacgcggtactgccgcctgtataaacaggtcatccccaccggcaaaaaagccagcctcgatatcgtcaagttctcctttttcaatctaaaaatgcactgtcagattcactgcggggtgaagcaggcctgagcctgtaagagttgtagtgctctttggcggcggcgtcactttcagcgataaaccagccaaaagtgacgccttaaattcagcaaatagtcagcaaaagtcgtgcgggcgttgaaatgccgataggcacagcaaaacggtgcaaggctcgatgtcaaacggtagcgatgagttaattgtttgtgtgtagaaaatctgtccgctgaatcattcaagcagagacagtaagaatatgaaccagatgcgtgaaatccacgcggtgtttatgacatgaaatgggatcaaaacacgctcataaggccaaagccaaacggaggcagagtctgatgttgatatgaaaaataagtgcatgacccaacgttcaatacacttgggtgacaagataaaaacacccttttgaggtcttttttagtttaagggactttcatcgtcaaacaaggggtttatgtttgatgatatctgcttccaaaagtgcgcagatgtaccgcaattttgctctccctttcaggctacgggagtttttatagtcgctaaaaagcgcctttaaccgatctagactaactgatttttttagttatagcaatgaagattgattattttatcaactattattactatagatttcagtcaccgaaaggaaaaataaagaaaggatcacatttttttgagttacaacctagataaataatatccttcttcttttcaagaatggttataccccaccatttatatggaaattccatatttttccatttatgccaactcttccttacatattacatagtgcataatcaaattcacggtataggttatgctcatacttattactcattttaaacatttcatttttttacatgctctataattttcatgtcattactttggtataatttaaaccacaagtaattaatttattatattttttcgcttatggagtgaaaataattaaatatcataaagataaattctgttatatgcatttttatttttcaatgcatcttattatgttgtttttaatataattagcttggtgaggatgttatttaaaatatctccgttaagaaatgcatttacttaattatcatttggttaaccaagtcaaaaaacaactggttaaccctaaaaattaattatctagctataacaactttaccatttataattgacaggtaaggactgtaagtcgcagtattaccggtaattttattatcaaacaatataggtgatcggccatgagcaccaacctccaagcgaaatagacgaccattattataactaactaatttgaattttttccattcaggcgttgttctaactgtatatttatcactatcgattttatcttcaaatctcatcgaatggaaaaaaaatttaccattgttgttatcagcaatagcccattcttcccacgctggtttacttatattccagattctatcgagttctttttgagcaaataagttaattatgtcttgataaaaagattttatcattggcaaatctttttctgtgactggccgggcttttgtccacatccactctggtaatccactaattgaataattttttttagcagaaaataaaccctcttctgctggtattttagacattccagtaaaatcaaagccagcttctttattaggggtatttttgagtgattcttcagttacggggttaccgtctttatcaaccattaatttgatacgactaataacttcatcgtttttatcataagccgacactttttttaatgttacttcacatcgagattcaggttttaggtcttcttcaaacgatcgacttccaaatagtaactctatcgaattggagccattctctaaaaaagcagttgagtttattccactggattgagtcccatttggagagtctaaattatccatagctgtcatgccgttaatgcgtactacacagaggctttgatgtgtatttaatgacagcaaatatttatattccatatttgattttcctgatgcagagttactaagtaacatataagaacaaaataagagactaccccaaagaaatccgataggacgatttatctttagaaaggggtttttgaaatacccattcacgcgctgttcctccttttttctctatatttgcagttgttttaattttatcatcttcaatcgactcttcttttgctataccaaaagcaaaactcaaatctaccattgctttaattccatcatgataaaacaccaaatcaagacttttgggttttgactccagtgcagctagtagttttgcctctgctttagcggtcgcatctacatatccatagatagcataatagcttacaccaccacgaatattagtgtcagctttaatagaaaatccagtttctaatatattatcttttttgaatgaccagtctcccttatcatcagattcccagccaaatttaacattcaactctcctgttaaaacgagatccaactgcgcaccgacaaatgccccattttcaccttttttaactttttcttcgtaaacttgtcctgcttcacgaagtgcagaaagtgctctttctgctttaaaataagcagctactatttgaagaacatcagcgcgtaactccaagccaattaaaggtgctgctgctatatctgcactaaatttggaatagaattgaaagtcattattgtgagaaagttcatattcaccatgaagcttaattgaaggatatataagatccacttttaagatcttgaacttgtcactatcatgccctactgataaaacattcgttattttaccaatactttgcacacatgcttctattggtcctatctcgtttttattcttcttaaattctttttgcaaggtatgcgcccatgtacgactagctgcacccttttgaatttttattgtcccctctacagataatgtattttttacttgataacgagttgtatcttgagtccagccacggtgtcttctgtgctctagtccccgttttctattagtttgaatttgttgccttcttctttgttgatcagtgaattcttcaacgtcttttttagctttaaaaaccagatcgaactcctgtttttctttagtcactaaataaatattcgaactgaggacagttttttcgcctaatatcatgaatagtattttttctattccagaatattctttttttattaatggcttgcctgaacattcatcgactctgatggcataatgctgtttttcgatattggtatgaaaatccttttttagaaaacgtcccaaaacagaaaatggctctttttcaatttctaaaaaatctttactagatttgtggtaaaccagttttcctttataaggttttttaggcgaaaattgagcgaagggcagatttttttcatcaaatacgttaccaattggacaatcttggttatgtgagatacaacctttactgatcgaacttaactcaacagctacatttggtttttcttccttaggtaactcattagcatgcttgaaggttgtcaatggtgaatcaagtacatagaaaaaatgcctttgaatccaagactgtttataactaatagttttatcacccaattttatatcaattttatgtgtgcaatcgtcggggttatcacaaccacatattgctgaacctgcctttgttgacgtcattttttatctccttaaccaatattcacactgccaccggcaatcacgacaccgccacaatccaccggatctcccgttctggcatcaggttttccctcaataaatacggagcaggaacctccggctattgcccgtgaatgtgacaaatgagaagccattgcatcaccttgccgtgcgagatagacaccatcaactttaacggtactggcaccttcaataaccggggttgcaggacaattaccgtgctttgtaccaatatcacccactttaactgcattacccatcttgttgttccctgttttggttaaagaggcacctgacccatttcttgaattaatacactttccgcccgcatatgccccggctggctgtattcagttaattgggcatatagagctgcgggcaaatcatcgatggtgagataatgtcggatgatgaaaagctggagcagcccacgaacattacggtcgtccgtaataccgttttgaccgaaccagtcaaaaaacttccgggcgcattccaccgtgtcgatatgagggataaaatcaaaatcagctttttccagccattcaggaataaatccggctaatttttcaatataccgttctgtaaaaatggcttgtatcttttctagctgaatttctgtgatagcgagcattttgcgcttgctggttgcaccaacaggaaaaggctctctgattttcacaaagttatccgtgcgctcttcttcgaggtacagtgttgttatccgtgtgatcggccctaaaaaacaatgcagctcccagtcactcaatacaccgagaaaatcccagatattacgtggatcataaaaacggaaaaagaccggtttttcctgttggggaagcagaacttgcaggtattttcgtaaatgctgccgcacggttttcatgtccgctgcactgtggacgaaaataccccacggggttctgcgacactccagccagattttaacctcttccgtgacctgtaccagataaggggcgatttccaccagttctggctggagaggctcaccataaagacaggcggaaggtgggtcataacgttccagcatcaaaaacagatcagattccgccgcaccatcaataagggcgtagagtttttcctgactcattcgggcttctccttctctttcattgggcagtgggcgacaaacatggagccttcgcttgctgcggccagcaggatggcggggttagctggtgccagtaaatcgccggggctgccaccggagttcaggttaatcgccgcgcctttaatatcaatcccgcccgcgtgaagcacaacaaaatttccaccgacatttaatgtgattttgctgccactttgcagggtgagatcgccctgtgcatccacactgactaccccctgaattttttcagccagatcgccttttaactgtaacgaacgggcaccggcaatctgctcaatataattgcccgtggttttatgatcctgttgaccttctatcggtcaccttgcggttattggctatcaccagttcatcgtcatgaccaatgctggttgtgcggtcatagttaatgcgttccccgcgtgaattacgcacctgaatggcgaggtttttctgagcatgaataaagacttcttcgcgatctttttcatcttcaaagcgcagttcattaaatccttcacctttatgggttttcgagcggatagacatctgggtttttgccatcggcaggcggtttgggggaatattattggcgtgataagcccgtccgacaataatcggctgatcggggtcaccgtgaacaaaatccaccaaaacttcgtgtccaatacgtggaatggcaatcatacccattaattgccctgcccacgcctgactgacccgtacccagcaagaactgcggtcattaaattcaccgtatctgtcccagtcaaactgaatacgaacgcgcccgtgttcgtcacagaaaatttcttcgccctccggcccaacaaccgtggcaatatgtggttcttccatttggggttttgggtagggggaaggccgataagaattttttcgggtggtaaaggtaaattgattagacagccatgtaccgctaccacctgactgggtttcatcggcttgtggctgttgacctgaatgggttatctgaattaactgccattggtcgttaaaaacctctctggggtgatccatcaggttaaataactgccccggccacatggcaaaacagtcaccctgaccgttaccaagctgagtgtcccggcgcaggtattccagacgatattggcttgcctgttgtcccagatcgtcatctttatagcggctgggaaaatcataataatggtagctgttcagtattcgctgattatcaagattgcgcccttcataccagaattctcggttccagcgtggattcttaaacgttctgtctttagttgtaatattggccacaccaacgcgctctgaccagctaaattggcggatacaggttgtttctcccgttacatcggtttccgggcggtaggggacggtaatcacctgattaagagacaggcaggagtcgtgaaacacaatgcgttgctcgtgctgatcctgatcgaaagtgaaatagtaaaaaatgccctcatcagccagtaagcgctggataaatgccagatcgctttcatcgtactgaacacagaattcccttggtggatgtttgtaaccaagcgcaaagaaaaagtttcgtaccccattttctctgagcaggctttccacaatatccacaacggactgattttggaaaatccggctattgacccgtaatgatgcacgccataaaggaggttgaagggtgatatggtagtggctttgatggcgcccggttgattgcagtgaaaaatgtgtcaccatgcccgtgacttgccgttcaattcgcccgttacggtgtacagcaaaagcggcgctgctatccaaaacatcagcgaagttaatgtcagcagtctgacaagtcagtgtcgcttccagccgaaaaggagttgatagcgcttcattcagagaaaaatcgacaacagcgaaagtttgttctggtaaattttccgtaatcagtgtgaatattaaacctgagcgatcaagtagttgattgattttatctattaccctgctcattttggctctccgtaatcttttggtgtatcaatccttatttactgcctgaatggtaaaaataatttcacaataaaactattgttgcatgcttttagtacaatatgggcagaatataatagaattgtttttacatacaaccatgaataaaagttcagcagggaaattgtgattaacttctcctcttaaataaaatcagttaattacatcattcaaatttcacgtaacacaatagattaaaattgcactgacgcgctacgcttgtcttctctgatttgtccggctaatacattaaccagacaaaccagagactttgaaaaacactatgcctgccagaaaaaacattttcacagcctaccctattaaagaattaggaataaaactgttcaccctattcacctttgatgattttcatttaaattcatattgttaaatgatgatgagttgaaatcaaactcatcaccactcttcaccaaccattcaccttcaaatcaggaaaaggtgaatagtgatgaagacttgtgaacagtttaaaaataactattcatcctataatatattgatatatatgtttaaattataaggtaaacagtggtgaacacttttttatatttctttgaaaaatatctgtaataaagaaaaaattattcttctagctggtcattccttgtcagttttggcatccactcaatggcggtatcgatattcaggctcagattactgcgaatgccatatttgcttttcttacgcaggtaatgctgcccatactctgccagtgcgcccggcatatccataccaaagcgggttacggaaacgggtttattcagattgttgcctttcatataagcaaggtaggcatgataaaggtacttacggggattgaatggcacaatttccgcattaccgattaacaggccgtcagtttcattagatgcaatcaggtagccgcaaaaatcgactaatggatctgtaccgcgtttgatatccagcgcttcatctgatttctgttgctcagccagtaaacgcctcgcaacctgtggatcagcgaatcgatataacagatgccggataatcacaggcaactctgttgcgattttatctcgcaataatgggtcacgttcattttccggcacaacttcggaaaagttgaaaataacccgacgccgtgatacgccaccactgcgatcactgaaactcatagcattattgtttaccgccaagaccaccgcaggaatgcgggttgaataaggttgtttatgcttcgggtcgatagcgacttcatccccgcctgtaatggctttgatgccggagccatctcccacatagcgagtttgatctggcaggataatcaacgaatatcccacaatcagcgcccgttcccgcgggttttccagcgcggccatactcgcagaaacagtgttgcctttgcctgccagcattgaacagatttcagcaaagatgcttttgccactgcctccggcaccggtgatttccagaaacaactgccagtcgtaacggttcgccagcaccataaacagcgctgccagtacccgatcaaatttgttctcacagttggctgttgcccggttaagccagcgccagaactgcggtgcatgatttttcagagtctcccccgaaacaggaggattaaacgcaacatcattggcaagcagtaaccagtcacttttacgatgaggtcggaactggcaggctttcaggtcaaacacgccgttgctgaacccaattaagtgacgttctggtagctgcatcatgggaagctgcaatttcagggcatctacggcagaactgataccatgcggtgaatacggcagtttctcttccatgaaagcagccaccatttcccgttttaaatcgcggtcactaaccggacgccagacaatgccgtcatagtgatgaacagtttccgaagccccatccagtgctaaatccccgtcataacgtgccagtaatacttctccgcgctggctggctcccatttggcataatgtcagcttggaagattcggtatcattgggctgagtggttgcttttttctttgttggtacgggttgataaagcccctgagaaaaggccagctttgccctttccacatcatgttgttggcggtaatcgtcccagtcggctgtatactctgtcggtggtaacgtgacccaacccttaaccgcaagagctgctttttctgctgaaatcttgccgatatttactttgagtttgccgtgcttatccagttcgtcgggatgatgccagtcattatctgctgccaaaataatttttgtgtctgaccaacgttcccgaatcgctttagcgacagaatacaaattacctgcatctaatgctgccagaacagtacctttatagagcaagttagctgtgagcgctgtggcgtaaccttcggtaatgagcactgtatcgggatgatcttccagttctgagacagaaataaatgcaccttttttctggctgccagacagtaattttttctctccattgggtgtgataatctgcgcacctgttacttttttatccagtgttgtcagtgccaacaaagtcgaattattgagcaatagccgctgattaggaaaatccagcccttttgcagccagatagggcgattgaccagcgacagtttgtgccattagtgatgccacttttccggcaattgactgcgtagtttgaatggtttctctggcgggcttgggttctggcaaaggcaatgccagtacgcctgcaatgatttttgctgcctcagtgatggaaattcctttggtttttgccactaaatccagtccatcaccatagtttggataatcacattggcggcaatgccagttgccatgatggtgatcatcaataaagtgaaagcggtcggtgccaccgcaaacaggacaagcaccatgttttccctttacagggatatcgatgccacaggcaggcaataagttttcccaatgatacatagcggattttttcacggtctggatcaggtcaagcagtttttggttgccggtgatatctgaagatgtaaatttagggcgagtttggttagactgtgtatcagccatatcgtaagtctcctttacgttgtggtcagacgcctcagatgtgttcgcgcactctggggcgttgtttttatattacgtttctatgtcatgttcttttctatgttatgccgctcgtgattccgcgatccgctgcgcaatccagttatcaatttctgattcaacaaaggcgatggagcgggagccgagtttgacttgtttcgggaattctccggcactaatcagtttatagatccacgctttgctataacccgttctgcgttgaacttccggcaaacgaataaggttttccttcgacactatcattgtcatattttttctcctgttaccgagtccttgagcgctcatcgtggacgttgtttgatgacaggcggattatttaaaaagcaagactaaatgaacagcgttaattgtttttacgatttgttgaatttattttttataggaaattcgacttgttatttgtatgttgtatgaaaaacaggcgcgtgtgccacgagcacaacagcatgaaaaataaccacatctttacgcccttttgccaaattttccgatcagcacattttcgcctcgttccagcatctccatatgatccgcataccattgcagcatttcccgacgaccatccagatactgagcgtggttgtaagtaccccgaatgctgttcttgtcaacatgagcaagctgggtttcaatccaagctgtgttatagccttgctcgtgcaggatggtactcatggtatggcgaaagccgtggcctgttgcccgtccatcataaccaattcgcttaataacctgattgatagcggcttcactcatcggcttacccgcatcgttacgaccggggaaaacgtatttcccgcgccctgtaatttcatgcagtttaataaggatggttttaacctgatttgacagtgggacaatatgagggcgacgcattttcattcgttcggcagggatttgccagagatcgttatcgaaatcgaattcagtccattccgattctctcagctcaatggtgcgtactccggtcagcatcagcatacgtgttgctgattgagtaaccggacttccactataaccactcagggcgataagaaaatcatgcagttggtcggctaaaaggtgtgggaagtgtttttgcttgggcgctttgagtgcactggcaagatcggtaacgggattgaattcagcccgtccggtaataaccgcataggtgaagatttgccgacaggcctgtctggttttcttcagtttatccaaaacaccgcgttgctccatttttcgcagcacagctagcatttcagcaggtttaatctcggtaacagcacgtttaccaatatacgggaagatgtcttttttcagatattccagaatatcttcggcatacccttgtgaccagtttgggcgtttatattcatgccactcaatagcgatggactcaaaactattgctgaccgcaaatactttggctgccttttctgctctcttttcttctatcggatcattaccatccgatagcgtccgccgcgcatcatttctcttggttcgagcttcggcaagggagatttcaggatatacccctaatgcgagcaatttttccttgcctgcaatccggtactttaaccgccaatagcgagagccattagggttaaccaatagatagagtccgccaccatcggcaagtttgtagggtttttctttcggctttgcagtgtccacctgtcgggctgttaacttcataggggggtatctcacttcattgaacctgaacgtacccctaaatatacccctataagatcgtagatttcaacataccttactagactataggagaacggaaaaaggctaacactgcgtatttactggggttttgtagacttcggaagacgttacgatatgaatggatggtacgccatacaggattcgaacctgtgacctacggcttagaagagagtaagcccatcttttaaatcaacgaattaccgcatttatctgtgctcacacgtcccaccttaccgaaagttacccgtagttacgtgcggttgcctttcgatacctgtcccaaatccgtcccacttaatttgataacggtgtctagccctgatatacgttgacactgattaacgcctgataatggtcgtgacttaaaaaaaacaacaaaattacaaaagcctatcagtaaggcgtgtcaataaatccatcttttcatgaaaaattgccacgattaatgccggagcactttctcgtggcaaacaaaacacataatgatattcacaacgtgccatgcgcaatgccgggtagagttcgctcatgtccttgaaagatccatttccgcaagcgagacgctcaataccttgcttaaggttagtgatgtagcggcgcgtctgtgcattaccccattgtttacgtgtgtaacgaataattgagcgtaaatcagcttctgcagcttccgtcagtatataatccattaatcgcgtccgttctcagcaagttcttcattaaggatttcatcaacgcttttcccagataacttgccttctgtcccctcattgattcgtgtattcaacaaggcttttaattcttgccatgcctgatcatcattagtcgtgtcagggaacaaacgttcaagcgtatattgcttgattgtcttaccttgcaaggcagccaatgctttcaaacttttgtgttgctgatcggttatatcgatagttaagcgactcataattaattcctcataggtttcccacaaacccacattagcacatatgatgttttgtggctatttattaaacgcctgttcaataccgtcttgtccaacagccgaaattttcgggtgccgatatcacgagcagggatggggaattcccacaaagaaatgccgctatctatgcacaattaatattgtgttaaatgtagaaaatattaatcagtttattttcgtttggaaattatttcactttctgtttatttgaatgactggcatttatctatttaatgtcaatcaatcattttttattgctcctttttaaaacagaaaatataaaactaatttctcaataaattttttgatctatttcacgaaatagaaatgatcatgccttggcaaatatattattaatttttttatttttccatatgacaggttaaaaccaccgtctttagacggtgactttgactttaatgttttgacctacgcgcgtttacgaggtgcgtggttcgacgactttcagtcgtcagcaccgaagtgcgctaacccacctacttcagtaggtggtagttaagttttatctcatgacgttacgaaaaacctatcttttatggataaacatctaatagcctgatgcgctaactatatacgttaatttaacatgttattctaaaacggcaatcattttaattttttacactgtcattgtcggatgccgttttttattccacttgatttcatttggtctttacccattcgttatttattattgccttctcttatttatcacgattcaaccgatatattcagataacaacgtctcttcaaattagcgtaaagcagcttattacatccttaattaacccatttgtcggagacaatctgagttaaatttaacgcttgtgcccgaatgttatggcctgcgttgttatcaggcgggatagcctattgcataacattccatcatctcagggagacagaaatagatgtcagtgaaaaaacacgccaccacattgaagaaaggaaaatcgctgttgggacaagggcagcaaactgcgcaaatggcgaaacaggccaaagtcttgttggcgggcgcagcaggcagtactgctaccggtgccggtagcctcatcaatggtggcggctttgccggtggcgcaggacaaaaagccgggatgtcagcacaggctgccatggggaactcatcggcaggcaagctgttacagaaagctggtcaggtattgggattactgggtggtgccgaccccagcggcctgctattcaccctgacagcgggcggattaccggcacagacttttgtcgtcaccgacttcagcctgaacgaacatttctcgcacccctttgcactggaagtagggctggccagcgccgaccctgctattggcttcccgctggtacttgaccgcacagcaacactgactattctgcaaaacggcatcgaacaacgcagcatcaccggcatcgtcacccgctttgaacagggcaatactggtctgcaccagaccacttaccggatgagcatccgccctgacctgtggcgcacgaccttacgccagaactcgcgcatcttccagcagctcaacattgccaatatcatcaccaccatcctcaaagagcacagcatccgcgacgtggtgttcaacctgcgccacccgcatccggagcgcgaattctgcgtacagtatcaggaaagtgattttgattttctgcaacggctgacagcagaagagggcattttctacttcttcgagtgcagtaacgggcgtaacacactggtcttcgccgatgactgtggctctgtaccaccgggtatccgcctgccctatcagcccggtgaagtcagcacattaggcgaaccggcagtcagcagcctgaccagcagcgctcaggtccgcccggctcaggtacagctaaaggattacaccttcaagaacccggcatggcccgcagaatttcagcagcagatgcgcgatgaaaacctgcaacagctgtactacgagcactacgactatccgggccgcttcaaagatgaggcccatggcaaagatttcacccgctaccgcttggaggcactgcgcagcgacgcagagaccgggcaaggcagcggcaatgccatcgccctgcaaccgggcaaactattcattcttgataaccatccccggttagacctgaatcagtcatggcagaccgtctctgccagccacagtggcagtcagccacaggcactggaaaccgtcagctcaggcgccggtacaacgctgaacagccacttcacctttattcgccagaaccagaactggcgtccggctccgaggcctaagccggtgattgatggtctacaaactttaggag

SEQ ID NO: 106 - DNA, 30011 bp, Xenorhabdus sp.
tctcatcataataaaagggatcagcacacccatcagggcagccatcagcaggttgagtatcattgccatggtcatcactccgcccattgctgggtcatcatagagcagataagtgacaagccccataattcctccccaaataataccgtttatcagggcaacacccagttcccttaataaaatataaggaaaactccctgtccggatttgatggagtgccagtgctcgcacgatcatagtgatggtctgattgccggtattccccccgatacctgccacgataggcatcagcgtggcaagggcaacaagctgggaaatggtatgctcaaacagaccgatcacccgtgaagcaacgaatgcagtgcacagattaatggctagccatgcccagcgggtttttactgcctgcccaaccggagcgaaaacatcttcttcacggctcaggccccccatacgccggatattggtatcagtctcttcgcttaaggtatcgacgatatcttcaacagtcagacgccccatcagacggccattattatctacaacagcagcagaaatcaggtcataacgttcgaacgcactggctgcgtcttcacctttttgctcaggcagaaaagtcacggtatctatgttcatcacttcagcgactaatttatcgggggcgctggttagcagggtagtgagcggaagttccccctgaagattgaagcttccaccaaaacttcaccacgctggttgttgtcaatgagtcgccataaagcaaggcgctcatcataaggcagtgcctccagaatatctgcgatatctgctgcatgcaggctggttagtaaagagcggacttcttcaattttttcgagtagcagatcattgctaatctttgcatgtgcatcagcctgtcctaataatgtatcaacgaatagcttatcgttaattaacagagaaaatagatgctggcgggcaagagctagcttttgcgaatgctggctggcaacattcgtattatcgggtttaaaggctggctgtaacattatatgacctttagtttttgccaaaattacactatcaggaatgatgttattttgtcttaagatcgctgctttgttccatcatattctgctttttttgctgatgatgttctaacgctgcaattgatgaatagataaaacgcccaaataaaatcagaaagctgataagcagaattaattttgtaatctgagcggttttctttttctttttcataatacgatatcgttaagttgattcctcttggatatgtagatgccagcctgtcacatccttccagtaagcttgctctttttctaaatccagttgcatgagtgtattttgagttaaatagtttctcgggaaagaaagtatccagtgcccatgatccgtttccagtctcagtgactcaggtgttgttgtggactgacgctgattattcagtagtgttgctaatcttaatatctggagcataggaagatattgctttttcttaaacaaatagaaacgagggtgctcatgaactttaaccgctttgcggtgataacgaactaatgttgccagtaatgactgctgttcttggttgaatcccggcagatcagtatgttgcagaatataggcagaatgccgttgcaggccactcagattaatacttaagccaacttcatgcagcatggcagcccagagcagaatagactccagttgtggttgtacccgtttcggattttgcgcagcccactgatcatacagtgttttagctgtatcccagacacgactggcctgttcgcgatcgatattatagtgatctgcaagacttttggcggttctctggcggatatccagatggcggaaacggtcttccatttcgtaaagaacgccttcacgtagtgctccgtcagacaagcataattcctgaatatttagggcatcaaatataccgcacaggattgccagacccggaaccagagtctgtttgcgatcgtccgataaaccaggcagatccagcgatttaaaatttttgtatttcagcactcttttgaccagcatctgaagtcgctcaggtgtaatcaggccatctttttcacccaattcaaccagtaattcatgcactgccttaattgtacccgacgcccccagagcaaaatcccagccttttgtacggaattgccagatgagattttccagcttttgttccgcttgaagtcgtgctttgcggaaattgtgttcatttatcaccccatcagggaaaaactgccgggcaaaactgacgcatcccatacgacggctttcaatgagaagaggttcgaagccttcaccaataaccagctcggttgaaccgccaccaatatcaatcaccagcttacgacctttttctggctgagtatgctctactcccataaagattaaacgggcttcttcatgaccggaaataatttcaataggataggggatgacttctttggctcgttgcaggaattcttcggcgttacttgcttcccgtaaactgtgagttcccacaaggcagacgttttctgcggggaaaccttgcaaacgttcagcgaataacgaaaggctctcaagaccacgtttgatggcttcttcactcagttcatttttatcgttgaatccatcagcaaggtaaacccgttttttcaggcgaccgataacttgtaatgccccatttacaattcgggcgataaccatatgaaaactattggaacccagatcgatggttgcaatttccagcggtttaggtgttggtgtatcgtgtttcaacggcataaattaaactcttgattcaggctgttccagatttttcagataatcgtaaatggcagtttgtgcgcgaattttacgtttattccctcgtgggacatacctattactcaattctttatcaatataacgagccttgaccgtatcactaaactgtaattcgagaatatcgagaacacgttgttttaacagcgggtcaagcagacaaacagcaacttcaatacgataatcaatgttccgtgtcatccagtctgcggaagaaaggaagattttctcatcccctttattagtgaaaacataaacccgatcatgttcaaggaaacgatcgacaatactggtgacctgaatattttcactaaaaccgggctggccgggaaccagagagcacattccccggatcagaagccgtattttgacacccgcttcagaggcatcgtataggcgatctactaattctctgtctaccagattatttattttcagagtgatacctgcaatttctcctgctctggcattttcaatttcctgatcaattagtttattgagcatagcccgtgagttttggggagaaaccatcaaattctcaaacgtcaccgggcgataagggtattctattaagttaaatagccggcgtacttcgttggtgacttcgggtttggctgtcagtaggaagtagtcggtatataagcgggctgttttttcattgaaattccctgtgccgatgtgggcataacggataatttcattcccttcaaggcgtgaaatgataaacagtttggcgtgaattttcaggccgggagccgagaaaatgacatgcacacccgcttcagtcaggcgttttgcccagtgaatgttggcttcttcatcaaaacgagcctgtaattccacgaccactgtcacttttttgccattgtgggctgcatggatcatggattcaactatgcgtgagtctttcgctacccgatagatgttaatttttattgataatacgcttggatcgaatgatgcctgccgcagtaattccagtacatgctcgaaagtgtgataaggataataaagcaatacatcctgttcacggatagcatcaaagccattgcggaaatgatcaaaccaggtatggcgcagtcggggcatgggtttattcagcagagtccggttaccttcattggggaatttaatgaaatctctgaaattgtgataacggctgccggcaatgactgagtcatcattggaaagccccagtttgctacgcaataattcgaccatttcatcaggcatatcgcgctgataaacaaaacggacaggttcggctgtcagtctttgctttagtgttgaagacattaactccagcaagctggattccatttccgtcgctaaatcgtattcagcatcacgggtcattttcatggagtaaacacttagtgtgtcgtaatcaaaaaatcccttaaaaatttcatccagtgtgtagcgcagaatgttatcaatcaggatcatcgatttgcgtcttttgggcatttccggcggtaaattaacgaaacggggaactttatcggaagggatttccagcaaagcgtatttggtttcctgcccgcggataatttccaccgctaaataggtgtaatcatcttttaaaaattcaaccagattcgtttctggattgataacgataggcgtaatgtgtggacgcaaatgctggcgaaaatattgccgtagccagatttgctgattcggggatatctgccgttcattgattaggaaaatctgattacgtgccatctccaataataaatcgttatagagttcatcaaactcctgatcgattttggcaacttttgactgaattttttttaataattgccgggaacccgttgcagagccgcgggcttcgctaatcagaatgcgacgttttacatcggcgaaacggactttataaaactcatccagattattggagtagatccctaaaaacctcatcctttcaataagtggattacttttgtcagccgcttcctgaagcacacgttcattgaaagagagccagctgagttctttttctgtatagaggcggtcttgggacattactactccatttggtccattggttaacagtgctgctttttactctgggaatgcctaattttgttagcaaaatagtgatgctggaaagtacacatgcggatagcagtatgataagagccgtttacaaagaactcatcaatgagctctccttctgtataaaatcccagtttattgtatatatgaattgctttttcgttttctttatcaacaattaaatagagtttataaagatttagtactgaaaatgcgtactccatcgcaagtttaactgcttctgttgcatagccttgcccctgataagctggcgcaataatgagctgaaactcagcccgacggtggacataatcaatttccaccaattccaccaaacccactttggaattcatactctcaataataaaacggcgttcactttgatcatggatatgtttgtcatagagatcgcataattcaacgaaagcctcataaggctcttcaaaccagtagcgcatgacactggcattattatcaagttggtggacgaaagggagatcttcccgctcaagtggacgtagatttacgggtagattttcggaaccactggacattagatacctcagtgtttttaacgtagggacgacttagttttgatttttataaaagagaatattatgaagtaataaagtacagcaaggtgcctggctaattatttttaccttagtatgattaagtttagcttaattaactaaccttaacacaatgctgtagttttgaaactaataataaatttgggaattaattatatcggttagtctgaagcatatccttgttgagaaagcactttcccatccaaaatggcggtattattgcccatgctcaaacggccttccaaaaaccagccaatgaccagcgggtaaatattatgctcctgagtttgcacgcgttgaatcacttcctcttcttgatcttctgcaaaaatgggcactttggcctgtaagataataggaccaccatcaagttctttggtgacaaagtggacagaaatgccatgttcctgatcgccgctttctatcgccttacggtgagtatgtaatccgggatatttaggcagcagggaaggatgaatattgagtagtcgtccacggtaatgctgcacaaagccagatgacaggatcctcatataacccgctaaaacgactaaatcgggctgatattgatcaatggctgtaagcagggcagagtcataatctgtgcgatcagaatattccttcggattgaggaaatgagttggaatagctgattcttcagcgcgttgcagaccataagcgtcagcattattgctgaacacagcacagatctgaccattaatccggttttgctggcaggcatcaatgatagattgcagattactgccattaccagaaattaagaccgcaatttttttcatagtcttcattgaatcactttctattaactggctttttattcactgatcgtaacttgttgcccgctatgatcagattcagcgatgctgccgatttgccatgcgttttcacccgctttattcagccattcaattgcctgtgttgcctgagactgaggcagcgcaattatcatgccgacgccgcagttaaacgtacggtacatttcatggtcgctgacattgccagcctgttgcagccatttaaaaatggcaggccattgccaactggtgccgtcgatttttgcctgcatattttcaggcagaacgcggggaatattctcccagaaaccaccacctgtaagatggcaaatcgcatggatttcaacttgctcaatcagttcaagcagtggtttaacgtaaatacgggttggagcgagaagatgatcagccagtgttttaccatccagctcagttgtctcgggattggtctgactgacttcaaggattttacggatcagtgaataaccattggagtgtggcccgctggatgacagtgctatgagtgcatctccagcctgaactttactgccgtcaatgatttctgatttttcaaccacaccgacacagaagcctgcaacatcgtaatcttcaccgtggtacatgcccggcatttcagctgtttctccgccgaccagagcacagccagcctgtttacagccttctgcgatgccggttataacgcttgatgcggtatcaacatctaatttccctgttgcatagtaatcaaggaagaacagaggctcagctccctgaaccaccagatcgttgacgcacatggcgaccaaatcaatgccgattgtatcgtggcgtatcagatccatggccagacgcaatttagtccccacaccatctgtgccagaaactaaaacaggttcacgatatttttgtggcagagaacataatgcaccaaagccacccaatccccccatcacttccgggcgtcgggtctgtttcactacacttttgatacgattgactaaggcattaccagcatcaatatcgacaccagcatctttatagctaagagaggttttgttggtcactgcgtagctcccaggcggttgcatttgaatgaataaaacagaacggaataattctaacagccaaggcaaacgtttgcgatagctttatgcaggtttattgcggataaaaaataggaaaaaatgacttgtagttgctaaaaatcaatatattgatagttgcctgatcccaaaaaggaggtataatcccgcgatttttttatctgccggctatatacagtaggagaaacccatgaagatcgttgaggttaaacacccactcgttaaacataaactgggcctgatgcgtgatcatgatataagcactaagcgctttcgtgaactggcttcagaggtgggaagtcttctgacatatgaagcaactgctgatttagaaactgagaaagtgaccatcgagggatggtgtggtccggtagaaatagaccagattaaagggaagaaaattactgtcgtgcctatcctgcgtgcaggtctgggaatgatggatggtgttctggaaaatattccgagtgcccgcatcagtgttgttggtgtgtatcgtgatgaaaaaacctttgaacctgtaccttattttcagaaactggtttctgatatcaatgagcgtatggcgttggttgtagatccgatgctggcaacaggtggctctatgattgccaccattgatttactgaaaaaagcaggatgccctgttattaaggttttggttctggttgctgctccagaaggggttgccgctttagaaaaagcacatcctgatgttgaattatatactgcatcaattgatgagcgccttaatgagcacggatatattgttcctggcctgggggatgcaggcgataagatatttggtacaaaataatatttttagccggctgaaaagtcggcttttttttggttcctagtaaaacataagaggacataaatagtgacccgtcggactattggggtagatgaaaggccacctttaagacagaccattccattaagtttgcaacatttatttgcgatgtttggggcgacagttctggttcccattctgtttaaaattaatcccgccacaattttattgtttaatggtattggaacactgttttatctgtttatttgtaaaggaaggatcccggcttatttaggctccagttttgcctttatatctcctgtattattgttgttgcctttagggtatgaactggcattgggcggatttattgtctgtggattgctgttctgcctggtttccctgattgttaaaatcgcgggaagaggctggcttaatgtgatgtttcctccggctgcgatgggagctattgttgcagtgattggtctggagctggctggggttgccgctgatatggccgggttacgtcctgctgcgggaacggatgttaatacgacgaacctgatcatctcaatggtgacactggctgtgacaatattgggttcagtcatgttccgcggttttatggcgatcattccaatcctgattggggtgctggtgggttatacgctatccttttttatgggagtcgtcgattttacaccagtgcgtgaagctccatggtttgcattgccgactttttacactccgcgttttgagtggtttgctattatgacgattttgcctgcggcactagttgtcattgcagagcatgttggtcatttggttgtgacagcgaatatagtgcaaaaagatttgctgaaaaatccgggattgcaccgttcaatgtttgctaatggtttttcaacgattatctcagggttttttggctcaacaccaaataccacttatggcgaaaacattggtgtaatggctctgactcgcgtgtatagcacatgggtcattggcggagcagcgattctggcgattttactttcttgtgtcggtaaactggcggctgcgatccagataattccggttccggtaatgggaggcgtatccttattactgtatggtgtgatcggggcatctggtatacgggtactgattgattctaaagtagattacagcaaagctcagaatctgatcctgacttctgtcattctgattatcggcgtgagtggtgcgaaaatccaaattggtgcagcagagctgaaaggtatggcactggcaacggtagtgggtattggtatgagcctgattttcaagttgattagtatcattcgtccggatgaaccgtatattagttcttctgtggaatcattcagtgatgataaaaaagcgtgtgaaatcataaaataatttgtatgggtcttcctttaagagaaagggttttcaacgaactctttctcttattttttattagaaaaatattggctaatttctcttgatatccttatagttacctcattcctacctatcggtttgctgcctttttgtcataatcttttactataattgtaagtacaaacactcaaagatgaaaaatattgagggataaaatggaaagtataaataatattactctatatatagataagtcattggaaaaagaattttatacagagcttaaaaagtttaatatagaagttaactcaataggctcggattttaaaacactcaatatagctaagcgaacgttcacgtttattaaagataatgtaaggtatcttgatggtttaagaaaatcattaattgctcttttaggtggtgagcgtaatctaaaaatatctatcactaaaaatgatggtagctccatatctattgaaggtgatttagataaagatgaaattattgaggttctgaaagaagcaagtgctctgattatttctcagtctgataaagaaagataattcccagtttttcatcttatattttaagttttgctatattctgtattgattgttatttgtaatgttcatggagttcagtataggtcatattattcatttcggatatgtcataatcaatagtgattttaaacacaaatttgacaaagagtattttgggatgttcagtataaataatgttcttaaatgggagaaaggaataatattgaatatatgtcaatgataatttttattaaaaataaatttttactacttctttgcgttatttttctttttttcatgaaaaagtgagtgcctacgacagcgaccatcttaaactaagtattcatttcatttgttatcgttttttgtggtaaacttggtttctatggtaaacttaatgctgttcgttatccattctgtttgaggtgcttctgaatacaccggcgcagctttcattgcccttatatttgccagatgatgaaacattcgccagtttttttgcaggtgagaattcttctttattagccgcaataaaattggctattagtcagtcacatggcagttatatctatttttggtcccgcgatggcgggggcaagagtcatttgcttcacgcagcctgtgccgaactatcccagcaaggagaggctgtcgggtacgtgccactcgataaacgtgcatattttgttccggaagttcttgatggtatggaacatttatcattggtgtgtattgacaatgttgaatgcatcgcaggtgatcaggtatgggaaatggctatttttaatctttataaccgaattgtagagattggcaaaacctgtctgttgatcaccggagatcgtccaccccggcaaattaatttaacattgccagatttagcatcccggcttgactgggggcaaatctataaattgcagcctttgtctgatgatgaaaaaattcaggcattgcaattacgagctaagttacggggatttgaattacctgaagatgtggggcgttttgtgttaaagcggcttgacagagaaatgcagacgctattcagaacgttggatgagcttgaccgtgcttctattgtggctcaacgtaaactgactatcccatttgtaaaagatattcttgatctttaatacaccagctcagaaaaaaagtgatagaggtacaaagtagatttccctatcacttttttaatgattaattgcccaaaatctctttgacctgttctggtggccgccctaaacgtgctttatctcctgcaacaacaatcgggcgctctatgagcttaggattatcagccattgcctgaagtaaggcttcttgtgtgagttcactattatcaagccttagctctttatacaattcttcttttgttcgcattaattggcgggcatcactgaaccccagttgtttcagtaaaacagccagctgttctgctgttgggggagtatcgagataatgaataacttctggtgtaataccgagttcctgaactaacttaagcgtttcccggctttttgaacagcgggggttatgataaaaaataacatgttgcatataaaagaacctcatttcttatattggctatagcgctgttgcagcttgcgtaactggtcgatacgggcatcgtaacgggcctgatcatagctgttcagttttgctaatgcactggcctgactgagataattgattgccatatcaaatttaccctgtaatgccattgtttcggcgtaagctgacagttcttcactgcgtttcccttgtttgcttgctgcttcggccattaatgaccaacccgttaaactatccggatggctgaaggtgtattggaatagcagctgtgatgctttcggatactgtttggcttcgatatacacgttagcaagattgatttgcagcacagggttatttttgtgtttatgtaaggcttgctgtaagcgggtaatcgcctgctcatattgtgtttgttcaatatcgatatccgtcatcgcatcaataaaccagatattatctggctggctattcaataacggggtgagcacttttctggcttcggcatattttttctgtttagtcagtagcagaacccgcccataagaggccgaaatttgttcttttggagttccacgactgtatttattgagcagcccttcaatataggctgagcttagtgtggattctagtgtcagaattcgcacccgggccagtagatattcctgtgattctggaatagattttttcgggtattgattagctctgttacgggcatctgctaatcggctatcaggcagtggatgggtatataaaatttctggaatttctgagttgtgtaaagtgcgctcactcaaagtttgcataaaattaggcattccataaggatcaaacccagcccggcttaatattcgcataccgatacgatctgcctcctgctcattttcacgagtaaagctgatcataccttgtgaaaaaccagccagtgtaccacttagagctgccattcctgcctgtgggttagccattagcagtaagatagatccaagtgtgccggcccatgccagtggcgcttttcgctgtgtatcttccatcatacgggccaaatggcgctgtgttacatgagatatttcatgggccataactgaagccagttcgctttcatttcggctataacggaacagagcagaatggagtacaacgttgccaccgaaaaaggcatacgcattaatgttaggattattgacgatataaaagtgaaaaggtgttttcactgcatcagcatggttgacgagtttctggcctaatttattgatgtattgtgttaatagaggatcataaatcaagggagttccagcacgtatttcacggatatagaaatcacccatctctatctcttgattggtactgagtgtggatgcagcggttgtaccaatatcgggtaatgtctcgtcagtaggtacagagtatgcagggctattgccaaatagtgtcagactgatcagtatcgctatcagggatttagtagatgtttttttcatagagcgattctcataaaacgatttttataaaatgctgtgcccagttagctatcaatttcaggatacgtgtatgatagctaaggttaacttaaaatcgatcagccgtaagcacttttagtaaaatagtcattaagtattgttattaaggagtttggtttatgttggatatgatcatgcgatggtatcgccgccgttttgctgatccgcaagttgctgctctatcattcattttgctggctggctttggcataatttattttttcaatggtattttagctcctgttcttgctgcaattgtgttggcttatttattggaatggccgacggtaaaattagaaaagctgggttgtagtcgtactctttcagtgacaatcgtattagccatttttatggggatcagtgcattgattatcctgattgttgccccaacagtctggcaacagggactcaatctattttctgatttgccgaatatgcttaatcgctttaaggaatacgcccggacttttccctctcgttaccctattttagttgatgtcggtatcattgatatgtttgccgaaaatctgcgcaataaattttctttagcgggagaatctgtatttaaattttctgtagcgtctttgattggcctgatgacgttctctatttatctgattattgttcctttaatggtatttttcctgttgaaagataaaaataaaatggtagcggcattccagcgtatattaccgcgtaatcacggtttagccgggcaattatggcatgagatgaatcagcagattacgaattatattcggggaaaagttgtggagatggttattttaaccatttgtacttatgctgtatttgctttctttgagttgcattattccatgttacttgctgttctggttggtttatctgttttgattccctatgtaggcacggtaatagtgactattcctgtcattgtggtagccctatttcagtggggattaggcgcagatttttggacactatttattgcttatctggttgttcagggattagacggtaatctgcttgttcctattttattttcagaggcagttaatcttcatccgcttattatcattatttccgtcattatttttggcggattgtggggattttggggcgttttcttcgcgattccattggcgacgctgattaaagctgttattaatgtctggccggaagataaatcagaagagttatcgtcgtaatttgaaattattgcagtaatttcgataaaaattcaaataaacagactgaactaaggagtggcggtgaaatcactgttaagtgttataccttgcatgcttttaggatgggttttatcactgctggggctacctctggcatatatgtttggggcaatggcggctgttattattgcatcccggctgagaatatcacttacagccccaaaacacagtctgacggtggttcaaattgtattaggaagctctatcgggttgatggtcaaaggattaccgatggaagaagggcgtgatatcctgatgttactccccgcattattaatctgcctgattctgcaatttaatgtcggctatttttggtttcaccggaaaatgggatggacacgcacagagtcggtattgggcgctgttcccggtgcgctggctgcgatcttagtgctgactgaacactctaaaacaccaccacagaaaattgttatctcccatgccattcgtttggtcgttttgattattattgccgggattattaccggattaaatcctcctccagtgattgaagtagcacctttttcttatacacccggcattattggctggttgatcctgattgccaccggaggttatatcgtcggcgttttgttggagcgtttacatattccggcaccctatatgctgacttcattggttgttgctattattgttcactatctgtctgatgtaacactgaagctgcctgaattgctcagtttattatcaatggggttaatgggcatgaggattggtttgtattttagtgcgtttccgttttcagcattgattagtaatatttggtcttccatacaatctgtgtttattgcactgaccatcacagttttagttgcagcagtgaccgcacaggtgatggattacccaatgcacttgctgatcctttcatgggcacccggcagtatggaagcaatgctatttgccgctatggcgatgaaagttaatgtaggcattgtgatggcaagccacattatacgcatgtcgttacttcatatagtttctgcgattgccctgaacgtgcagggaaggcataaaaacagctaatttatttttccatataaaaggttaaaaccaccgactttagtcggtcagctttagctgcgatactgtgttgcacgagaggtgcaatatggattacagatatggcagccacacggtatttcagattgagtatcattttgtgtgggtaacaaaatacaggcacaaagtgctaataggtgaagttggtttacgggtgagagagttagttcgtcagacctgtgaagcgttcgaaatcaggatagtagaaggggtcgtgagcaaagaccatgtacatatactggtgagttgtcctccgagcttagcgccctcagaaatcatgaggcgaataaagggaaggacagcaagtaagttgtttgaagagtttgctcacttgaaaaagcgttactggggtcagcatttttggggcagaggctatttttgtgcgacggtaggtcagttaacggaagagatgataaaggcctatctggcgcatcattttgaaccgaacccgaatgatcacttcaggctggataattgacgcatcgtttagccgatgcgtatccggactttcagtccgttaatcactaacccaccgactttagtcggtggttgttgagttttccatataaaaggttaaaaccaccgactttagtcggtcagctttagctgcgatactgtgttacacgagaggtgcaatatggattacagatatggcagccacacggtatttcagattgagtatcattttgtgtgggtaacaaaatacaggcacaaagtgctaacaggtgaagttggtttacgggtgagagagttagttcgtcagacctgtgaagcgttcgaaatcaggatagtagaaggggtcgtgagcaaagaccatgtacatatactggtgagttgtcctccgagcttagcgccctcagaaatcatgaggcgaataaagggaaggacagcaagtaagttgtttgaagagtttgctcacttgaaaaagcgttactggggtcagcatttttggggcagaggctatttttgtgcgacggtaggtcagttaacggaagagatgataaaggcctatctggcgcatcattttgaaccgaacccgaatgatcacttcaggctggataattgacgcatcgtttagccgatgcgtatccggactttcagtccgttaatcactaacccaccgactttagtcggtggttgttgagtatccggcgggctggatagtctaataggtggaattgatttggtggctaagtgtcgaaaacccctatttgtttctcaactcgcacataaagattctgagcgacagagggcatacgcatccatgctgatgggaaatggttcacattatcaatggagtcatggcatcagtttcaaaggatcgcgcgaaccttcgacacgtggtcgctcattagctttttatacatttgcattacttgcctcaacgaaaataaacttaccaaacccaacaatatatattcccgaaaatggggtgatctccataaatcctcctttggttccggggcgcgtatccagtttgagtactcgtacaactcatcctatgtttatcgatatgttgcaaagagttctggataatttgggcatccatgtacagcttgagttgccgtaccgtttcaaaactaagggcgaaatgatgcgggagtgccttgaccaagaccttttgcaaaaatgggctgctgattctacaagttgtggccgctttcgaacctataatcgtcagcactgtggacgttgtgttccatgcttgatccgtcgggctgcattccttgcatggaaacctgagggggatacaacgtcttaccgctttgaatctgttgttggcagtgacaagtctagtgcgccagatgatcctatggctgttgcacttgccatccttgatgtaaggaaaagagggcttgacagatttcttggtggttcgttggtttttgcaccgattaaagagcgccccatgtatcgtagggttttgcagcaaggtataaaagagctagaaactgtactcgttcaggataaattgctttgattgattttcactgtcacgttgatttgtatcccgaggctagagatgtttatgccggtgcgatcaagcgtaatgttttcacttggttagttactacgagcccaaaggcttttcaggctacaagtcatgttttagaaaaacatgaatcggtaatgatcagtcctggacttcatcctgaaattgttgctgatcgtttccaggaattggaaatgcttctcgagttgattcaaaacgtagctgctgtaggtgagattggattggatggttcaaaacgatattccaccaattacgcgatgcaacgtcgagtgttttccgaggtggtcaggaagtgccacgatgttgggggacgagcaatgagcattcactcaagacaggccgttccggatgtgctggctaccttaaaagcgttcccctctcacggaattcctattttacattggttcactggaagtgttacggaattgagggatgcttcagcgcagggatgctggttcagtattggtccggctgctttcaactctgccgcagggaaagctcttgctactaagctccctaaagacagggttgtgccagagagcgacgggccatttgctcaatttagcaatcgaactgtgatgccatgggatttcaatattacagttcgattgctgggcgaggcgtggtcaatgcctgaaaatgatgtaaagctacaattgttaaacaatacgaaaacgttgcttggacagatggggaacgatcgaattgctctcaatttttaaacgaaatggtattcaattgccacaggtttaatagatattttagtcggatgatgtaagtctcaatgcgtatgccgtttgttgacatagcgagtaaccgcaacgtacttaagccaaggaacctcataacttttagggggaattggcagcgagagacattaccgacgagttttatggagaatcatctttgtgcgcatttgactgccaatactaggtatgctggatttttattctacaaaaggaaaatgtgatggagtctgcacgtgataaacatacccgtgagattgtagaggcagaggatctgtggttgcttgatagcgttgatactgaaggctatgtgtgctgggggtgtggtataaccatgcatcctgctgcatgggaaaaagataaaaaagtcagagcctattttaaaaagaaacgacatattcaacatcatcatgaatgtgatgctgatgctgaaagcacagtaattcgccaaggccagaaggcgagtgtccgcaacatactggacagtgctccgggtttaatgccctcgggattaaagttgatcgaaaaacgcccggttgttgaactaggtttccctggtgatgaaagtaaatccagttcgacacgttcagcatcctcacaatctggtgaaggtaattcacccgaacgacaatcccggcgtcaagtgaatgctattcgcaatatttgccgtgccttcatccgtttcccgcatgaccggggaatgtcgcttaacgttcccggtatcagtggtcaaatctacatgacggcgtttaaaaagctccggaatgaggttcaaccttacccggagccgaagatcttttatgcaccactgctctggaacaaatttactgaaaatgatgaaaacctcatcattccattgtctggtgaatggggggaagatgagtcaggtaaacctaaacctacccgaagctaccagatctacatcgattgggctagctggtcaaaagccaagcgtacagtggttcgtaaagagctggaggctgcccgtacagaggcaatagaagccaaaggcaaggggctgaaagataaagcttgggtattctttatcggcgagcaagatactgaaaatccggagatcttctacgttagcgattatcgactcatctgcgcgattgtaggacatatcacttatccctaacgtgaaaaaggccttcccgattgggaaggcttgcccatatgactatttgtgactaccgccgaaattgcgttcaccttcttcgtaaattttgctatcgagttttgtcaggtagtccagacgatggactagttctccaaactcatagatataatctgctgagtttcgatccaggatgtacctgtagttttcaggaaaatgaaccagcccaggatagtcctctggtacgagccctaatgcgctgtaccaagctctaacgatcatcatcctcaagctagtgtcgatattataatctcccagcctgttgtaagcctgttcgttaaatatcaggcaaacgtggaagtggcatttacctgccaagctatattctttagcccaaacatcacgcaaggtattaggatggattctggtaccatcacgccttctgcgttgttcactagctttcagcatcgcttttaacgagttaatgaaccgggatattacaccgggttcaaggttagggaaacagcatacagtgtcatcaagtatcgggggataatgagtatcgacacgcacagccataatgctgggagtttcgtcggtagcatagccgagtacctccagtatggtgtccagattttcttcattgtgtaatccatgagatcctaagtacgtttttataatatatacctatgtggttggtcctacggtccgtcagggaaataccgttaatctaaggcaacgtgatgagcaacactaacgcagatgtaattaaagagtttttgatatcgcttggatttgatatcaaagagtctgactcgaaaaaattcagtgcagtgctgtcaggcgtcaccgccaatgctttaaagctgggtgccgccgtggaaggcgcggcactggcagtcgtgggctttacggcgcaggttgccagtggactggataaactctactggcaggcacagcgcaccggtggtacggcagagcagatcaaaacattgggctatgccgtgtctcaggcgggtggcacagtcgaggggctgaactcctcccttgagaatgtcgcccggttcttacgtaacaatcccggtggcgaaggcttcctgcgcaatatgggtattcagacccgtgatactaacggacagcttagagataccgcttcgctggtggcattggtcggagaacggttgtcaggcatgccatcgttcagggccaatcagtacgccagtatgctcggtattgatgagaataccatgcttgctatgcgccgtggggtggggggctatgcggcggattataagaaggtcatcaagcaattgggatatgatccagcgcttgccgccaaacacgccaacaactttatgacccagatgtaccagctcaagatggtaacgggttcagcgaaagacaagatcggcggcgaacttgcccggatagtgcagggcaaagttaacattggttggaagtcagtatcagccgggtttaaaaatgtggtgacttataccggtaacaataagctgtcgtgctgtgacgaggacggcatgatcatagatagctgtgtcgccaagctacgcaacgttggtatggctcaggagtgtgattttatcgagcaccactacgttagcggcatgtcgaaaagagccatagaccgtaagtttaagctcggtgagagcgaggttagaaagcgaatgctggtggctgagagttttattcttgggtgtctggaggcgttaaatgaacccttagaaatagacctaatctatggcttccacggtaaccgggtgaattcgtctagttcagcattaaacaccccatagtaaaaatcctatcccttgcccgtatatccgtgcgaacggttccacccgcttataagttaagtggataaatttgaacaaaaaattaaggcaatgcttacttatattaaagtgccaacattgccttttttatttaacatatagtattagtagcgaacagatttactatataacacatcaataattgttggtttttaataatagcggtctgttgccggttttatttttctaccaaaatcctcaatgtaatcttcataaataaggacattgctatcttcgaatatataataaaaatcatcttttccatttttagaaacacccattataaaacctcgccaaccgctacgaccccaattgtcacccatgcctggtcttagaatgaaccaactcgtttcaccacttttattccatctgctaacacaaacagaaactgctttatttgaataatttgttattttcattttcatataattctctcttttttaattttgtaaaatattaaaatgacaagatttatatttattgggatattacagccctatttcataggagctattttcattattattttttacccaattaatacaacaataatgaaactcagtggtctgatcgtgttggctgttgtaataataagtttcgccaagcaccatcaacccgcaggggcaaagctcaggtattacgagcaatgcaaagccctctatagggcttagctcacagggtcgcggaaaacttttacccgacctcataaccaattgataaaacttaaatacggtgaaacgcagagtttgaaccgttatgggaattcccatatcgcccggcttcctgcaatgcaggttttcgagagtatcaaagagttaggcttttttatcggaatcgacctaattcaccggaatataaagcttgttcagagtctttaaaacttcttttaaaaccctttattaacacttcttttaaaaccctttacattaggtagaacccatatactctgttttcaacatatttttacctttaacttttttggcgtaaactaaactcatagtgaatggggatatatttaaaaatgtcgttattagatgctgatgaatttgaaggaaattgggtatttcgcttcaatcaaactctgaattttccccttaagttttcttcgactacgcaaaatggggcttgtagtagtttggtaatggcttgggtgaagatgcacaaattaggaaagtcccacttatttccaggaaatataagactacctagctatataaaaatagttgaaaatcttaaagctagcagcatggagcaacttaaatttctgagtgaaaacgggttatttactatgaatgccagccgttatgagggcgacaattttgtagaaaacttagctactaccgatgcaggttatgaagctttagcgtatgaaaatcatgctgttgggctagcagtaactttcgatagcgttgatttttttgatcccaattttggttgcgtccatttcccgaaccgccataattttagaacatggtttgaggaaaaatattggcctaatcgttggggaatagggacgatggtaaggccatgtaattccattttagtgttctcaatagtatcaacctagaagccatgatcgggtgtagatgccaagctgcatatttacatcttgcccgtaaatccaccagcaaagtgattccgtctactaaacggaattgaactaattcagccgcttagccactcctcggcaatacctcaggccgttcaacttccaccattggggtaagttattaacaatcaataagttatacaactatcctatccataacaatttgattaggcttaattgttccatcccagcactatcagactttggacaaaaaccaccagctatagcacaatgttattcgatggggctatacgctgcccggacagagttcttttctctgtgagccaataccgcttctatggcatcgggcataaaaccctgctcattcatcgcggtactgacaattgagcggatgccgtgcgcagtaagcatatcttgataccccatgcgctttaacgccatattagcggtctggctgctcatatgggtacttggggtagatctgtgtgggaagacaaattccctatgtccgctgataggtttcataatttcaagaaggtctaaagccggttggcataaaggcacagtatgggcgtgcgatgttttcatcgtttcggcgggtatattccagactttattttcaaagtctatttctgaccaacgtgcttttacggcttcccccgggcgtacagccgttaatagttgccactcaatgactaaacgtgtttgccgttctacctgtgcaacggagagtgcttgcattaacccggggagttcttcgggtcgaatggtagggttatgttttttctttggtttaggaaatgccttgctgacagtggtaaaagggttagcatcaataacgcctaaattcatggcatagtcgatgatctctaccgttctttgcgtcaggcgtttaatcgtttccagattgcctcgtgcttcaatcggcttgagcacttccaccagcataggtgctttgaggtttgatatcggtacatcaccgagtttagggaatatatctttttccagtgagcgccagatatctttggcgtaatcttcactgacagtggttttctttacctcaaaccagcgggtagcaatattccgtaaggtgttgctgttctcttcctgtattgccgctgtttgctgtttacaccaatcaacaggatcaatatctttagccagcatcgcttttgcttcgtctttgagtcggcgagcgtcagccagcttagtagaggggtattcaccaaatgcaatcattgtgcgcttttgggtgaatggcttgtagtatcgaaaataccagagcttaatgcctgatgcttttacgaggagttctaaattatccccgtcacggtagatcgtgtctttgggcttacctgttttgctatcaagtttggctttggcattagataccgttgtaggggaaagcggcgttatctttttaggcatcgggcacctctaaccgtagtagtaagtgttctcggtggtagtagtaagcgttttccgttggtagtagtagcggtttattggtgtagttgggctgttactactaactttttacctctttaaccttgtactgcgtccctcggtgtctaagcgtccccgttttattttttatatttaaatcaattggttaatggtgatttttttaagttttgggacgtgtgagaaaatatgtctgggacaggctcgccccgccatttaatttttataaatcatattgttaagtgtttcgggacagcgggacatcattttttgcaaaaaacttaactatatatatatgagtttctcttggacacttgggtatttacgttttggtagtaagtgtttttgtagtgtaaaccaatgtcattctgtgcgttatcgatgcttatcattattttctaccccgtttgttatgctttttcttcgctggtattatcttcactaccgacactttgggtgctggtggaagaggagggcagatgccctcgtgaatatgccgattacgattcataatgtggataatgcgctgaccccaatccaagccgtcatcaatgtggactattgttctgaccagttcgtcgtgaatgtctaccatctggaggtgtcccgcagtcatggcgctcatcatcaaagataattttgtaagcacgtagtacgtgaggtgttttgcctgtaataacggtcatcctaaaaaggaagccgacagaagtagaagcacgaacaggtgtagccagcagagcagcatcaatacaccggttatgacgtcgatgtgcagtaatgacactactctcaatgatttttgaagacataccttcgtcgatatattcaattttcattgaaacatccccttagctgccagtgtttcacccatgtcattgatcatgctttgccatatctcacgcccgtagactgtcaggagaccattgacgacacatttctccatcagagcgatggcgataacttcccatgccggataactctgctgtaatgcttccagtgcgtaactgtccaccagttcacgaatgccttttaccccttcgacaatagcaatattgatttctgttttgccgacttgcatcgtgaagtgagcgccaccgttacgggtcactacatcgttatagatagcggctgaatagctgttcgccagcgcgttgaggcgaaagttttttgttatcatatgagcctccctatacccgacatggcataacaacgagctgtgggttgccgtagcgctggttgatgttgtcgctaaacttcattaagcaggcatctgtcatactggatggatacatagagacagcgataaatgccgaatcaccctcaaacattttttggggataagccagatattcagcctgaaagtggggaatgacactttctactttcttggggataagccgatctaaatcagggaaacggccatccagtaaggttaaagcgctaaatcccactctcattccggtaatatctctgtgaacggcataaggctctttggtgaaatgcagttctgtagtttctgcttttctggggatcctcccgtggaactgcacaatcgctttgcggcgtgtgctaatgccgtgttctaatcgcagagcaacatgaccgttggttgcctccagatagttagaggtgatatgaactccacataggtaataacgtgggtcttttttcgctacacagaccaaagcagcgcgtagcaagttagaattaataatcattgtttgtcctcccatccaataacctgaaaactgcccattttgggatgtgaccagcgagtgccgcgtttttctgcttcactcatcattaggttgaatgcgatcataaaatcttctttgaacaccaccttcataggacgaggttgtccatcaggggtcagggtggtgatgctttgcgtaggaacactatattgttcagctaaagtgcgacatttggcgttactgagtcctgattcagtcgtagccagagagaagccaatccagccaacagggatagtgccgcgcttgatttgctcgatcgtttcctgaacctgatcaaccttttcaccaatatggttaatctggcgctgctgctgagcggtatgactggcaattctggcaatcatctcaagctcatttattgcggtttgtggtttacggaagtagctactgaccaattcccgctgtacctgccaagctaagtcatcgttgaacggcttggttaacatcaggtaaccagactcaaaaagcacaatccccgttgggggcgaactttgaaaacaagcccatcgggggaggtcggtacgtatatcgtcctgacttaaaacttggtaatccacaccttgcacaaaacggtgattgtttctgttgaatgcagctttcgccgttccttctggacgtgcgtgaacttggtcaatcatggaaaatgtcacaacacgttgcccttgatattcaacgacaggcatttgagtttgattgattgtgatcacttcatttttcttgctcatatctcgtctctcaatgtgtgctgggtgatactggttcggcagtaaataatttgaatccgttgataaataccccgtcgataaaatcacgcatccatgtactaccgttttctttttcatttacttcgtttcctaaatagaaacgttgcaacgcaatatatttttcgactggattaatttctaaaattggtttttctatttggtgaataagtaacgtttcaataacttcagaatctaattcgactgtgcaattttcatgggaaaatacgacattcccattttcaagccttccgaagcgctcaccgcatgaaactaagtattctttggcagcgatggctcgcttttgcttaaccgaaaattcagcgcattccatcttttcctcatcggtaattggcggataattagctagcactctttccttatctaaaagacaagcaggaggttcaaatctgctttcctttaaatcggaaatcatttcttctatcattgattctgtgtatttcattaccacccatcacgaataattacttttgctttttgaatgcagcgatttccgtttttaatacattcctgttcttgtttaaggttctgcgataatgaaagggcttcaccccatttattcgcagcgcgacgaaataaacctttcgattctaaattacgcgctaattcgcctgcctgttcatataccttcattattcatcgcctgttgaaatttttgtttccacttattggtttcagtgtgattatcaaggtgcttttttaatacctcttttgttcgctgattttctttctgacttcttaatgcggtgctatggctatgatgcaatgaatatcttttttcattatgctcttgacgatattcagaccagagttgggtattcagcgtatttgctaatttattagctttttcccaatattcggcagcgaggttatacttttcttctttttccatttgaatagcgatattggcaaaatctaaataggattgttttttcattttattggctccgttttttgtgcgatgtgttctagtattacttccataaatgcatcgccctctatggttagatttccatgcttggtgtaaaagttgttgtatgaatcaataagtattttttctcctccaactgctaaagtatctttttcaaataattcaattagagctagatttaatatttcctcgtctaaatccagcctgtaattagttctacccactttgactattacagaatgacaaccatgtttcttttgtaatgcatccagcttggcgttaataagagcctttcgctttttagataataaatcagagctatgcattgttaatcatcctcatcagcacatgagcaatcggcatctctttttagtagttgggctacttgatctgataattccagcttggtctctaaatctgatataatcagcttcttgaatgtattacatgcaacagcaaaataaatacttggtcttatatcgccaacaaggccagctttgatgcctaaatctaattcatcgtcagtgctgtttgttaatgttagtgttatttcaaatttttctttcatttctatttcctatttttaagttgagcgagtccccagcgatgacgctgtaattaaatttggtttgttgttttaattaataatccaagcctctgacttgagctatttctttacctattccgaaagctatatctaaagctatactaagtaagtgagcgctttgatcatcactttcattttcgagtaataaagcaagatatgttatcagtccttctactttactggcgctaacttccaatttattacacagagattcattattactttcttgattaccccccccctgagacttcttttaaattttcaattaaccctttcatttggcgataaattcctcgacacattatatatgtatcttcttcaccctcattttcaatttccaccatcattggaattaattgtaatttaatctcttctgcaatttggacggcggtttgtagtttgtttgacatattccaccctgatatatttattcgaagttattatttaattcattaagcacttcaaactgacggattgataatcgttttattgctcgcaacataaagtaatcatcatcctcgatggttttttttaattcctttagcgctagtattaacaaaacatgcatttccgcattaatttcaatagcactctctaagtaatatttatccccaactgatatttttgttttcatgttgattggccttattgtttattaactatttgtcccatttagcctcagcccactcggaaatgagctggagttagttaaatgcaaccatagttgttacgtagatataaaggaatatcattaagccatgagcgataatgcctacgatacatcaagcaaatttcaatatgaagcctacgtaaaacagggttatctcgataaacaattaacttactacgataatggtcatatccttctttatcagattgagcgcataacattgcaaatttagcttgagatttagtcattttattttccagagaattaatattgtttatttcagtgacgattaactatttgtcccatccagccatagattacatatacgggagctaataacctttttgcttcttgttcattgagtgcttgagctttaacgcatatagggcgtgtttgtttcatgttagatctctcaatgattgcgaataaataaagttttgtagcggcgcgtgcaatatccgcgtttcaacctttatcttgttaagtactaacaggatttaaatttctaagtatttaacttgacgatgttattttcatatcaagttttgcttgttttgaaagatacaagcaatgcttttctaaagcaagcattgctttacttaaagtaaagaaaaaaacaagttaatgttgttattgtgttgatatgtaaagatattattttattgagaagtttgtatttgcgatttagatcacaaaaaaaccctcaatgagagggtcttaatgattatgcttaatttttaccagcccatcactgaccagttaaagactctgccaattatgtttaccgtattggcatcggcagtttcatctgggtaatcgaccgaattatagctccgaatgatcaacttaccttccggctgacgtaataatatccttactcgcagcagatctccttgttcaatggcatatatgctgccgtcaataatttttttgcatccggtaattactgtaactgtagagccattggggattaccggagacatactatccccatg

SEQ ID NO: 107 - DNA, 22514 bp, Xenorhabdus sp.
cataaaactggcccgaacaatatgggcaatagctgctcatgaccgtaaatacgaaaaaaatcatgtcagtatcaggccatattaatcgcggatacggataaatattaactcgttagaaaagggtgaatgctaaaaagttgctatggcagccagagtgatgacaaagacggtaagaccgtgacctgagaaacctgaataattgccagggcataaagcccgccagaggaataaggatcaggtcagcgaatctcatagtggcccgcagcgctggctgcaataaggccggatacagagctgcaactactcgtcaatgttaaaacaacggaagccttgcaaacggggaggcgttcatacagataataatgatccagaaaacaaatagaacccaaaatcatgatgacgacatagctagattattctgcaataaatcacaggttaatatattatctattatgtaatgatggtaggaaatactaattcttccatgaaataaaaatcagattttaaataataaaaatactatatctcctcttccattcatttctccttataaaagtgctggttttaacactagcactttttttgattgtaacgttaatttaattgatgacagcgaaaattatgtaattttccataagataatgaaaaaagttaagtgtaattcgttaattccgtcaattctccatcaattgataccagtctttacttcaaaagtgtttaactttcaaccaaaattgcattatcacttggaaaacaactaggatatcaagccagtcatctataggcttttttttcctcaatccggttaaaaataaatacaaaatcaaagatacatcttattttcatactaaccaattgagctatggtgtgtttattcgatacagtttttcctgataaccacttaaaatagtgctgtttttaacggttcatatccttgatggggtcataatgtccactcaatacgacaaattcgggcgtacttatcagtggtttttgctgatacttttaggcatggtctattttctatccacagcaacaacctttacgtcattgggtgttgtccttcccagcatgattaatgaactgggctggagctggactgatgccggtttagggttcacactgcttggcctgacctgcgggctgtccagtttcctgccaaccgtgtttattcgcagggtcggtgttcggttcacactctttattgggttactgatttttctggctggcttctacaacctttatcatacccatgccattgcatcatattttattggaacggctttaattggtgtcggttttacctttctggccactgtacccggcacctatgttatttcacgattatatgaaaaacagtctctggctttcgggttctattttacaattggcgggctgggcggcgtgattggcccgtggatctattttctggcaacccgggtctggggaacttggcgaatgcactggatgatctccgccatagtgctcactgtttttgttatcgtgactattttcacccttcgggaaggggaaaaggaaattgcccacgctaaagcaatcagccaaaaaaataatagggaaaactcatccagtatatatcgcacccaacagttctggacagcccatcaggcactacggacatggcagttttatgttattgcggccacctacacggcatttttgtggtgtggtattacggttaatagtttcgctgtagcccatattattgaaaatggtttcaatgaagccattgccgcaggattactaagctccatggcttttatcaatgcattctcaagactggccggaggtgctgtcggggaatggcttgagcccaaaaaattactgcttggtagcctgactatcattattcttggcttaatcgcgctgagtattgccttttcatggccattcctgattgcatttacgctgttcgtcggtatgggatacggcatgacttttctcgcttccagtgtattgctcgccaattattttggtcgtaagccttatctggaactattctcgatcatgaatctgatttctacattagcttgtttggctcctttcttcgctggagctattaaagattattccggtagttttacctgggctttcctcatcattgctttccctgtttttgctgtgttaatcgtaacaatggtaatgaaaccacccagccataaaataagaggcgcttcagttaaaactgaataggatgcctgtatcacccggaaattcactgttctgaagcatgggaagccaaagcttcccattctcggtaatgtgttaaaagtgaatagaacagaaacgttttatttattccggtagacgccggtattgcgcctgcctgcgcaacagccgcactcccagcccccccccgcaaagtgaaagtaacaggctgctgataaccggcaacagaagccacatcaaccactgtggctgccacggaaactcaaagacttgtgtctgtaacagccaaagggcgatttcagccccaaatgccgccgccagaccagccataaaaccaagcaaggcgaattcactccataatgtacgccgcaatagtttcttactggctcccagtgtgcgataaaccaccagctcaagctgcctctggctcataccgacctgaatttgtgccaataagagtaaccctccacatatcattaccagcacaaccatgatttccagtgcccggctaacctgctgcaagataccttggatctgcttaaccatagaaccaatatccagcatgctgatcgttgggaaatggcgattaatttctgtcagtaatttcccgtttccgacatagtggaagctagtcagccatgtctgaggctgctgtgccagtgtttctttatcaaaaataaagaaaaagttcggatgcagactttcccagtccactttgcgaatactgctgactgtaacgttaaaagttctggtgtcaccggtgaaagtcagtttatcgccgattttaatctgcaaccgatccgcaactccctgctcaagggaaacttcctttgattgcggcggccagttaccttcaacaagggtattgaacggcggtaattcttttttccatgttaagttaagttcacgccgtaccgtcgtgctcttcggatgtactttgtcagcccattcaagcgcagactgcccattaatttctgtcagacgcgccagtaccaccggataaaattccgttggctttacgtcatattgtgccaacagctcatccactgatgtgagttgtggttgagtcatattgatcaggaaataattcgggctatccggcggtaactgttgctgccactggttcagtaaatctcctctcaccattaccagcaatgccagtagcatgaaagagagtgaaaacgcggccaactgagtcattgtctggaatggccggcataacagcctgctcacagccagacgcaggctcagctgacgaaatgtgatacggcgcagtaaccacaggccactccagcctaatccacctagtaaaagtgcgacaacagggactcccgccagtaatgaccataatagtggttcagtccctgccaacagtattaatcctcctgcaataatcagagcaactacaggcaaataatagcgtagtggccagacactggcagaaacaccacttcttaatactctggagggttgggttgccatcaactggcggtaaggacgaattcccaccagcagagcaatactgagcagagcgccaatcgcccatacccacggccacatccctgcttccggcaacattttaggcaacatcgcagccaatacccggatcagggcagcttcaaaaaccagccccaatacggaaccaacaacagttgccgcgagtaatatcaccagccactgcccgataatccatttgcgtagtgcccaacgcccggcccccagcgttttcagtatcgcaaccaaattatggcgactgcggcaataatgcgtcatagaaaccgcaacggcagcgacagccagtaataatgtcagcaaggctgataacaacaggaattgctgggcgcgttcgatggattttgccagcgcgccattatcctgtttcaatgttaaccagcgttgatccgcttttaattcagggtcaattaattgttggaatgactgaatcgcatctggtgaaccagcaaacatgtaacgatatgtcagacggcttcccggctgaatagcacccgtcgcttgcgcatcatcgatattgattaagatccggggagagagctggaacggattgaaaccactatccggctcctgcaaaagttctccactgatcttcagtgtggtatcaccaacatcaaggctatctcccactttgatatgtaataacgccagcaaacgcggggcaaccagaactgaacctttttccggcttcagtcccggagggctggtttccagttcaccatacaacggataatgtttatcggcggcttttacatccgttagttgtggaacgtctcccgcataagtcatcgttgaaaatgagatctgtcggctgagtgtcagcccttttttctgtgccagttgcagccaggatggatcaacaggatatgatgcccgtaataccagatcgccggccagaaaatcgcggctctgataatgaacactctgatcaatacgatcaccaatacgccccagcgccaagacacaagccacagccagcgtcagcgataaccagacaatcaacagcgacggagtacgccactcacgccagaaccagcgccagatcatgcttcctcctgcaattttccgtctaccagacgtaagcgccgctgacagcgggcagcaagctggctatcatgagtgaccaaaatcagtgtggttgcataatcatggttgagtgaaaacaggagatccgcaatacgctcacctgtctgacgatcaagattgcctgtcggctcatctgcaaacaaaattttaggacgggtactgaacgctctggctaatgcaacgcgctgctgctccccgcctgaaagctgggctggcatgtgtttcaggcgtttacccaaacccagttgctccagtaattcgatagcctgctggcggctctgactttcagattctccgcgcagaagtgcgggaagctggacattctccagtgcattcaaagtggggatcaacataaacgactggaaaacaaaaccgatattttctgcccgtagctgtgcccgctgttcctcattcatacggctgatattctgccccagcagatgaacttcacctgaactgccgtcatccaaaccagcaataatacccaaaagggtcgatttccctgaacctgattcaccaattaatgcaattgtctgcgctggctcgacaagcagctcaacaccttgcaatatattaattacctgttccccttcaccaacatatttaatgagattatgaactttaagagcacactctacagccatgtatttttccttttattgttaatgctatgcagtgccagagcaatggcggctgatactctgctgatattaggagacagcctcagtgcaggttatcgcttgccgattgagcagtcgtggcctgttcttatggcaaaccagtggcatcaatccggtaataaagtgaatatcattaatggtagtatcagcgcgaataccgcagcacaaggttttgaacgcctgcctgaattactgaaacaacacaaacccaaatgggttttaatagaactcggggctaacgatggactgcgcggttttcccgttcggcaaatagaacaggatctgcaaaaagtcatttcattagtcaaacagagcaaagctcagccgctcttaatgcaaatccgcattccgcccaattatgggaaacgttacaccgaatcttttgccggaatttaccctgctttatcaaaaaataatgatatccctttattgcccttttttatggagcaagttgctatcaaaccagaatggatgcaagatgacgggttgcaccccaatcaggccgcacaaccttttatcgcagattggatgtccagaaaactatcggcatatattacccataagtaaaaatgttcacttattaatagtaaatcatttatgccagtaaattgttgtaaattgacaggtaaagttatgcaaaaagccattcttattacgggatgctccagcggtatcggattaaccgcagccaaaacacttcatcaacgtggctatcgtgttttggctgcttgcccgtaacctgctgatttagcacatatgcgcgaattaggtttagaacccatcgaactggatttagatgatccggaaagtgttaagaaagctgctgagcaagttattgagttaacaaatggtcgtttgttcggattattcaataatggtggttttggcgtttatggcccgttggcgagtatttcccgtgaacagatggaaaaacaattttccaccaacttctttggtacccatcagctgacgtgtctgcttctacccgcaatccgggcgaatggtgaagggcggatcatccagaccagctctgtgctggggttaattgccacgccgggacgtggtgcctattctgccagtaaatatgcgcttgaagcctggtctgatgccctgagaatggaattagcaggaagtggaataaaagtcagtctgatacaaccgggaccgattaaaacgcgtttcacagaaaatgttgctcagaccgagattgataaccccgtcgaaaactcggcaatggctcgccgtttaacgatgacgccggaagatgttgtggaaaaattaatccatgcactggaaagccctaaccctaagttacgctatcctgtgacgctaatatctcatgctgttactgttctgcgtcgcctgctgccagcaagattaatcgataaaatcgtatcttcgcattagtcatcagattgaaaaaccggcaagccagccctatgtatactttaatgaatgcccatataacgagagagaacccatggaaccaacaatgaatactaacagcaacactgctcagattgttcgcattaatgaagcaaatatcgctcaggttgttcaacagtctctaaccacacttgttgtattctatttctggtcccctcaggatctgcattgtcatgaattagagtccaccctcgataaactcgcccatgaatatgccggtcaatttattctggcgaaagtcgattgtgaccaactgggccatatctcggcacaattcggggtgcggactgtaccaaccgtactttttgtgcgtgaagcccgccctttccacggctttgaaggggtacaaaccgacgaaaacatcagaaagatgtttgcccaaattctgccactttcaggaaagtccccgctggaacaggcaagtgaattacttgttgaaggaaaaaatcaggaagcgctgtctttactgaaagaagctcatcaggaagatccgcaggatatggaacttagcttatttttggctgaagttcatatttcattcaatcatctggaagaagcgcaaaaagtactggaaactattccatcagaagagcaagaccaacgttatcatgatttactggctaccattgaatcacacaaacaagcagcggattctcctgaaatcaggcagcttttgctggaaatggcgtctcagccggaaaatgcggaacttgcgcttcaattggcgtctaaattacatgaagtcggacgtaatgaagaagcgcttgaattattgttcggttttctgaaaaaagatctctctgctgccaatggtgaagtgaaaaaaacactaatggatattatcaccgcgctcggtaccggagatgcactagcatccaaatatcgtcgtcatgtatactctttactctattaattaagcgcatttatgtattccatgattaactaataaaggaattgttatggatttactttctctcggggctgtgcccattctgattattattgcagtcgttatcgtctttacctgtgttaaaaccgttccacaaggatatcagtggaccgtagaacgtttcggccgctatacacgcaccttaacgccggggttgcatattctggttccgtttattgatcgcgtgggtcgtagaatcaatatgatggaacaggtactggatattccatcgcaagaggtgatttcccgcgataacgccaatgtcactattgatgctgtctgctttattcaggttgtcgatccggtacgtgctgcctatgaagtcagtaaccttgagctgtctattatcaacctgactatgactaacttccgtactgttctgggttcaatggagctggacgaaatgctgtcacagcgcgatttaattaacagccgcctgctgaccatcgtcgatgaagcgactaacccgtggggggtgaaaattacccgtatcgagatccgtgatgtgcgtccaccgaaggaattgatctccgcgatgaatgcccagatgaaagctgagcgtaccaaacgtgcggatattctggaagctgaaggggttcgtcaggccgctattctgaaagccgaaggggaaaaacagtctcagatcctgaaagcagaaggtgaacgccagtcagcattcttacaggcagaagcccgtgaacgtgccgcagaagctgaagcaagagcaacaaaaatggtttctgacgcgattgctgacggcaatatgcaggcgattaactacttcgtcgcccagaaatatacggatgctcttacgagtatcggtgcagcagataatagcaaagtcattatgatgccgctggatgccagcaatctgatgggtgctatcggaggcattgctgagctgattaacgaaagtaagaaggatagacaggataactaactatgattgaacagatagccactcaaccggtctggttctggctctgttttggtggattactgttaattgctgaattgctgggtacggggggatatttgctgtggacagggattgcagcggtcattgtcgccctgatcacatggatttttccctcaatgagctgggagctacaaggcatactgtttgccttattaacattactctctgctatcgcgtggcgggcctggttgcgccgccacccacaaaagagtagtgatgagaggctcaatcagaaaaatcagcaattaatcgggcagcacgcccgcttaacgacagatactgaaaatggctatggacgaatcaaactggctgatggtagctggcgcattcactgtgaccatgaactcactgccaatacagaagttgaaatcatcgccgtcgacgggataacactgaaggttaagccgatataatacggggtggcaacaaaccgacacagaaaatattaaacccttgttgtcagttaatgcagttaaccattcatcaacgacactcctaatacaggctggccatgccagccatatttaacctttaatgaaaccaaacgatgaatccgatggaaaatgttgaaaacggccattgattggagtttagtaatttccgtttacaatatgttacaggtaactgaattatcattcatttatcgttatatcaaaacttatcaataccacataaccctagcaaacaagcacacctaagctctgacaggatgtacgtttcttctgaaaagaacagcagaaatgacagctccacttcgaacgaatagtcaagataaaaatatttcaatgtagcgaaagttaaaattaatcgaatacccagttctgagaaaaacgaatagggatttaatcatgacttttaaaatcatttgctgcgatggcggcggaattcgtggtttgctaacagccagacttattgaagatctcgataagaaatttcagattattaaaagaaccaatggatttgccggaacatccacaggaggcttattagctctgggcatggcacatggtgtccctatctcaaaaatggttgatttatacaaaaaggagggagctaatattttcatagtccatagtttattacagaataaatacaggcctggaatttgtgattcgcaggtcaccaaactcatccaggatttagataaacaatttcaaattactaaaaaaaccagtaggtttaccgggatatccacagaaggaatatcatcacaaggtatgccacaagatatcactctttcgaaaatgattgaccggtgcagaaatgatggtattcagcattttggctcgaatgaaatatcattgcaaaatataagcagaactagaggggtttccgctcaaaatgatgaacctcttggaagacccggtgctatgggcacaagatattacaactatggcctgagaaaaattctacaggaatttttttctgatgcacaactatccagctcagaacgttttatagcgattaatgcagcccagctttggaacgaaaacaatcaatcctggctaccgtgtactttttccaacctgccagaaaatccctttcgtaatatctccatggttgatgcagcaatggcgacatctgcggctccaacgttcttccagccatatcgtattcaggtgaatagcacggattttggctatttcgtagatggtggagtttttgccaataatccgtccatgacagcacttaccgaagcattatccctgaagggagtttctggcccaactgacatccgcatgctatccgtaggtaccggagatatgtctaacggagtgacttcgatcaatttcgacaactattatgcaccgttaagctggggagcaaattggtggttgtggcctctgcggtgggggaacaaagatgagataccaccagcagctctgttgatgctcatatttgaaacgacagctaagatggcagaatttcaggccgaaaaaattcttggaaaaaactatttacgcgcaaatttttcgctcagcaaaccgttcgatatagacaattggcaagatatcgaaatccttgaagctgaagtggataaatatttgcaaacacctgactgggagcgcatatgcaatcaggttaagcgactctggatataaaatattttcactatacacaggcctctgacaattaagctggtatcatcaaccatgttttggcacaaataccagatagttgttcaatgatggggcattcagcgccatcatctcccggacattcagccgccagtgttaataactttttcctgatattctgtaattctgcaatcgttttttctatttcagccactttttgcaatgttgtagccttcacatcaatactatgacgattagggttgtgaaataaccgtaataattcccggcactcttcaagagtaaaccccacctccctcgcctgtcgtaaaaggattaattcatcaatatgcttctgctgataaaaacggtagccattctcttcccgccccggcgctgtaatcaaatctttttcttcataaaacctgatagctttgctggttaagcccgttttctgggcaatttcactgatattcattattcccccttgaccttccccttgcaggaaggtttagcctaaacagataacgagctatccccaataataatagtaagtatatacccaatggatttcgagttgcatcgcggcgtatatcactctgtttcaggagattttattatgtctacaacaaccattcttgcacttcagggcttaacctgtatgcactgtgtcagcagggtcaaaaaagcgttggagcatctacccggagttgaacaggctgaggtcacccctgaatacactaaagttatcagtaacgtaacacctgatgtcttgatagcggctatccgtgatgctggttatcaggcttcaatcgcagatctccccgatattgcgttacaactttccggattaagctgtatgaagtgtgtcggcaaaacccagaaagccctggaatcagtggaaggtgttgttgctactgaagtcgataagcaaacagccagaatttacggcaaggctgacgaaaatgccttaattagcgcagtgaaacaagcaggctatcatgctgaatcagtcatgagttcgcatctcccaaaaaatgagccgctgacaacacctgaaccagaatttttgccagcggcaacagattccacttctattcctatcacaaaatctgataaaaaaactggctctggtgcttctcataacagcgacgacagcattcagcttctgctggatggcatgagctgtgcaagttgtgtcagtaaagtgcaaaaagctctgcaatctgttgaaggtgttaaaaatgccagagtcaatctggcggaaagaagtgctctggtcacgggttcagcttcccctgatgctttggtcaatgcggttatcaaagccggttatggcgctgaaatcattctggatgaaactgaacgccgggaacgacagcaacaaattgcacaagccaatatgcgccgtttccgctggcaatcagccctcgctctgattgtcggggttccggttatgatttggggcatgataggcgacaatatgatgctcacaccggaaaatcataccatctggctgagtattggtctggtgactcttgccgtcatggtatttgctggcgggcatttttatcgcaacgcctggcaaagcctgaaaaatggcagcgcgacaatggatacattagttgcactgggaacaggggctgcatggctatattccatcagcgtcaacttatggccggatatttttccacctcaggcgcgccatatttattatgaagccagcgctatcattatcggcttaattaatcttggtcatgccttagaacagcgagcacgccagcgctcttcacaagcacttgagcgactgttggatttaacgcctccaacagcccgagtcatcacatcagaaggcgaagtatcattaccgctggctgatgttgaacccgatatgacattacggctggtaacgggtgatagggttcctgttgatggagagatcattcagggcacagtctggctggatgaagcgatgctgacgggagaagctattccgcagcaaaaaacactcggtgatacagttcatgccgggacagtcgttcaggacggaacggtactgttcaaagcttcagccgtaggcagccaaaccactttagccagaattatcaatctggtacgtcaggcacaaagcagtaaaccggaaatcggtcaactggtggataaaatatcctcaatatttgtccctgtcgtcgttgttattgcattggttgccggtgctatctggtattttgccggcccggctccacaaatcatgtatgcactggtcattatcacaacggtactgattattgcctgcccttgtgcgcttggtctggcaactccaatgtctattatttcaggagtcggaagggctgctgaattaggcgtattaatacgcgatgctgatgccctgcaacaggccagtcaactcgatacccttgtttttgacaaaaccggaaccctgacagaaggcatgccacaggttacggaaattcatactttcaacggctacacggaagaacaggtattactgtgggcaggtgcgctggaaagcggttcaaaccatcctttagcaaaagcaattctcctgaaagctgaagacagaaaaatagagagtaaacaattaactgacgtcacgcagtttcgcactctggcaggcacaggaattagcggcaatatcggtaacacggcactgctgttaggtaatctgagcctacttgaacagaatcaggttgaaacaagcacattacaacagcaagtagtacaacaggcggaaaaaggtattacccctgttcttctggctgttgacggtaaaatagcagccctgttttcaatacatgatccactgcgtcaggatacaatctcagccctgcaacgtctgcataagcaggggtatcatttagtgatgctgacgggagatcatccggcaacagctcatgctatagccaaagaagcgggcattgatcaggttattgctggagtcttgcctgatggtaaggcagcaactattcagaccttacaatcagagggcagaaaagtagcgatgattggtgacggaattaatgatgctccggcattagcacaagccgatgtaggtattgcgatgggaagcggcagtgatattgctattgaaacagcatcaattaccctgatgcgccacagcctgcatggagttgccgatgccgctgaattatctaaagggacattacgtaatatgaaacagaacctgttcggggcatttatctataatacgctggggatcccgattgcagccggtatcctctaccctttcaccggtacattattaaatccggtgattgccagtgccgccatggctctctcttctattaccgtagtcagtaacgctaaccgattattacgctttaaaacgaaagattaactgatctaagcttcggaaagctaaacaaggaagtttagctttctacttatcatacacaccctatggatttcgcactttttcacactttcctgttaacctttaatacattagcatatcaatttacgtccattaacggagttgtgaaatgggaaaacttatgacctatctcagtaatgtattaggactaaattcccaacgaaattacccctatcctgcttatgatgtcactctgcctgagaacaaacaattacatattgttggcagtatccatatgggtacagaaaatatgtatccactttctgaagtattgctggaacaactggaacaatgcaatgctttaattgttgaagcagatattacacagtcagggtcgccatttcagcaaatactccccgagcaggccgggctgtcacaacgtttatcatctgaacacttttcgtttctacagcaatactgtcatgagatccatcagccgatagaattgctggatcgtctgccttcctggcaggttgccctgatccttcaggctgctcaggctaaatacctgggaatgagtcctcaatatgggattgattaccaattactgaacagtgcaaaagccattgataaagatatcatcgagctggaaggaacagataagcaaatcaatttgcttaccgagttgcccaatggtggcctttctctattagaagacactcttgctcactggcatactaacgcccgagctttacaaactatgattagctggtggatgaattacaaatcagaccagaaaaacccggtattgccacaaactttctgcgacgctatttaccaaaccctgatgactgaacgtaactcccaatggagtgtgcaattgcgtgccttacctgcgggaaaatatgtcgtggcggtcggtgcattacaccttcatggtgaaaacaatttgctacagttgttgcagcaacaagaataaaaaacatttcaaataattgagagcttatataggacataacatatgacccccgccataattcttctcgaaaaacaaaaaattaattttaagattcatccttacgaacatgatgccaatgaacataattttggtgatgaagtagtcagaaaactgggtttagatgcaacaaaagttttcaaaacccttttggtttcattaaatggtaatcctaaaaatcttgttgtcgctgtcaccccggttgcagggcaactggatttgaaaaaagtcgccaaggcatttaaagcaaaaaaagccgatatggcagaccctcaacttgcacaaaagattacgggctatctggtaggaggaatcagtccattaggccagaagaaacgtctccctactgttattgatatccaggcagaagctttatctactctgtttatttccggaggcaagcgaggactggatattgaactggcccctactgatttatgccaactactaagtggttcatttgctgatatcgccagaatttgaaaatcaattgtaattacttctaaatttttcgagccggctctgttttcccaaaaacagagtcttgttcaattttctaatatcgatatactttccttatagcaaaaataatattacttactattttaagtaacttaatatatttaaataaaaggagataaaatggctacctcgtcaattttccggcaaattgtgattactgatcccaaggcaattaagatgttacgcaaggctaatagaaggccatttaaaaccgactttgaaaaaatagacattgacgctcaacaagaagaggcgatagaaatattaaaacgaaaattctcactttaagtaaagtattatcgatactaggcagagataaaaccgcaaggtatttactttcattctcctgccccgtaaacccagatgtagaatattttttacatataaatgcaattagatttgaacaggctgatgtcactaggacatacctgatagtgaatgaaacagggttaattcttgcctacttttcattaacttttaaggaattaaaaacatataatttttcaatttcaaaaacaacgacaaagaaactaaacggtatcagtaaaaatgctaatacaataaaggtttatttagtcgggcaaatagcaaaaaacttctccattaggaaaaatacgataaagttaaacggaatttttacttatgtgaaaagtattattcttacggtaaaaactctgattggaggaagagtaattgccttagaatgtgaaaacaacaccaaacttatcgaactatacacttcaaatggatttaaaaaattacccaaaaaagaaggagagaaaaacacgctaataaccatgatattaaacaattaactatttgctttcaatcatacctacttcagattatttattaccattccaaatggtaaatcataaccacccgtataacgggtggtttgctcttgccctataagggcttgttaccgactgcgcctaaatgacgctgctttctcttcgttcaagctaagtgtctttgctgctttggcctaccccttgaaggggtctacatgctctttactactcaatttatccgagattaaatccgacttttcttgctctctgatatacttttgaattgtcgcttcatttagccctaccgtactgacatagaacccttccgcccaaaactttctgttgccaaatttatattttaaattggcgtgtctatcaaagatcatcaacgaacttttacccttcaaatatcccataaagcttgaaacgcttagctttggtggaatactcaccaacatatgaacatgagctggcatgagatgaccttcgattatttccacacctttatacttacaaaggtctctgaggatctctcccacacttgaacgaatattattaaaaatcactttccgtctatatttcggcgaaaagacgatatggtatttacacagccactttgtatgcgctgagctttgtgctttaatgcccataaacacctttccttatttgagttacgaatattagcttgaacatctatatcgtaacggaaaggtgtttttcttggtataacctttgaactccacccgcaaagcgggtggttttatgtttaagacgctaacgcgacttaaactggctaaagccataaataaaaaaatataatttaataaagacagctaaagccacactgacgcgctacgcttgtcttctccaagttaccgggctaatgcattaacccggtaacttggatagctaaaagatcacctaccagagaaaacatttttacctcccccctccctattaaagaattatggataaaactgttcaccctgatcatctttgagtatttttatttaaattcatgttgttaaagggtgatgagttgaaattaaactcatcaccactcttcacccaaccgttcacctccaaccagaaaaaaggtgaacagtgatgaatagttgtgaacagtttaaaaataactattcaccctataatactttgatatatttggtttaaattatagggtgaacagtggtgaacacttttttatatttatttgaaaagtggtggtaatcagaaaaaaaattattcttctggctggctattccttgtcagttttggcatccattcgatagcggtatcaagattcaggctcagattgctacgaatgccctgtttgcttttcttgcgtaaatattgctggctgtactccgccagtgcgcccggcatatccatcccgaagcgagtcacggaaacaggtttattcaggttattgcctttcatataagcaagataggcgtgataaaggtatttacggggattgaacggcataatttccgcattaccgattaacaaaccgtcagcttcatgggaagcaatgagataaccgcaaaaatcgaccagtggatctgtgccgcgtttgatatccagcgcctccgcagatttctgttgctctgccagtaaacaccttgcagtttgcggatcaaggaatctgtgaagcaaatgtctaataatcacgggcaattctgccgcaattttattccgcagaagtggatcgcgttcattttccggtacgacttcggaaaagttaaaaataacccgacgccgcgacacaccaccactgcgatcactgaaactcatggcattattatttactgccagcactaccgcaggaatgcgggttgaataaggttgtttatgctttggatcaatagcaacttcatcgccgcctgtaatcgccttgatgccggaaccatcacctacataacgggtttggtctggcaggataatcagcgaatagccgacaatcaatgcccgttcccgtgggttttccagtgcggccatacttgccgaaacagtattgcctttacctgccagcatggaacaaatttcggcaaagatgcttttgccactgccttctgctccggtgatttccagaaaaaattgccagtcataacggttcgccaacaccataaacagcgccgctagcactctatatgccttgttttcacagttagctgttgcctgattgagccagcgccagaattgtgatgcgtgatcttgcagagtttccctcgaaacaggggaattgaattcaacgtcattggcaagcaatagccaatcatctttgcggtgaggccgaaactggcacgttttcaggtcaaaaacaccattattgaatccgattaagtggcgttctggtggttgcatcatgggaagctgtaatttcagggcatctacggcagagctgataccatgcggtgaatacggtaatttttcttccataaaggcggcgaccatttcccgtcttaaatcacggtcactgaccggacgccagataatactgtcatagtgatgaacggtttccgaagcaccatccagtgccagatcaccgttataacgtgacagcaatacttccccgcgttggctggctcccatctgacataatgtcagttttgaaagctcggcatcattattaagctgaatggctgcttttttcttggttgatgtcggttgataaagcccttgagtaaaggcttgttttgccatatccacaccatgttgctggcgataatcatcccagtcagctttgtactcagttggtggtaacgttacccatccgttgatcgctttggctgttttctctgctgctattttgccaacattcttttttagcctgccgtttttgtcttgttcttccggttcgtgcctgtcgttatcagcggcaattataattttggagtttggatactgctctctagcccgttcggcaacaatcaatagattactttcatcaatcgctgccaataccacgcctttatgcagttggctgacagttaaagctgtagcataaccttcggtaatgatgattgtgtccggcgttccagtaatctcagttaccagaataaaactgccttttttctgtgtacctacaacaagtcgtttttcaccatttggcttgatggtctgtgcgccagtaattgcgccatccagtgtctgagttaccagcaataaagaaccgtcttttaacatccgctgattggagcattgcagtccctttttcaccagatattgagattcccccgcaacagcagtggcaaccagtgccgcgatacgttcagcaattggcttagcgttcctagtcagcgttttggctagtttggattctggcacaggcaatgccagagcatctacaacaacctttgctgcttcaaaaattgagatccctttggtttttgccactaaatccaatccatcgccaaaattcggagcatcacactggcgacaatgccaattgccataatggtgatcatcaataaagtggaaacggtcattaccaccgcagacagggcaagcgccatgtttaccctttgccggaatatcaataccacatgctggcagcagattttcccagtgatacatggcggattttttcacagactggataaaatcgagtggtttttgttcgtctgttttatatgaagatgtaaatttggggtgagtttggttagactgtgtatcagccatcatcgttacctcatttatccccttccggccatgagacaatcacccacgggagctgtgacagatcacactgggcaatgtctaactgactgggctgggtggtcgcatccgggtgactgtggacaatcgccactatcgttccggcatcttcggcagttgcgtaatcttctgggtgaagactgaattgctctgttgggactgaggcggtattacggcaggggatatactgttgcttgcgactgttctgaatcaccagtccgcagcattcattggggtagtcggctttggcgtgttctaggatgctactgataatgtgcgggcgcagtatttccatattaacgcctcaataacgcagaaccgggaaaaccaccaaagggaagttgattacctattccatggcgcggctcgcatcctgttgataataaccctgagcacacatcctttgacggatcgtccgttgggttgccctcttcatcaaaatagcgcgttcccgtgtagttacagggagatttgcgatacagcccccgcatacaccatgtacacaaaccgtgaatctggcgcgtggggatctgaatcccctgcaaatctgccggggaagataaagcaaactgaacgctttcattgtcctcgtgcgtcttgctgtcgatgtaaaaaacgtctattttttcctgtgtcgggtctgcttcgggattaccttcggggaaattacgcgcatccagataatgtacaaaggtcatatggatagtaatacgcgcctgcaccatgttctgataagccagacacagcgcactgatcgtgccgtccagattggcgacctttaacgcgggagaagcggtactgccatcactctgaatttccagtcccttaatttcaaccggccatggcttatattctaagccctgccaccagagagatttcactggcagcttatcaggatcagtcaattcggtctgggtatagggaatggggtgactgtgaaaatacagctctggtccgccaaacgccgaaccatcaagggtaaacaataagactttgctccccggcaccagacgctggagatcggcttgcattgacattatcgtctcctaaggttgatagctggtttcaaaggcagcagacagctgatacatctgttcctgtcggctattcatacccatggcagtaatccggtgtccctgacagacatataaacccaattttgacagtggattccgccatgtaaaggcacgatacccagcatgacgcaccagaaattgccggatttcttcaatatagtccagattgcccacaaaactaacggtccagctttgatgttcgttattcagtccgctaccgctgcgttgcgtgtacccgtcaccaaactgcactgtgcgcacccgttgtgtgatatcccctatcgggttcacgcgcggaatataggtaaattcttccaatgccattatcggcctcctctgatagcccggttaagtacaccaccctgacctaaatcccggttcatcaattcccggtaacgttgttcgacaaaacgcccgatctcactgccgaactgttcccagcccggtgaggtcgtttgagtggtttgttcattgctgatagtgatgtagacctgaggtgctgcaccggcggtattcaggttttgtccgactaacctgaccccgagactgccattactggtgcgggccagcggcataatcgcttcgggaccggcttcccccatcagacctgcccccttagcaaaagcaaacagcgtcgggctattaacaatttgtccactgtactgactcaggttggccgaggtataaacgccgcctttggcattctgagtgaacatcgacgcaaagccactgaacataccgccgccacccattgaccccatccctttcataatggtgttagtgatcaaggcctgtgccgccattttgaccagacttttcaccacatcctgcgccagtgacgcgaacagctccgacatcccttcccgcagggatttactcccggtcagcaggccggtgaccatattccccatccgctcctgcgtggtctcaaacatcgtgacggcaagtgactgtaactcaccctgactcgcaaagacctgtttggcggcttcaatccgtttactgtccgtatcgcgttcggcagcaagaatcagttcacctttgcgttgctgagagataacttcggcgtcagcataggtctgataaagggcttttttgcgttccactttagagca

SEQ ID NO: 108 - DNA, 31141 bp, Xenorhabdus sp.
gctctaaagttacagcaggctaattcaaatgacaaatgtgcaggtactgtaccattttcactatccattggcagaaaccggatagcaaagcgggttttgtggccagaaacttgcggataaattaattggttttccgaaatatctagttttaaccttagcagatcggcatcaccagcattcccctgaaaaaaaccgttatggcttacctgagaagagaacattgttgactgtcgtatcagttccagaatgctttctaatgcctgttttagtggtaggagactgtttagccaagagctgacggtttcatcccgggtagactgtggcagatgaagccacagatacaatgtcggcagatcaaaactgcaacatccgcccggaatactgagccgttgacgaaccatgctgatgattcggtcttctttaatctgttggctaaggcggggagcatggtgtaatgcaaggctccgctctttcagttgctctaccagactgtgaaccatcgtcgtatctacattgggagcattgagccattgtcttaattttatttgctggcgttccagttcctttaataactcagaacgtacttcaccacgttccagtatctcaattaactcggcgattgtgcgaaaaaatgccaagctgtttgcttgtgaatccagatgagactgtttttcgagttgttgcagtgaagattcaatcctcaaccatgaacgcattttttcatttagcgggtgttcaaaaataatagtagaggttgcatcactcattgcgttcttcctgtctgactgattctgcttgtttcaaatattgttgatgtaattcggctatacgtacagtgagatcttgctctttttgatcgtttaatatgacatcatctgctttttccagacgttcattgcggtcagcctgtgcagccagaatattttcaacctgttcccgactgacgccatcacgcgtgattgtccggctgatttgtacttcaggggagacatcaactactaagattcggtcagctaaatgcattaaattattttctattaacagaggtataacccaaatagcataaggagcgttgatttggttcagttgccgttgtgtttctgcgtgtatgagtggatgaagaagtgagttgagccactgtttttcttctggggcagcaaaaattttttggcgtagcacggcacggtttaaactaccatccgataataggatatccgaaccaaagtgttcagcgattgtctttaatgcgggagaaccaggagcaacaacttctctggcaataacatctgcatcaacaagcgggacaccaagggatgaaaatacattagagatagttgttttaccactaccaattccacctgtgagtgcaacaatataagtcattctatccttcaaatattctgatagcctatataaacaaattgtaactcaagggaggcatatgggctataaacaaacatatataattcttgttattacaatcatgctccacttacatagttatcgctccccttggtagattcatatcagtgccgccacaacataactagaaattcagtgtatataatacgttacgtcaaaatagtacccaattgaaaaattggcaaatacatagcgagtagtaacaggcctacaattattgccatgatcagcattaatacaggttcaagtaagttagctaaattatcagcacagtttataaattgctcttgataccatatcgctagattacctaaaaatagctcaagttcacccgattcttcaccaattatgacgaactgtttacataatgggggaaaacaatactcttttttcaaggcatgactcattggtacaccttgctgtatttttcgatgaaggtttttgattccagctataaataaaggatgatgggttgcgtttattgcacattccaaaccaatggttaaagttaatccagctttttgagtcataaacagaatatgaaatatctggctggtatgccgatatgttatgagttttttgaaaagtggtagccgggtgaaaagtattttttcttttttgtgtaatgtaggaaatcgagagcgtaacgctaaataactaattgtcattattaatgttgttatggaaataaaaaaaccatgattagtcagaaagtcagaggcagataagatcagctgtgttaataaaggtagtgaggcaccaaatgcagaataaacttgtttgaattccggtagaacgaaaataatcattaataagataacaattatagcaacaagagaaattatcaatggatagcgatacgctttttggaactttttatgtaatatgttctgttgctctagtcgattaataagcaactgacagcaagattcaagttgacctgtttgttctcctactgcaataaactggcagaataaaggagaaaacagttgtggataattctgtaaagcggtagagaatgattctccctgactaatcttatggataatatcagctaatatgcatctccagataacatttttacattctggtaagagaatattaagagcctgtaacaaaggaatacctgatgtcagcaatgtatttagttgttgggtaaaatgtagccgataagccatttctttttcactgtaataaataatctgtcggcgtttaatggtgtagggttgtagctcaagctggctcagatagttgaaaatcacttgtctgttctgacctatattttctcctgttacaatatttccttttttattcacagctttccagtgataaataaattctattttcattctttgccttctatatggatattaattgattatgcttcctggcctagagtctgataaatctcttccagagttgttatgccttgcccgaccaatgttaagccggcagataaaagcgtgtctttttgttgcagggttggtaagcagggaatcttgccagaaggttgttctgataaaatctgttgaagttcaggttttatttttccatataaaaggttaaaaccaccgactttagtcggtcagctttagctgcgatactgtgttgcacgagaggtgcaatatggattacagatatggcagccacacggtatttcagattgagtatcattttgtgtgggtaacaaaatacaggcgcaaagtgctaacaggtgaagttggtttacgggtgagagagttagttcgtcagacctgtgaagcgttcgaaatcaggatagtagaaggggtcgtgagcaaagaccatgtacatatactggtgagttgtcctccgagcttagcgccctcagaaatcatgaggcgaataaagggaaggacagcaagtaagttgtttgaagagtttgctcacttgaaaaagcgttactggggtcagcatttttggggcagaggctatttttgtgcgacggtaggtcagttaacggaagagatgataaaggcctatctggcgcatcattttgaaccgaacccgaatgatcacttcaggctggataattgacgcatcgtttagccgatgcgtatccggactttcagtccgttaatcactaacccaccgactttagtcggtggttgttgagttcgagaaattcatagatggctgtcctgccataatagccagaaaagcagtgctcacagccgacagctacccatgtttttactgttatattttgttttgtatcgttatttccagtatgtatgaattcgggcttttctgcgggttgacgacaatggggacaaagcttacggactaatctttgagcaataattaatttaacacatgaagcggtggtataacctgaaattcccagatgttgcaggcgtgataaggtatctatcgtcgaattggtatgtagggtggataaaactaagtggcccgtttgagcagacttcatcgatatttcagcagtttcattatcacgaatctcaccaaccatgatgatatcgggatcctgtctgagtaatgcccgcaaaactttggcaaaatctagcccgatttttttatttacttgtgtttgattaattccctgtaaggggatttctataggatcttcaacgctacagatgtttttctgcgtttgatttaaatatttcaggcaactgtataatgtgagggttttcccgcttcctgtagggccggttactacaatcattccctgtggtaggtgaagtttttgaactaaaagccgtagctgagattcagacaggccaagttgttctaatgatagctgttgtatggtgctgagaatacgtagaacaattttttctccatacagggtgggtaatgttgagatacgtattgcataacggttcttattatcattccagtcaaattgcccatcttgtggctgacgtttttccgcaatattgagtttcgccataatttttaaacgggcagggatgcctgtattcatttgaggaggaggtggtggcataaaatgtaatgaaccatcaactcgaatacgtatttgatagttattttgtaatggctcaaagtgaatatctgacgctcttttttgtatagagatagataatgtttgattaattaactgaataacaggagtgtcaatattttctgaattattttcaatcatttgtttttcattgtaattgttatttggagtggttaaattttctatccgataggtttctgtttcaccattttctgagcaatagttttctgtgtaggaaggtagtatgtttttttttgtcaacatggattctattttggcttttggccaaatattaaaatcaattattgcaccagaaataaaacgtaatgcagtaataaactcttcattaggtgattggctacaggcaatagtgatggaataactatttctttttataatgattgcctgatgtttctggcatagttcgtcaatttctttttccattaaactgctttccatgtttctcattcaatgtattcctttggttttaaaaacgaatggctgtttttgtaaatatgaaaatgtttacactttcagtggagagttatatttacgttataatttaaattctaatatgtttgtttttgatttttttaaaacttaaatgtttcctgacattttgtttttaacgattcactttcagaatggcacataacttgccagtgagtcataccagttttggtatcttgatctggttttaaggtgatactcaggccactgaggtttttctgtccaataatatttgcttctccttcttttactgtaattgtattgatgtaacggctattaaatcctgatggaattgatttatgcccagaactgcattctttgtaatttccggtttcaaaatgacaaatgtcgatgccagatttataaggaacaatagattgtagcatatcagtcagtgctgccttttggatatatccctgataactagggataccaatcgcaccgaggatagacactattgccattaccaccataacttccattaatgtaaatccttgttgattcatattattgcttcctcattttgtgttttttattcgatctctacatggctctattattttttaaaatagaagcatgatatttattatttgctgatgccagttagaatgaaggttttcttaaaaaataaaataagataaatgaaatttatggaagcgattcaaagaaaataattattaattacattttataccaggaagttttcgagcttgctcgcaaatgaaaatatgaacaaaaatactcctcgattgaaaaacccaacctgttacactttggctgcatcttgaaattcatagggtatatactcaataggttttgaaagatggaggaatctagggtatgaggttgcatgaagggtggattgttgatgccagaaaggtgatttcaccgcattatgatctgcgtccagcaggggaaatcccatcattattggttatacataacattagtttaccgcccggtaagtttggcgggccgtatattgatcagctatttatggggacgttagatccgaatgaagaccctttctttcaggaaataaaaggattaagggtttctgcgcactgtttgattcgtcgtgatggtgaagttgtgcaatatgttcctttcgacaaaagagcctggcatgcaggggtttcctgttattgtgagcgggaaacgtgcaatgatttttcaataggcattgagttagaaggtacagattacgagccatttactgaaattcagtacactaagctggcggaggtgactgagttacttatcagtcattatcctgatatccgtaataatattacaggtcacagtgatatcgctccgggcaggaaaactgacccagggccttatttttactgggaacagtatcggcagctattaaaggagcgggttggatgactctctttattctattgttaatactggcatgggaacgcatttttaagatgggagatcactggcagttagaacattatctgtctcctttttttgccagagtaaaagtatattcactgtgggtcagtttagtgatggcatttgtggttgcttttttgacctggaaaattattgatgtactgagtgttattgcttttggtatccctgcgatcctgttatgcatcatgattagcttgttatgtattggtgccggttctttgcgccatagttatcgggaatatctccgttctgtacgcactggtgatttagagcaacagaatattcatcttacaaatttactcataaggcaacagaacccggctgagatgacaaaagatgatcgattgcgtgaaatacagaacgcattgatctggataaatttccgctattatcttgccccgattttttggttagttgttatgggggagtttggtccggccattttaatgggatactgtttcctgagagcttatcaaagatggttggcgcaatgcagaacttctgtgcagcgtgcgcaatccggggttgatgcgctattaaattgtttggattgggtaccagcacgtttggcgggtattgcttatgctttgctagggcatggggaaaaagcgttaccggcctggattgcatcactgagtgatttgcggacatcacaatataaagtggtcagtcaattggctcaatttgcattgagcaaggaacctcatttagatcttttgaatagcccccttgctgcggtaaaaattgcgaaaaaagcaacatttactattgtgattattgtcgctctgttgacgatttatggggcgctagcataaaaaaatcccgcctgtgtctatatgtgacatctggcgggaattactttaaaaggatttttataccgttcattttttcaggttgtagcttccggctagtgatactgctaatgggcatcattgaccccagttagacaacttgaaatatgttggtatatatcaaattagcctgagtatacccttaatctttagagtaacttctgcgttggctggtttttcagttagatatacatagttcgctatgttactgataaccgactctatttgcatttgccgacgtgactcaactcgaaatctattgggtatatattcatcctgaaacgttaggatattccctgagttggcacttaaattaaccacttaagaaatgtccataacatttttgttattcctgggggaggggtattgtatttaacgtgttttatatgtgtttttgactacttgttactgccactgcattggtttgccactgctatcttgtctgcaattgtaataaaacgattcagtatgaaatctgcacggtagattggatacgcagtaaaataattaatatatttttgtgattaactattttaaattaagttttgttaataacttaataatagtgccgtcatgataagtaacaagcactataacccttaatttttcactgtattgtgtaagttaaatagtaatgtataaatttaaataacaaataaacaaaagaatcaatatattaaataaattataacaatgactaatgaatttaatctgtatctttaccactcctacctattttactgcctaaaaatcccatttggttataattttctgataaaaattaaaataatttgttaaaatttgcaggtttttatgatttaacccaaggtctttatagacagctagtgaatactttgttactttatggcctgtattctaaattggtattaccaattgactaaatcccggctaagcgaggttaattgaatgaggtcgatcaactgaaggttagtctgaatactctgttaaacagggtataggggtatagttcaaccataaattgttcaaagtaacacttacttactgaatggcttacagcagatatggcttatagcaaaattcgccaaccaaagttatcagatgtgattgagcagcgtctggaaaacctcattctcgagggctcgttgcgccccggggaaaagctgccgcctgagcgtgagctggcgaagcagtttgaggtatcacgtccttcattgcgcgaagccattcaaaaactagaagccaaagggtttcttttccgtcgtcagggtggaggaacttttgtacagaataatctctggcaaagtttcagtgacccgctcgcccaacttattgcagagaatcaggaatcacaatttgatctcctcgaagcacgtcatgcgctggaaggtatcgcagcttattatgcggcgctcagaggaacagatgaagattttaaacgcattaaggaaagccatctcgcgattcaggaagcacagcaaagcgggaatattggtgcggaatctgatgcagttctgcaatatcaacttattgtcacagaagcggcacataatgtggttttgctgcatttactgcgttgtatgatcccgatgctggaacaaaatatccggcgcaatttcgagttcatttatacccgtaaagaaatgctggcggcagtgagtgaccatagggcagcgatttttcacgcaataatggcgaaagaaccggaaaaagcccgtgaagcttcgcatcgtcatttgtctttcattgaagaagttttattggatctgactcgtgagcatacccgtcgtgaacgctcactgagacggctccaacaacatcaggaataagagcctatcctccggggcgtcatggattaaaacaactcccaaatggggtaggtcctaaattgactgtgcagatcctggctgctgcgtctgtacagtcgttatgctctttttgaagagttttagcggcaacatatagcagggcctatcttccggtcatgactgactgaatgtcaaagggtatgaccagaagataggctccaaaacaaccattagaaatagataacagataaggaacacaccatgtcagatattttgaaaaatgacgtggatccgatcgaaactcgcgactggttacaggcgatcgaatcggtcatccgtgaagaaggtgttgaacgcgctcaattcctgattgatcaggttttgaacgaagcacgtaaaggtggtgttagtgtagcagctggtactgcaagccgtgattacatcaacactattccggttgaggatgagccggcttaccctggtaatctggatttggaacgccgcattcgttccgcaattcgctggaatgccatcatgactgttctgcgtgcatccaagaaagatttggagctgggtggtcacatggcttcattccagtcttccgctactgtttatgaagtttgctttaaccatttcttccgcgctcgtaatgataatgatggcggcgacttggtttacttccagggccatatttctccgggcgtttatgctcgtgcattccttgaaggtcgtctgactgaagagcagatgaacaacttccgtcaggaaatcggcggcaacggtctgtcttcttatccgcatcctaaactgatgcctgacttctggcaattcccgactgtttcaatgggtctgggcccaatctctgcaatttatcaggctaaattcctgaagtatctggaaaaccgtggtctgaaagatacgtctaaacaaaccgtttatgcattcctgggcgacggtgagatggatgagccagaatccaaaggtgcgatcactatcgcaacccgtgaaaaactggacaacctggtattcatcatcaactgtaacttacagcgtctggatggcccagtaactggtaacggtaaaattgttaatgaactggaaggcatcttcgcaggcgctggctggcaggtactgaaagtcctgtggggcgagcgttgggatgcactgctgcgtaaagataccagcggtaaactggttcagctgatgaacgaaactctggacggtgactatcagacattcaagtctaaagatggtgcttatgtccgtaaacacttcttcggtcgttacccagaaactgcggaattggtcaaagatatgactgatgacgagatttgggctctgaaccgtggtggtcatgatcctaagaaagtttacgctgcactgaataaagcgcaggaaactaaaggccaaccaactgtaatcctggctcagaccgttaaaggttacggcatgggtgataccgctgaaggcaaaaacattgctcaccaggttaagaaaatgaacatggaaggcgttcgccagttccgtgatcgtttcaatgtgcctgcatctgatgagcaagttgaaaacctgcaatacgtgactttcgacaaagactcagaagaagctaaatatctgcatgagcgtcgtaatgcactgggtggttacctgccaagccgtcgtgttaacttcgacgacaaactggaaatcccagcactggaagagttcaactctctgctggaagagcaatccaaagaaatttctaccactatcgctttcgttcgtgccctgaacgtaatgctgaagaacaagtctatcaaagatcgtctggttccaatcattgctgacgaagcacgtacattcggtatggaaggtctgttccgtcagatcggtatctacagcccgaatggtcagcagtatactccgcaggaccgtgagcaggttgcatactataaagaagacgctaaaggtcagatcctgcaggaaggtatcaacgaactgggtgctgcatcatcttggctggcggctgcaacttcttacagcaccaataacctgccgatgatcccgttctacatctattactccatgttcggattccagcgtatcggtgatctgtgctgggctgctggcgatcagcaggctcgcggcttcctggttggtggtacttccggtcgtacgactctgaacggtgaaggcctgcaacacgaagatggtcacagccatattcagtctctgactattcctaactgtatctcttatgatccagcgttcgcttatgaagtggctgttatcatgcatgacggtttggatcgtatgtatggtgagaaacaagagaacatttactactacctcaccactctgaacgaaaactaccacatgccagcaatgccggaaggtgctgaagaaggtatccgtaaaggtatctataaactggaaagcatggaaggcgcgaaaggtaaagttcagttgctgggctctggttctatcctgcgtcacgttcgtgaagcagctaagatcctgtctgacgagtacggtgttgcttctgacgtttatagcgtaacttccttcactgagctggctcgtgatggtcaggattgtgagcgttggaacatgctgcacccatcagaagaaccacgcgttccttatatcgctcagatcatgaacgaagcaccagcagttgcttctaccgattacatgaagctgtttgctgagcaggttcgtaactttgtaccagcaagcgaattccgcgtactgggtactgacggcttcggtcgttctgacagccgtgaaaacctgcgtcaccactttgaagttgatgcttcttacgttgttgttgctgctttgggtgaattggctaaacgtggcgaagttgatgtgaaagtggttgaagaagccatcaaaaaatacagcatcaacccagaaaaagttaacccacgtctggcataagaggtaaagattaatgtctatcgaaattaacgtgcctgatattggtgcagatgaagttgaagttaccgagattctggtgaaagttggtgacacagtagaaatagaacagtcactgatcactgttgaaggtgacaaggcttctatggaagttccttctccacaggcgggtgtggttaaagagatcaaagttacagttggtgacaaagttgaaaccggcaaactgattatgatctttgaatccgcaactggtgcagcagaagcagtacctgtacagcaagaagcggctccggcagcagcgcctgttgcagctgaaagcaaagaagttgctgtaccggatatcggtggtgatgaagttgaagttaccgaaatcatggtaaaagtgggtgataccattactgaagagcaatctctgctgactgttgagggtgacaaggcttccatggaagtgcctgcgccattctcaggtacagtgaaagagatcaaaatcgcggttggcgataaagtaaaaactggttctctgatcatggtatttgaagttgcaggttctggtgcagcgccagctccggcagcagctcctgctccagcagcagcgcctgcggcatctgcggcaaaagaagttaatgtaccggatatcggtggtgatgaagttgaagttaccgaaatcatggtaaaagtgggtgacaccattgctgaagagcagtcactgatcactgttgaaggtgacaaggcttccatggaagtgcctgcgccattcgcaggtactgtgaaagagatcaaaatcgcggttggcgataaagtaaaaactggctctctaatcatggtatttgaagttgcaggcgcagcacctgtggcagcacctgcagcggctccggctcttgcggctgcaccggcgaaagcagcaccagctccggctgcggctaagccagcagaaggcaaaaatgagtttgcagaaaatgacgcctacgttcatgcaactccggttattcgccgtctggctcgtgaattcggtgtaaacctggctaaagttaaaggtactggtcgtaaaggtcgtattctgcgcgaagacgttcaggcttacgtgaaagatgcgatcaagcgtgctgaagctgcacctgcggctgcgggtggtggcttgcctggtatgctgccttggccgaaagttgatttcagcaagtttggtgaaatcgaagaagttgaaatgagccgtatccagaaaatctccggtgcaaacctgagccgtaactgggtaatgatccctcatgttaacctgttcgatgaagcggatatcactgaagttgaagaattccgtaaacagcaaaacaaagaagcagagaagaaacagctgggcgtgaaaatcactcctctggtattcgtcatgaaagcggctgcaaaagcactggaagcaatgcctcgctttaacagctctatctctgaagatggccaaaagctgatcctgaaaaaatacgtcaacatcggtattgcggttgatacgcctaacggtctggttgttcctgtattcaaagatgttaacaaaaaaggcatcatggaactgtcaagagaactggctgaagtatccaagaaagctcgtgctggtaagctgactgcttccgacatgcagggcggctgcttcaccatctccagcctgggtggtatcggtacaaccggctttgcaccaatcgtgaacgcgccagaagtggctattatgggtctgtcccgttcttctatgaagccggtctggaatggcaaggaattcgttcctcgtctgatcctgccaatgtctctgtctttcgaccaccgtgtgatcgatggagctgatggtgctcgtttcatcacttatattaatcagttgatgagcgacattcgccgtctggtgatgtaatgcaaaggccggtgaatagccggcctaataattacgacagtgatggaaattttatacttgtatctgacaggttgagatttccgtcacgttaacgcgcttttcaggttatttacaattctgtaaactgctcgcggtgtgtacgtcccggtggaatatggttttttttcgtctgacccgccggacaaacaattaagaggtcatgatgagtactgaaattaaagcccaggtagtggtgcttggagcaggccctgcagggtattctgctgcttttcgttgtgcagacttaggtttggataccgttctggttgagcgctactctactctgggtggtgtttgccttaacgttggttgtatcccatctaaagcattgcttcacgttgctaaagtcattgaagaagcaaaagcactggcacaacacggtatcgtgtttggtgagccacaaactgatatcgataaaatccgtctctggaaagaaaaagttatttcccagttgacaggtggtctgggtggcatggctaagggccgtaaagttaacgttgttaacggtgttggtaaatttactggtgctaacactctggtagttgaaggcgagaatggcgcaacaacgattaattttgataatgccattattgcagcgggttcacgcccaattcagctgccattcattccgcatgatgaccctcgcgtatgggattctactgatgcactggagctgaaaacagttccggaacgcatgctggttatgggcggcggtatcatcggtctggaaatgggcactgtttatcacgctctgggttctcagattgacgtggttgaaatgttcgatcaggttatccctgctgcggacaaagacgttgttaaagtattcactaagcgtatcagcaagaaattcaatctgatgctggaaaccaaagtgactgctgtagaagccaaagaagatggtatctacgtgacaatggaaggtaaaaaagcaccggcagaacctcagcgttatgacgcggttctggttgctatcggccgtgtaccaaacggtaaactgatcgatgctggtcaggcaggtgttgctgttgatgagcgtggctttatcaatgttgataagcaaatgcgtactaacgtacctcatatcttcgctatcggtgacatcgttggtcagccaatgctggcacacaaaggtgttcatgaaggccatgttgctgccgaagttatctccggtaagaaacattacttcgatccaaaagtgatcccatccattgcttacaccgagccagaagttgcatgggttggtctgactgagaaagaagcgaaagagaaaggcatcagttacgaaactgcaactttcccatgggctgcttccggtcgtgcaatcgcatctgattgttcagatggtatgactaaactgattttcgataaagaaagcaatcgtattatcggtggtgctattgttggtactaacggtggcgaactgctgggtgaaatcggtctggctatcgaaatgggttgtgatgcagaagatatcgctctgactgttcacgctcacccgactctgtacgaatcaatcggtatggctgctgaaatgtacgaaggcagcatcactgacttgccaaaccctaaggcaaagaaaaagaaataatgcattagattttgcgttatttttgcagtgaatataggcggcttctattataggagccgtttcttattttgttgttaattaactcttgcatagagagtctggcgttttcctcatttaattattttcataaatagagataagaggttttcaggacaaaacatcaacaaatagtatttaaatcttaaatacacactttatgcacctctatccagaactttactgcactccaatgttgattttatgtgaatgaattaacatgccattcaaattttggtatgctatttgcccgaagctcggcataattttgatgttatgtgagcaaatcctctgacctggcatccctaatggtcatttcatggtgatcgttaccgggtgcagacagccgggcatataaaagacaatgagagcgaggagttagtcgtgctagaagaataccgtaggcacgtagccgaacgtgccgagcaaggcatcgtccctaagccattagacgcagctcaagcagccgcgctggtcgaattactgaagaacccacctcaaggtgaagaagatttcctgctagatctgttgacgaaccgagttccccccggtgttgatgaagctgcttatgtaaaagcgggctttcttgctgcaatctcgaaaagtgaaacgacttcaccacttattacaccggaaaaagcgattgaattattgggaaccatgcagggtgggtacaatatccatgctctgattgacgctctcgatgatgaaaaactggcccccattgccgctaaggcactgtctcacacgttattgatgttcgacagtttctatgatgtggaagaaaaagcgaaagcaggtaatccacatgccaaacaaattatccagtcatgggcagatgcagaatggttcctgcaacgtccggcactggctgaaaaaattacggttacggtcttcaaggtcacaggtgaaactaatacggatgatctttcccccgcaccagatgcgtggtcacgccccgatattccattacatgcgttagcaatgctgaaaaatgcccgtgaaggtatcgtgcctgatcaggctggcgttgttggcccaatcaagcaaattgaagaactcaatgaaaaaggtcatcctctggcctatgtaggggatgttgtgggaaccggttcttcccgtaaatctgctacaaactctgttttgtggtttatgggagaagatatcccgtttgtgccgaataaacgtggcggcggcgttgtattgggtggaaaaattgctccaatcttcttcaacacgatggaagatgctggcgcattgccggttgaagttgatgtatcccgactgaatatgggagatgtaattgatatctacccatataaaggtgagatccgccttcatgataccaatgaagtattgtcaacttttgaactgaaaacagatgtactgattgatgaagtacgtgccggaggccgaattccattaattattggtcgtggcctgacaaccaaagcccgcgaatctttagggttgccatacagtgatgttttccgtcaggcaaaaactgttgagaaaagtaaccggggtttcacactggcgcagaaaatggttggccgtgcctgtggtactaccgggatccgtccgggagaatattgtgaaccgaagatgacctctgttggttcgcaggatacaaccgggccaatgactcgtgatgagttgaaagatttggcctgtctgggcttctcagcggatctggtcatgcagtcattctgccatactgctgcttatccaaaacctgttgatgtgacgacccatcatacattacctgacttcatcatgaaccgtggcggcgtatctctgcgcccgggtgatggcattatccactcatggttgaaccgtatgttactgccggataccgtaggtacaggcggtgactcccacacccgtttccctattggtatttctttccctgcgggttctggtttggttgcatttgcagcggcaacgggagttatgccgttggacatgccggaatctgtattagtgcgttttaaagggaaaatgcaaccgggtatcactttgcgtgatctggttcatgccattccttactatgcgatccagcaaggtttattaaccgtagagaaaaaaggtaagaaaaatattttctctggccgtattctggaaattgaaggtttgccagaactcaaagttgagcaggcatttgaactggcagatgcatctgccgaacgttctgcggcgggctgtacgataaaactggataaatcaccgattattgaatacctgcaatccaacattgttctgttgaaatggatgattgcagaaggttacggcgatcgccggacgctggaacgccgtattattggtatggaaaactggctgaaagatcctcagttactcgaggcggatgcagatgcagaatatgccgcagtgattgaaattgatctggctgagatcaaagaacctattttgtgtgcacccaatgatccggatgatgcccgcttgttatcagatgttgctaacagcaaaatcgatgaagtgtttatcggctcctgtatgacaaacattggtcacttccgtgctgccggtaagttactcgatcagcataaaggccagttaccaactcgtctgtgggttgctccgccaactaaaatggatgcggctcagctgaccgaagaaggctattacagtgtctttggtaagagtggggcacgtatcgaaattccgggctgttcattgtgtatgggtaaccaggcccgggttgctgatggtgctacggtggtttctacttccacacgtaacttcccgaaccgtttaggtgcaggagctaatgtttatcttgcatctgcggaactggcggctgtggcttcattactgggtcgtctgccaacgccggatgagtatctgcaattcatggagaaagttgatgaaaccgcagcagatacttaccgctacctcaattttgatcagttgaacgagtatactgaaaaagcggatgatgttatcttccaaactgccgtataaaaaagtatattgctgaaatcataaccacccgtataacgggtggtttgctcttgccctataagggcttgttaccgactgcgcttaaatgacgctgctttctcttcgttcaagctaagtgtctttgctgctttggcctaccccttgaaggggtctacatgctctttactactcaatttatccgagattaaatccgacttttcttgctctctgatatacttttgaattgtcgcttcatttagccctaccgtactgacatagaacccttccgcccaaaactttctgttgccaaatttatattttaaattggcgtgtctatcaaagatcatcaacgaacttttacccttcaaatatcccataaagcttgaaacgcttagctttggtggaatactcaccaacatatgaacatgagctggcatgagatgaccttcgattatttccacacctttatacttacaaaggtctctgaggatctctcccacacttgaacgaatattattaaaaatcactttccgtctatatttcgacgaaaagacgatatggtatttacacagccactttgtatgcgctgagctttgtgctttaatgcccataaacacctttccttatttgagttacgaatattagcttgaacatctatatcgtaacggaaaggtgtttttcttggtataacctttgaactccacccgcaaagcgggtggttttatgtttaagacgctaacgcgacttaaactggctaaagccataaataaaaaaagcgtgataaaaaatcacgcttttttactggagatatgtctgttcttagctgatattactctttagagattttcgcccaggtatcacgcagacctactgtgcggttaaacactaagtgttcagcagttgaaagtttgctatcagcacagaagtatccttcacgttcaaactggtaagttttttccagcatggcattgaccagacccggctcaacaaaacctttacgtaccactaatgactcggtattaagcgtagacaggaaatcctcttccgctcccggatttggcacgctgaacagacgatcatacaagtagaattcagctggcgcggcatgtactgcacttacccagtgaataacacccttcactttgcggccatcagccggatctttattcagtgtctgctcatcgtaatgacagtaaatcgtggtgatgttgccttctgcgtctttctcaacacgctcagctttaacaacataagcgttacgcaaacgtacttctttgcccatgaccagacgcttatactggcggttagcttcttcacggaagtctgcccgatcaatatagagttcacggctgaatggtacttcacggctacccatttccggcttattcggatggttaggcatggtcagaataacttcgccttccggcatattttcaataaccagtttcaccggatcaagaactgccatagctcgtggtgcatgttcattcagatcatcgcggatacaggattccagtgcagccatttcaacgttgttatcctgcttagttacaccgatacggcggcagaattcacggattgacgcagcagaataaccacgacgacgcaggcctgaaatggttggcatacgaggatcatcccagccatcaacaatattttcagtcacaagctgattcagtttacgcttggacattactgcgtattccagattcaggcgggaaaactcatactgacgaggatggcagtcaattgtgatgttatccaatacccagtcatacaggcggcggttatcctgaaactctagtgtacaaatagagtgcgtaattccttccaacgcatcggaaatacagtgggtaaaatcgtacatcggatagatgcaccatttattaccagactgatggtgttctgcaaacttgatacgatacagaaccggatcgcgcatgaccataaaaggggaagccatatcaattttggctcgcagacacgctttaccttctgcaaactcacccgcccgcattttctcgaacagagcaaggttttcttccacactacgatcacggtatgggctgtttttacccggctctttcaacgtaccacgatattcgcggatctcatcagggcttagctcatccacatacgccagacctttattgattaactcaatggcgtattgatgcagctggtcgaagtaatcagaagaatgacggatatcaccactccactggaaacccagccattgtacgtcttgcttgatagactcaacgtattcaatatcttctttaaccgggttcgtatcgtcaaaacgcaggttgcattgcccctgatagtcttgtgcaatgccgaaattcaggcagatcgactttgcatgaccaatatgcagatagccgttaggttcaggcgggaaacgggtatgtacggaagtatgtttaccagttgccaaatcttcgtcaataatctgacgaataaagtttgtcgggcgagtatctgcctcactcatcgttttattcctcaatgcaaaaagcgcttcaatataaccctctataatctattaagctgaaccgagaaacaacacttagttagtgggaaatagaggaaaaaaagaaagtctcagtgaaaaaaggatatagacaggccattttgagtaaaggcctgccatttctacacgagaagtaagtaaaatcagcggatacggtgattttccagcactgcgattaactgatctgcacaataaacgatatgctcttcattccagctaggatgcaaatacaggctgattgttcggggcaataaagaacgggctgtttcacacacaacatcgcaataattgaccgattcaggcgatgtgtactcactggaatggaaagggaaattggcagagccaaaaccacgcagctctctgaaaacccgttcaccataagcttccggccactggatcttgaacgcgggaacaccgatttttttcaaatcacgcaaaatgatttcagctgtacaatccagtttggcaagctcaaacacaataggatatagccaatatgcgttttgcctgtcttcattattcagcggcaggctatgaattaaatcgatttctgcaaattttgcatcatagattttcgcgtactgtttacggttatgcatattccagtcatcaaaccgctccagctcattaatcccgatgatcgactgaatttcagtcatacggtaattatagccaatgcgattatgtacatgccatgacacctcttccaacgcaagtaagtcaaacttccttttcacatcaaacccgtgatcacgataagcgcggcattcccagccgatttcaggattattcgtcacaaccatgccaccttcaccaccggtggtaaaatgtttggactgacagaaactgaatgtgccaacatcaccaatcgttccaacagatttccccttatacttccctccgagacattgcgcgctgtcttctattactttgagattatgtctgcgggcaacagcaagaattgcatccatatcgcagacaacaccataaagatgtacaacgataatggcttttgtgcgctcggtaatcagggcttctattttatcagggtcgatagtgtgttcttccgttgtatcgcaaaatacaggaatagcaccgcactgtaatacagcaaaggaagtagcaataaaggtgtatgaaggaacaataacttcatcaccggggccgatatttaatgcccccacagcaatattcacagcagaggtgcctgaattacaggagattgccatttctgcgccaatccagtcggcaaatttattttcaaattccatgcctttttttccggtccagtaattaacttcaccggataacagtggctgctgaatatcttttaatgttttttcggcaaaatcaggccattgtggaaatttcataaaatcacaccttaatattattacaaaagataagtttatttatataaataacaaattaattattttttataaaccttgaattaactaacataattaatgcaccaacagctaataaataaaatgctgtttcaagactaaaattctgagcaataaacccgattaacgcaggcccaatcattattccaaagtagccaaatgtaacaattgacgctattgcatgaccggggagcataactgtttgagttcccgatatagagcataatatcggaacaatatttgatgcacctaatcctataaagaaaaaacctatcatatagagatagaacgaatttacactaacaacaataaagaaaccgataaaaatactaaatgtccctgcaaaaaagactttcccacgtcctatattagatataactcgatcccctaaaaatcgtcctgtcgtcatggctgctgcaaatgcagcatagccaaatccattaaatgcaatatcaacattacgttcattaactaaaaacacaccgctccagtcaataactgaaccttcaatgatccccattagaaaacaaagaaagctcgccaaaataacaatacctttcggaaaaaagaaacctttatcttttctttctttattattaccgtgattattgataagcccggagaaagaaaaaatgaataacaacgataatataaaagatataaccagacatgcgacaagagcagaaaagttcatataaagtaacatcgatactccagccgcacccaaaataccccccaaactgaaaaacccatggaagcctgacatcaagtttctctttgtaattttttccacttctacagcctggatattcattgcaacatcaactgtaccaatagatgccccaaagataaaaagcataattccaagctgggtaacactcgaagataatattaagagcggtaaagagacaatagcaaaaattcctgaaattataataaccttacggcaaccaaataaagtagtcagaaatcctgtaacaggcatggatacaattgatccaagaccgagaaaaaacaataaaacccctagttctcctgaatcaatatttaaaaaattttttactaagggtatcaaaggagcccatgcagcaattcccatgccagcagctaagaaaacagctctagttgcaatcacattattcataatccatctctaccataatgtttatataaaaatccacgctatacttaatcacacagggttatacacttcatcttgaaatccgttgtgtatatacccgtcatctttcaagctgcctctttgttggctgcactcgctcaccccagtcgcatagttatctatgctcaggggactttctcctttgccgccgcgatgcaactcgaaatccatagggtatagagtcatcaaaacattaattcatccttatgaattaattttaatttcaaaagcattcattcctattttatcaattttaatttcatcccagtgatgaattacttcgagaactaaagggtgtattttctcttgccccccaatttgtatgacctcacaacctgctgctaatgcactttgtattcctgcatacgaatcttcaaaaactaaacagtctttggctttcattcccaaacgttcagcggccatgaggtaaggagctggatgtggtttcccgtcctgtacatcatcagaacctacgatgagctccggtatcttaagaccacaaacattcattctatgatatgcaactctctggctggctgaagtgactacagcccaagggcaatcatttaaagaaagtaaaaattcttttgcaccaaataaagcttgcgctgaacctgaatgttgaacttctaaatcatccaataactgaacctgttcttccacattcaaatgtggggcaatagtcaaaataacatctctggaacgaacaccatgacatatctccaatacatgttggataggcacattctgcatttcgcaccatttagaccaaatcatttcaacttccgataaagattgaactaaagtcccatccatatcaaataaaatagcctttatattataaatccccattacccctccgataataaaaaacaaacactgtaaaccatcccaatcatttataataaaacataggaatcacaataaatcatcaggcctatttcattaggataaatcaatatcacagcatctgctaattaatcacttcaaattatctctggatcgtttataacccaataaatcttaatggaaaaaacgccaagtatcattatgctatagttaattaacgtcctcgccagactccagttctctcttgtatcctcccaggccactgggaactgatctaatttcttagataacctatttgtcagataaataatttcagcatcaaatgcgtacccattaatcttctgcttagaaaatacttcttttgccacatcagatttcaacattttaaatggacattgagaatcagaaactttgcaattcaatagtaagttgactatttttaaaaatattttactggttatcttccgatatgaatttgcttttgatttattctttgaaaagcgctctccaataaccaagtcaacatttgaaacttcaatcctcctgtatgcaataaaaaaatcactttcttttataggaaaatcaatatctgtataaaaaacatatttcccttttgctaaatcgacgcctcttctaatactatagccttttccatagttgccacagttagagatcaccagaacatcaggataatttttctttattttcacaacatcttggtcatgaaaattatttttatctgaatcgttgactataattatttgtaccttcaacttctcctgaatgtttcggatacgctggatagttttttcaataacagaataattttcattatagcgaggaagaataattgaaacatcaatggcatcatcctctatgcgatgattttttgtctccataatgataccttaaggtataaagtactaaaaccccaataataatttacccaaatctgttaagtgtatctgagatgtatcttgttggtgcgcttttttaaccggaaaagctttccctgttatagacgtcgtcggcaaaccttttttataagctacaattctctcggcaacttgttgttctgtaatatctgtccgtggaaataagcaaaaatattgagctaatcttggctcatttgaagtatttggtatattaccgtgaggcaatgcactgtcaaaaatgacataatcccctgctttcaatggaattgatttaatattcatccctgctgtatcaggaaatctactattatatcccgctggctgttttgatagccattcatagataactttatgaaaaccgggaacacactggaacccaccagaattaccattatcatcagttaagctcaaaagaccctgtatttttctttccagtgggcgtatcgaaacatcaatatcccaatgaataaaaccttcatatttccagttttcgttaacagcgagattcatatctaccctgtgcacactaaccacgtaatctgaggtaccaaaaatcttttcatatacagagtaaatgatttgattctgacgattatcccacaaagcctgatgatgataaaaaggaatccgacccatttcatcaattcctgaacgagagcgaatctccatgttataaaaatcactctggttactcttatccatttccaaaaaataaaatatagcatcgacagttttttgaacttgttctttgcttactgccgactctatgatgatataaccattatcatcccaactctttaaatacttttccatttttccttctgaaatagataaactcataatttccacctacttatatttatttcacttggttatcttatcaacgaacacagtttaatctctctatcagagataatttaagtgcattagactttgctctaaaatgtttataaaatggacgggaaatataaatcattaaaataaactcaacctaagccaaataaaactaaaggatattttttataaaaaaattgaggtaaatcacaaataaaataaaaaacaaaaattattgtaaaatacccacattcaattattccttatcgaaaaaatgacaataacaaatacctctcgcgaatataaaaaacaaccatcatatatttaattttatatttccacattccagacacatcgtaataataaatatcttaccaaaaataattaatgatatatttttcgttttttagaaacttgaagataggaactataattctatatttagaattatatgattttaactcgcttccctagaaataatttacctatttctagggggtaaaagcattctgacattacctgcatgcatttctgcatacaggtaatactaaaaaatatttatgagatgaaaattataaggtaggttattaattatttatatatctgaaataaatcttctcctgtggcaataactccctcttttgcaatcactcggattcctgaatagttatcgatattgctgataataactgggcttatcattgatttggcatgagaattcaaataatcaaggtctaatttcagtaacgccgttcctgttttgactttcatgccttctttcaccagacattcaaacccacggccgcccagagaaacagtatcaatgcccatatggacaataacttcagcaccattatccgcctcaatacataacgcatggttagtatcaaatacctttaccaccgtacctgtaacgggtgagaagactgtttccgaggtcggcttgattgcaataccatcaccaacgagtttactggagaaagcttcatccggtacatcctccaacttaactagctcacccgcaacaggtgccagcaaagtcagaatttctttactttcctgtgtactctttttttctaccggaatatcagactctggaatatcattttctgtcgcagcggcaatcgggcctttagcaataacatctttcatggcgctggcaatcagttcagcacgcataccaacaataatctgaacacttcctttattcaggcgaataacaccagaagccccaagacgtttagtgactcgttcattaactaaactggaatctttcacggataaacgcaaacgggtgatacaagagtcaatattgattaaattggtcgatccacctatcgcggcaacatagttatatgcttcttcctgaatatcgtttttgccaccagcattcaatttcatatcagaatcagttcccgcggtagaaggtaactcacggcctaatgtcatcaagttgaattttttgatagtgaaacggaatacaacataatagatacagaagaatactaacccttgtgggatcagcatgtaccagtgaacagctaacgggttgcgtgaggagaggaaaagatcaataaagccggcgctaaaaccaaaaccggcaatccagtgcatcgccgcggcaatataaactgaaatacccgtcataatggcatgcaggaaataaagcacaggtgccacaaacatgaaagagaattcaagtggctcagttataccagtaaagaatgcagcaaatgcccccgccagcatgataccgccaaccattgctttgttttcagggcgggcacaatggtatatcgccaatgccgctcccggtaacccaaacatcatgatggggaagaaaccagcctgataacgcccggtaatacccggaatagccgttccttcagcaatagattttcctcctcccaggaaattaggaatgtcattaatacccgccacatcaaaccagaaaactgagttcaacgcatgggtgcaaacctaagggtatcagcagacgattaaagaatgcataaagcccggcccctacagacccgaggctggtaatactttcaccaaataccaccagccaatcataaatgacaggccagacaaatatcaggataaaagaaagtagaatcattaaaaaagaattcaggatcggtaccaaacggcgtccactgaaaaaagacagtgccagaggtaattcaacattactgtagcggttataaagctccgctgaaataacccctattaagataccaataaactggttattaattttattgaatgccactggcacatcagcaaccggaataccttcaatcatcgcgatgacttcaggcgaacacagtttcataacaaccataaacccgactaatccggttagtgcagcagctccgtctttatcttttgacataccataagcaataccaattgcaaataatattgccatattgtcaagaatagccttaccggatgagataaacaaagctgccattttattgtcagctccccaaccggtcggatcaatccaatatccaatcccgagtaatatcgccgcagcaggcaatgttgcaacaggcaccattaatgcccgaccaatctgttgtaagtaagttaaaatgttcactcacgcccccttaaagccccatgaatggagtattttgtttaatgaatgatgtaataacatcttcatctatttgttgttaaataattttaagtctaagaaatttatttttcatcgcaaattaaatccttcgcatgtgtgataaaaatcacttaaattgatatatttttgagcaaaatatggccttaatcaaaaacttattttattataaaaaataacattatcgcgtacgtgtccggtagaaccgctgtaaagaacaggtatgataggcagcttttgccctaccaccgttcgtataattttaatttaataaatgaataactttttgaagaggtcatcatgaggctgatccccctaacaaatgcaagtgatgtaggtcgatggtctgctcactatattgttagaaaaatcaatgaattcaaaccaacagcagaacgcccttttgttctcggtctgcctacaggcagtacaccattagcaacttacaaagaactcatagcgctatatcaggcaggaaaagttagtttcagaaatgttgtaacctttaatatggatgaatatgttggcattcttgaggatcacccccagagttaccacactttcatgtatcagaatctcttcaatcatattgatattaaaaaagaaaatatcaacttactcaatggaaatgcggcagatgtcgatgctgaatgcttacgctatgaaaataaaattaaagcgtatggcaaaattcatctgtttatgggcggtgtaggtaacgacggccatattgcatttaacgagcccgcgtcttctctctcttcccgtacacggattaagacgctgactctggaaacacgaactgctaattcccgttttttcaataatgacgtggaatcagtcccccaatatgcgttaactattggtgtgggtacgttaatggatgccgaagagatcattattctcgtaaccggaactcaaaaagcacaggctctacaagctgctattgaaggtaatgttaaccatatgtggacagtaagctgtctacagatacacccaaaaacaattattgcgtgtgatgaagctgcaacaatggagttaagagtaaaaaccgtaaaatattttcgccagatagaggctgatattctgagtgaattcgccagttaatactgattcaggcatttaggagtccagaatgtacgctttaaccaactgtattatctacaccggacacgacaggctcagtgaatatgctgttattattgaaggtgggataatcaagcatatttgtccggaaaatgagttaccggcaggcattgaacagcatgatttacagggtgcaaacctctctccgggatttattgacctgcaagtcaacggctgtggcggagtccagtataatgaccgcatggaagatattacggaagaaaccctgcatatcatgcagaaaaccaatcagcgatacggctgtaccagttttctgccaacgcttatcactagccctgatgagctgatgatcaaagccattgaagtaatgcgtatctatctggctaacaaccccaatcaggcgattggtttacatctggaagggccttacatcaatccggtaaaaaaaggcacacataatgctgcctatatacgcaagccaacaccggaaatggtcaattatttgtgtattaatgccgatgtgatcaagaaaattactcttgctcctgagatggtagaaaatcattacattcatcagttaactgaagcgggtattattgtttccgctggtcattccaacgcaacctatgaagaggcgcgacggggattccaaaatggtattaccttctctactcatttatataatgccatgccagccatttcgggccgacaaccggggttaatcagcgcaatttatgatactactgaagtttatgccggtattatttgtgatgggatgcatgttgcttggcccaacattcgtagcgccaagcgtctgaaaaatgaaaaattagtcctcgtgacagatgccattgttcctgccgggctggatgaaaacagtaatatagagcaattcaccttcgctaataaaacaatatattatcgtaacgggttatgtgtcgatgaaaatggcacattaagtggctcttcagccacaatgattgagtgtgtcaggaatagtgtcgaaaaagttggtatcgctttagatgaaacactgcgcatggcaaccctttatccagctaaagctatcggtgtcgataaacatcttggaacgattgagccgggtaaagtagcaaacctgacagcattcactcatgatttcaaaatctgtaaaaccatagttaacggcaatatcgttaatgacaataataacaaaggaaatgaagctg

SEQ ID NO: 109 - DNA, 20157 bp, Xenorhabdus sp.
atagctgattaaagcgtaaactactccggaaagcccaccaaaatgctagccactgaacaacgattgtgcccagccactgaaaatggcagatactattgtgatttcaacaagctttccggtattaatgttcctttcaacctgactgccgaaataccaccacagcaccaaattgaacagaatgtgtaataacgaaaaatgtaataaaacggggctgagccaacaccacaattccaggtactgttctttgttaggccatgccagccagctcataacctcattaactccagctaactgcatccaaaaatagaccagaatacagagagcagaaatggtgatagttaatgggccggactggcttttcagtgtattccagttcagattactttcgtatttcaacggcggtacttgttttacctgcctgccagctggcagcctgatagcgctcattgagcgggtctcgggaaaactgattaagctcctgttgaacagcgcttaattgtttttcatcttccagccacagttcaaccacgtgtggttcattggtctggcagatggtcaggtgaatgccctgtgtcgccatataatcaataaaggcctgagccagtcttgggttatggattgaagttacatggatcattgtgcgtattattcaccttaaattagggttatacccgtcgtctttcgagttgcctctttgttggctgcgttcactcaccccagtcacatagttacctatgctcctggggttcattcccttgccgccgcgatgcaactcgaaatccatagggtatagaggtacagatgcccgttactcagcatgaacggcatgaggataatcttttttccatacttcaaaaccgccgttaacactgtatacggtttcaaaaccgatatttatcagatactgtgcggctccctgactgctatggccgtggtagcacatcaccataaccggctgatcaaaatcggtctcttgcaggagttgattgatagtttcattagtcagatgaaatgcacctgttacatgcccggcacggaaactctgtgggtcgcggatatccaccatcagagcacttttatcgagccagttctggtaggcttgttcagggcttattgtttgaaaatgttccataaacactcagatttatttcttaaaatttcgttttaaggtttcagtttcttaaaaatgttactttatgactttattgccttcccaatgacagaattgggaaggcatgactagagatactaaagatataaagaacaaaaaaataacgagctaaaatcagtagtaagagtgttcgccacgctgatgttctgtcaggtctttaacgcctttcagctcagggaacatctgtaacagctgtttttcgatcccctctttcagggtgacatcgaccatagaacaaccgttgcagccaccaccaaattgcaggatggcataaccttcatccgtgatttccatcaggctgacacggccaccatgacctgcgagctgtgggttaatctgtgattgtagagtatattcaacgcgctcaatcagtggcgcatcatcagctaccttgcgcatttttgcgtttggtgctttcagggtcagctgggagccaagctggtcagtcacaaaatcgataaccgcctcttccaggaaatgggcactgatttcatcaacataggcagaaagttggtcaaatttcaattcggtgtcagtggcttcaacagcatcaggtgggcaataagaaacaccgcattctgctgtcggcgttcctggattaatgacaaaaacgcggatttgtgtaccgggttcttgatttgccagtagcttggcaaagtgcgcttgcgctgcttcagtaatattaatcatgtcatttgctcaatagttgactgttatagttggttataatacgcccattcataaaggaactacaaggttcggcatattgcccaggtttgcacggaacgggcaccagcacgaattaacaactgtgtggcttcatgcagagtggttcccgtggtgatcacatcatcgaaaatgacgacatgttgatcggtaaaatcgccacgcaattgaaaggcatgcttaagattggttttcctctgggcggcagataagccccgttgtgtgagtgtagcacgtgtgcgttgcaaaagattaggctgatgttgacatcgcaaccagcgtgctaatggcctgatgataacctcaacctgatcaaacccccgttgccagcgtttctggcggtgcagaggaataccaagtatgcagtccggcttcatccagcgcccttcacgatagccctgtaaccagtgaagaagaaatatgcgcgccagaactgcggcgagctggggggtactatgatatttatagcgccggataagctgacttaaagggggagcataatcagtaaccgcgatcatttgttgccagagtggtggctccttcaggcagcggccacagggtaaatcacgagaactggcaggcagagaacagcatggacaaacgttcgcaagccgtttcaggttttgccagcagatgtggcatattccatgatgagcgaaatacaaactttgatggcatagccaacagtacccaaccattgttagcatggtttttgtgaacatcgctttcttccttgataagaaattcctgagagtaaataaggtgagaataacaatggataagttgttttggcagactttaggcgaagctcctcgtgatcttgtgatgctgcacggatgggggctgaacgctgaggtctggcgttcagtggaaacacgattagcttcgcattttcgtttacatttagtggatttaccgggatacgggcgcagtcagccgtatcctgctatgacactgaaagagatggctgatacggtatggcaacaggcgccagaaaatgccttatggcttggatggtcgctgggagggcttattgccagccagattgcgttagatcatcctgataaagttgcgggtttaatcacagtagcatcatcgccaaaattcagtgaagagggggattggccggggatccagccttcggttctgagtgcattcaaacaccagttgagtgaagattttcagaagacggtcgagcgctttttagcattgcagactttgggcactaacagcgctcgtcaggatgcgcgtttattgaaatcagtggtattgagcctgccgatgccgacagtcgaagtgctcaatgccgggctggaaattctgcgcactgatgatttaagaagtgagctggcacagcttcagcttcctttcctgcgtatctatggttatcttgatggtttggtaccacgtaagattgctgccttgcttgatagtgaatggccgcacacccgttctgtgattatgcgtcatgcggcacatgcgccttttatttcccatccggatgaatttgtcgatctattgatagcatttgcggacagcgggagtgacgctgagtaatttcagctattgaccactaattacccataacatggctgttatgggtagttgatatttatctgacaggataaacttcggtgacaatttccggtgtattgacgatggtatcgagtacagggcagttactttctacaaactgaataaaatcgcggatttcttgttcagtattatctgcttttatatgaaattttgatgttattttcgaaaagccgattttggcatttttattcttaccggtgaaaccgtcggtatccaattctccttccacattgacctgaatatcaatcaggttgattttatgtttgcgggcaaaacttttggccacaatacactgacaggcaccaaaagcagaaagcagtgcttccacagggttcatggcttcatctgttccgcccagatttttgggttcatccacatgaaaggtaaaacctcgtgatgaacatttcattttaagatgaccagcagactctattgttgcagcaaataactctttaggcatttgagtatatcctcaggttattaatcgttatgacagaactacatatgaaataatcagggagtggtttttattctttaatctatcacgatggttaaaagaattactgtgctaatgttaacgaattagacgttggtcgaatgtaaagtctaattcgttaactgggctgaatagattaagaaaattcagaagagaagggtatgtcttgttgctgaattaagaagatataatcagcattttatcatcgccagttgatacgctttaacagcacatctctgtgtttccgggcactgtttacagctaccactgaggcaggaggaaatgtctacttcctccagtttacccatcgtcaccaactgattgagcatggcttctacgatgggcagtggcgcagaaaactgatggctcagtgatctggcatcggtgcgcccatgaagggcgaccgtatcgcggatttgcagcagactaatcatggcaactcctagtgacagctaccggaacaatcgcagctccggtctctggtgctattgaatgtgatcgtgattctgctgcgtgcacggcgtaatccgacaaacacagcgacattgaacaaaatgaccgccagaatagtgagcatgctgctttgtggatgtgcggaaaaggttgcagcctgataaaacagtacagccagagaataggcgacgtttaacccccataaaattgagaatgtcatccagccgcggctggtttcacgggcaatggcacccatcacagaaacacagggaacatacagcagaacaaagatcaaatagctgtaggccgcaacaggagaaccaaatttagcactcatcacgcccattgagctgctgtccatgttgccgtcgcctttactggcttcaatcgggttggacagagcactcagggtgaatgtctctttcaggctgtcccatgtttctgttactgagcctgtcagttcatcaagcagattaaactcatccgggttgaatggctgtttagtgatgttttctgcggtataaagtgtattcagtgttccgacaaccacctcttttgccatcgctccggtgataagcccgacggttgcctgccagttatcagaatgtacgccaataggatgaaggatcggtgtaatgactttactgaccgaggccagcgctgattcattgatatcgtctactgtcttaccagagaaagaaaagctattgagagccccgataagcatactggctgcgacaatcactttacccgcacggatcacaaatcctttcaggcgttgccaggtctggattaatagcgttttagcatgaggaacatgatagaccggcagctccatgacaaagggggatgcctcaccacgcataatggtgtatttgagtagcagacccgtcaggatggcaacgacaataccgaggatatacagagaaaagacaatactggcaccatgtttattaaagaatgcagcggcaaaaacggcaaaaatcgccagacgtgcgccacaagacataaatggtgccatcatgatggtaatcagcctttcacgcggtgcatccagtgttcgggaacccatcacggaaggaacattacagccgaagccgacaatcaggggcacgaaggatttacccggtaatcccagagactgcatcagcctgtccatcacaaatgcagctctggccatatagccggagtcttcaagaaaagagagaaacaggtacatcatgccgatctgcggaaccaatggcagcatggtattgataccgcctccgatcccttgtgcaaggaaaatggtcagccagccggggaagtggagggtatagccgagccactgcataccatcaatgaaaatggcagaggaagcaccatcaaaaatgggttgtaaagcaccaccgatattaatcgccagtacgaacatgagatacatgacaaacagaaagacaggcacacccagccagcgattgagaataattttatctattgcctgagtcagtttattgggtattgctgagtcaacatccgtgactgccagacacaatttattgattgcctgatagcgggcatctgcaatgatgagttcaggttcttcaatctgtttctgttgcaggcggagtttgctctcggccaattgtgcctgcgtcagccctgaacgctcaaagctgtagatatccccttccagtatttgcaggctgagccagcgacgctgttgcagattgaagtttctgctgatcagatcagcaaggttgttggcttcctgcaataacgtatcggggtattgcaccagtacaggacgtacaggctggtggtagtggtcaatggcttttttaagcgtatctatccctgttgagcgggtagatacgagcggaatgaccggacaaccaagatgttgctccagtgctgcgatatcaatgttgatatgctggcttttggcgatatccagcatattcagggcaataatgcagggaataccaagctcaatgagctgtaatgaaaggtagagattacgttccagattcgaagcgtcaacgacattgatgaacatatcggcttcgctgctcagtatatagtgacaggcaatttgctcgtcaattgaggtttgctcggaaatggttgtgagagaataggtaccgggaagatcgacaaggtctatttgatgtttttgggtggaaaaatgcccggttttacgttcaaccgtgaccccagaccagttaccgacccgttgtcgggagcctgtaagttggttgaataaagtggttttcccagagttagggttaccgattaaacctatagttaattgtttcatcatactttttactgatcaggaatagtgtgcatcattgcattcagtctcaggactgtacggcatctggacttcattctgctggatgtactgctaatgtgaggagcgctaagtcttttttacggagaataaggttgactctgcgtgtttctatttgaatggggtctcccaaaggggcaactcggataacccgaaaagtagagccgggtagcatccccagagacaataatttttgcctgtatgcgcgatttatctgtgggaagaaccccagaattttatagctttgatttggagtcagtgacatataacactccgttaaaactcaaaagacagtgattatgagaatgattatcctcaataaagcgaaattcacaaggaaaaagtatattggttattttggattaaagcgctaatgagaataatatgcaataccaatatcatctatttatcactgaataatgacggaataaattgatattaatcaatttaatggcgatttaatcaaaaattaaagttatgtaaagaatatctgagaggaattaataacaagctccaataagaaatggagcttgttgttatatatttttctattaatttttcggtggataaagaagatcatttaatgatattgagacacgggcatcatcctgacgttcactccagcctgttgagtcgtatacccaccatgcttccacttttaattcatagaaacggcgtattgcattgccatgatagtcagcaatcggacgggattttttctttctgatattctcatccgggtaagttttcaggaagaagtagtcataggtttcctgtagttcatcgtcgggaacctgacgggcgtggccgatgaactgagagcctgcgagtatcagcgatgaatcaggcgtggtaatgctgctgtatatggtaccgctgacccgagggttgataagtagctcctgagaatggcgggtatcctgttttgaataccagattaaacttaatggattatatttaggaatataaaaaagtgtggatgaccaagctgactcggcattcggagcatgagtggcaaggttgaagaatcttatattgctgagtaagtcaaaactgctttggatatatttattcataaattattccttaacaatttgagtttattatctgtatttataattatgtaagcgacttatggtcactattaataatagtgattgaattttcgcaacagattatattaagtattaatgaagacaggcagtaatttctcctatttaaattgattagatcgacaataaattgcagtgtggtgatgaaaatagtattgatttattaaggtattttatacctgacagaactggcttaattaagccagttctgaaagtacattaccgcaggatattaacgttttttaccaaaagcggctgccagagcatcactcatggcactattagttaattgtgcggaaccggatgaacgcaaattctggcggcttttgccatttcggttacgttcattgccattacgttcctggcggttatttccctgagcgttattacggcgggccggagcttctcccggctgctcatcaaggcgcattgtcagggcaatacgtttgcggttcaggtcaacatccatcacctttactttcacgatatcgcccgttttcactacggtgtgtggatcttccacgaatcgatcggaaagggaagaaatatgtaccagtccatcctgatgtacaccgatatcaacaaacgcaccgaagttggtgacattagtgacagtaccttccagaatcatacctgcacgcaggtcattcattgtctccacaccgtcggcaaacgtggcggtcttgaactcagggcgagggtcgcgtcctggtttttccagctctttcagaatatcggtgaccgtcgggataccgaatttttccgtggtaaaatcctgagccttcaaatcgcgtaaagccgctgggttacccatcagttccggtaaagtctgctctgttgtagccagaattttttcaacgaccgggtaggattctgggtggacggtagaagcatccagcgggttatcaccctgattaatccgcaagaagcccgcacattgcaggaacgcttttggcccgaggcggcgaactttcagcagctcttcacggttgttgaaacgaccgttttcatcacgccaggtgacgatattctgggcgacagagcggctcagacctgcaacccgggtcagcagagaaacagatgcagtattcagatcaacaccaacactgtttacacagtcctcaaccacggtatccagttttttggcaagctgagtctggctgacatcgtgctgatactgaccaacaccaatggattttggctcgattttaaccagttccgccagtggatcctgaaggcgacgggcaatagaaaccgctccacgcagtgaaacgtccagatcagggaattcctgagctgccagttctgaggcagaataaacggatgcaccggcttcactgacaatgactttctgtgcagtaaccgcaggatactgtttctgaacgttggcaaagaagcgttctgtttcacgggatgccgtgccattaccaatagcgaccagctcaacgttatgtctggtgcacagcgctgcaaccgctgcggctgctttattttcctgccccgtgtgcgggtagatggtatctgtagccagcaatttaccggttgagtccacgacagcaactttcacgcctgttctcagacccggatccagacccattgtggaacgcatacccgcaggagccgccatcatcaggtcattcaggttacgggcgaagacgttgatcgcttcgttttctgctttttcgcgcagcgtacccattagctctgtttccatatgcagcagtactttgatccgccatgtccagttcacgacagctttgcgccagctatcagccggtgcgctgttcagacgcaggttcaggtggtcagtgataatctgctcgcagtaactttctttaggggcttcttcaaactggggatcggcattcagggacagttgcaggatgccttcattacgtccgcggaacatcgcaagagcgcggtgtgagggaacagaggagatagcttcatgatggtcgaagtaatcgctgaacttagcgccttcttcctctttaccttcaacgactttggcagtcaggtgggcatttttccacagatactcacgtacttttaccaacagagacgcatcttcagaaaaacgctccatcaatatatagcgggcaccatccagggcggacttggtgtctgcaacaccgttgtcagcattaacgtaagcagcagcggcagattccggttcttgctgcgggtcttgccacaacaggtctgccagtggctccagcccggcttcaatcgcaatttgaccacgggtacggcgcttaggtttataaggaaggtagaggtcttccagttcggttttgctgagcgtgctattaatggcttcagccagttcactcgtcagtttaccctgctcttcgatagatttcaggatagtctggcggcggtctgacagttcgcgcagatagccaagacggctttcaagctggcgaagctgggtgtcatcaagacctccggtagcttctttacggtaacgggcaacaaagggaacggtgtttccttcatcaagtaaagtaatagcagccagaacttgttggggctgagcctgtaactcaccggcaataattcgacttaaagattcattcatagtctattttcttcaactttctctgcgcctgtagatatcagcagatatccgcagacagggccagattcatcatttaactggatgctggcagggttcaaacttggctccattatatacgtacagagcgcaataatttccagtttctatatttcgtctttcaagtggcctctttgttggctgcgctgcatcttgaaatccattgtgtatatgccttctatctttctttcggttgtccgttttgttgcgagtgctgaaccaccgcagggactgattattttctgctgtgatgcgactcggaatttaacaggtatagcataatatttctgtcatgttgcgatggaactcatcgaatatctgcccggttaagatatagtactgcgccattaatcatattttctcaagtgagtttttcatgggcaaaagtaactatattacccgagagggctggcaggcgcttgatcaggaactgaaatacctttggaaaactgagcgcccacaagttactcaggctgtctctgatgcggctgcattaggcgatcgttcagaaaacgcagaatatatttatggtaaaaaaaggttaagagaaattgaccgtcgcgtgcgttttttatctaaaagactggatgtcttgcaaattgtagaccctgatccgcgacaggaaggaaaagttttttttggggcatgggttaaagtcgaaaacgaaaaagccgaagaatatattttccgcctggtggggccggatgagtttgatccggccaaaaaatggatttccattgattcgccggtggcaagagcgctacttggcaagcgggttgatgatgaagtgactgtaatgacgccgaatggtctggcggtttactggattctggaaatccgttatcagccaccggagatataaaagcagttggtgtaaatcagggagcaaggaaaacagggatgaaaaacagaaacataagtaattattgccaatattgcaaatattcttaaaatacatggcgttagtgttattttaaggcatggattttctgtaagaataatggatattgcgggcatggagcatcttgggagctgacacatgcaagagagttataaaatacttgttgttgatgatgatatgcgtttgcgagtattgctggaacgctacttatcggagcagggttttcaagttcgttgtgttgcaaatgcagagcagatggaccgcttattgaccagagaatctattcaactgattgtactggatttaatgttgccgggagaagatgggctttcaatctgtcgcagattaaggagtcagaataacccgatccctgtcattatgatctctgcgaaaggggaagaagttgaccggattgtcggtctggaaatcggagcggatgattatctggcaaagccctttaatccacgggaattactggcacgtatccgggcagtgttgcgcaggcactctaatgaattatccggcgcacagacaccggataatgccgtcgtgacgtttggtaaatttaaactggatctcgggacgcgagaaatgttccataaagatgaacaactatccctgaccagtggtgaattttctgtactgaaagcactggtgtctcatccccgtgaaccgttatcgcgggataagctgatgagtctggcccgtggcagggaatacggtgcaacggaacgttctattgatgtgcaggtttcccgtctgcgccgtctgcttgaagaagatccggcacatccccgctatatccagactgtttgggggttgggatatgttttcgttcctgacggtaaccaagcataaatcgtaataaggtgcctcataaggaataattggaagtacgttatgaaaaagttcaggctctcactgcatcataaattctcccgtgctctggtttgggcactggcgatgccgttgagcagcctgatgatcagttatctgtctgccaccatgctggcaaggcgggaagacatctcatttattaccgtattcccgtatatcctgatcagcacactattgtcagtattatttgttgccgcaatgtgctgtctttaccttcgggcacaaaggcgtcctctggccgccatacagcaggcaatcatcaggacaggaaaagggaaaatcattaccccattacctgaatcgggaacatccggcacccggtcggttatccgtgcctttaatcaaatgtcggtggcgcttaagtcgttggaggatgatcgggctatttttatagcaggtctcagccatgatttacgcactccgctgacacggatacggctggcgatggagttgattggcggagaaaatgatttcctttgtgaatccgtgaatcaggatattgaagagtgtaatgcaattattagccagttcatcgattatcagcgggccgggcaggatacggcaaaaattcgttgtgagttaaatcagctcattaaggaagtgatgagggcagaaaaggcagaaattgcagataacctgtctgttattccggttttcattatggccgaccctctgtcagtgaagcgtgtactggcgaatatgctcactaacgctcagcgttatggtaatggatggatcggtatcagcactggaaaaactgaaaaattcggctggtttcaggtggaagataatggcgctggtatcacaaaggaagacattgatattttgttccagcctttcaggcagggaaaagcgcatagcatgaataaccgccataatcacaggggcgttgggctggggcttgctattatccgccgtatcatcgacatgcatgacggatatcttgatgtgggcagaagtgaaaaaggaggcttatctattcgcgcttatatcccactagcggctgattcctgagttcttcattctgaaccactgtcataaaaatgtcataattcgtacattttgctgtcatcaaagtgacttatttttccctccagaatcatctttttatactcggtaaacttcaagtttcaacgggtaatatgaggcgagtccttatatctccccgcatcgcagggagatataacactcatcttgaagttgaattggtataaaaccaaactactaacagttgtttttgatgaatgatgtgtctcttagcggagggtgtatgaaaccagtgcgtctcactgtagtaggtatgatggcggtagcatcagctatggtatctgtctcttcattttcagcaaccagcctgacaggagccggagcgactttcccggcaccgatatatacccaatgggctgattcctaccaaaaagaaaccggcaacaaaatcaattatcagggaattggctcttcgggtggcgtaaaacaaatcatagctggtacggttgattttggtgcttcagatgcgccactcaccgatgaaaaactggcatctgagggtttattccagtttcctactgtgatcggtggcattgtgttggcggtaaaccttccgaatatcaaatcgggccaactggtgctggatggtaaaacgctgggagatatctatctcggcaccattaagaaatggaatgatcccgccattgcgaaactgaatccgaatcttaaactgcctgagcaggacattgccgttattcgccgtgcggatggctctggtacttcatttgtctttaccagctatctatctaaagtgaatagtgactggaaagtaaaagtcggctctggttctacagtgaagtggccgactgggctgggcggtaagggcaacgatggtattgccgcatttgttcagcgtttacccggttctattggctatgttgaatatgcttatgcgaaacagaataaccttgcttataccgggttgattaccgctgacggaaagacggttgttcccactgaagccaatttcagtgcggcggcaaaaggtgctgactggagtaaaagtttcgcacaggatctgactaatcagccgggcgaaaatgcgtggccaattacgtcaacgacattcatccttatccacaaacagcagaaaaatggcgcaaatggtgcagaggttctgaagttcttcgactgggcttatgagaaaggaggccgacaggcgaaagagctggattatgccgtgttgccgcaggatgttatcaaacaggtacgcgcagcatggaaaagcaacataaaggatgagcatggcaatgccctgtactagctccttatcgggtggaaactgataactctacccaatggatttcaagttgcatcgcggcggcaagggagcgaaccctcgggagcatagatagctatgtgaccggggtgagtgagtgcagccaacaaagaggcaacctgaaagacgaagggtatcaaatgggaattgaacgcatggcagaacataaagccccgggcaggtatggcgatatcattttcagtgcactggtcaggctgtctgcgctgatgacgttattcctgctgggaggcattatcatttcgttgtttgttgcttcctggccgagtatgcagcagtttggaatggctttcctgtggcagaaagactgggatgcgccggcagagatctttggcgcactggtaccgatttacggcacattagtcacctcgctcattgccctgattattgccgttccggttagttttggtatcgctctgtttttaacagaactggcaccaaactggctgaaacggccacttggcgtcgcaattgagttactggcggcaattcccagtattgtttatggcatgtgggggctgttcgtgtttgccccgctttttgccacctattttcagcagcctgtcggtgaagttttgtcgggcattcccattgtagggaaactgttctccggcccggccttcggtatcggtattctggctgcggggatcattcttgccattatgattattccctatattgcttctgtgatgcgcgatgtctttgaacagactccggtaatgatgaaagaatcggcttacggcgttggctgcacaacatgggaagtgatctggcatatcgttctgccttacaccaaaaatggtgtcattggcggtgttatgttggggctggggcgggcattaggggaaacgatggcggtgacttttattatcggcaacacctaccaactggatagcttttcgctctatatgccgggaaacagtatcacttctgcactggcaaacgaatttgccgaagctgagtcgggcctgcatacctctgctctgatggagctggggctgattttatttgtgatcacttttattgttctcgcgttgtcaaaactgatgattatgcgtctggccagaaatgaggggcgctaaataaaatggcgattactgataaacgaaaaaatggtagtgctggctcagaaagccataccagccgcaaccggaggcaagtttggcggcgtcagaaaaaccgcctcgccctgtttctgtctatggcaacaatggcatttggcctgttctggctggtctggattttaatttctacaatcaccaaaggcattgatggtatgtctgtggcgttatttactgaaatgacgccaccgcccaacagcgagggaggcgggctggcaaatgctattgtcggcagcggactcctgattttctgggcaacggtatttggcacacctttgggaattatggcggggatctatctggctgaatatggccgtcgctctttgctggctgaaatggttcgttttattaacgatatcctgctttcggccccctctattgtggtagggctatttgtctacaccatagtggtcatgaagatgcagcatttctccggttgggcagggattattgccctggctttgttacaaattcccatagttatccgcacaacggaaaatatgctgaaactggtgccgaataacttacgtgaagccgcttatgcactgggaacaccgaaatggaaaatgatcacggcgatcacgttaaaagcctccatatccggcattattaccggtgtcctgctggctattgcccgtattgctggtgaaactgcgcctttgttgtttacctccctttctaaccaattctggagcacagacctcagccaacccattgctaacctgcctgtcaccattttcaaatttgccatgagtccattctctgactggcagcaattggcatgggccggcgttttgctgattactctgtgtgtattgttgattaatattttggctcgggttttgtttgccaaaaagaaatttgccgataagaaattctgaaactgaagagagaagctgttgatgaataaggttaataatgatgtggcagggagtaaaattcaggtacgtgatctgaacttctattatggcaaatttcatgccctgaaaaatgtgacgttagatattgcgcagaataaagtgaccgcttttattggcccttcaggatgtggaaagtcaacattgttgcgcacctttaacaaaatgtatgaactgtacggagaacagagagccgaaggtgagatcctgcttgatggaacaaatattctggccgataaacaggatatagctttactgcgggctaaagtggggatggttttccagaagccgacaccttttccgatgtcgatttacgacaatattgcgtttggaatacgtttgtttgaaaaactcccaagagctgaaatggatgaacgggtgcgatgggcactgacgaaagcggcattgtggaacgaaacaaaagataagctgcatcagagcggttatagcctgtcaggaggccagcagcagcgtttgtgtattgcccgtggtattgccattcgtccggaagtgttattgctggatgaaccctgctcggccctcgacccgatttctacggggcgtattgaagagcttatcagtgaactgaaagcggaatataccgttgtgatcgtgactcataatatgcagcaggcagcacgttgttctgattatacggcttttatgtacttgggtgagctgattgaattcagtgacactgacatcttgttcaccacacccaaaatgaagcagaccgaagattacattaccggtcgttacggttgatacaggcagaaatggggtagctaaagatggataatctgaatttcggcaggcatatctccggccagttcaacgctgaactggaacatatccgtactgaacttatggcgatgggcggattagtggaggagcagcttagcaaagcgattctggcgatgcacaaccaggatagagagctggctcagcaggtcattgaagacgatgaaaaagttaatatgatggaagtggcaatagatgaagcctgtgttcgaattattgccaagcgtcagccgacggccagtgatctgcgcctgattatggttatctcaaaaaccattgcggagcttgagcgcattggtgatggagcgaataaaatttgtcagaccgcgctggagcggttttctcagcagcatcaaccgttgttggtcagtctggaatctttgggctggcataccatccgaatgctgcatgatgtactggatgcctttgctcgcatggatttggcagaagccatccgtatttatcgtgaagataaaaaagtagatcaggaatatgaaggcattgtccgccaattaatgacctatatgatggaagatccgcgtaccattccaagcattatgaccgcactcttctgtgcccgctctattgagcgtatcggcgatcgctgccagaacatttgtgagtttattttctattacgtaaaggggcaggattttcgtcatattggtggcgataaactggaagagctgctgacaaaaggtgagtaatttttattccaaaataatataaatatagtattttatattatttcatgtgctatgccgaaattgatagcttttgttaaacaatgaacaattattgataacaggggtgtccaatgaaataccgcaatcaatctcggcgtaatcaatcccgaatagcactgactgcattactgaccagtctggtattggcttcaggtgtcgctaaggcagataaacttgatgatataaaaaaagcaggcacagttcgtattgcggtatttgatagtaacccgccttttggttttatcgatcctcaaacaaaaaaactggcaggttatgatgtggatatcgccaatgccattgccaacgatctgggtgtaaaactggaactgcgcccgaccaatcccgctaaccgtattccactcctttcatccaaaaaaattgatttaattgctgcgaacttcacgattaccgatgaacgcgcaaaacaggtgaatttctccattccttactttgccacagggcaaaaattcattgcacgtaaaggcgttctgactaacccggacgatatcgctaaactgcgtatcggcgcagataaagggactgttcaggaaattacgctgcgtgaacgttatccaacgaccaaagtcatctcttatgacgatactccgctggcatttgctgcattgagaaatggtaatgttcaggcgatcacgcaggatgatgccaaattagttggcctgctggccaatgtgcctgaggcgcaaaaagcagattttgaaatctctccgttcagtattacccgtgaatatcaggcagtagcggcttcaaaaggagaagcccgcttggttgattccgtaaaccagacattactgaaactggaaaaagaaggcgaagcagaaaaaatttataaccgctggtttggccctgaaacaaaatcggctcagccgcgcggtgatttcagatttgccccgttaaacaatcaggcagagtaatagatagcacctgaaatgacagcgaaagccagccccgtctttgcacggggctgtgctgttttgtgttgagatcccccatcgtctttcaggttgcctctttgttggctacgctcactcaccccgagttcctttgccgctgcgatgcaactcgaaattcatagggtatagggtgaatattattaatatggtgaacgcgctatgtttgagcaatttatcggcgagcacttactggctcctgaatatctgcaatggctctggcaagggtttctgattacgttgtggatctcggcctgtactattgcttcctcttccttattaggttttgtcattgcggctgcacgggacagtcaaattaagccattgcgttggctggtcacagcctatacctcggtattccgtaatacgccactgttggtacaactatttttctggtatttcgcctccggccagattttgcctcaggccgctatgatctggctgaatacttcccatgaaatcacactggcaggtttaacactggaatggccttcatttgaatttttggcggggtttatcggtctgacgctctattcagcaccttttgtcgcggaagaactgagagcaggcatgcaggggattgggcgtgggcaaaaatatgcggctcaggctctgggcttaactggctggcaggcgatgcgctatgttgtgctgccacaagcactgaaaattgctatgccgccccttttagggcagtacatgactatcgttaagaactcatcattaacgatggcgattggtgtggctgaactttcctatgcttcccgtcaggtagaaacacaatccctgaaaacttttgaagcgtttggtgttgcgacagtgctttacatcgcgattattgcggtgatggaaggctgggggcagtggcgtcagcagagaatactggcgagagggcattgatatggattttactgttatcgctgaaaactggcgctacctactgttgggcacgtttc

SEQ ID NO: 110 - DNA, 25983 bp, Xenorhabdus sp.
gagtatatgcatcgttaatttcaccattttttctttgtgctcccagccattgcagcattaatttactttctgctttttgctgagtttcttcactaaaatcgatctgctggttttccctgtcataacaagcctcaagccatgcccaaccactccggcaaaataggggaagaggctctgtcattccctgaaaataacccgcaaccagatggttcagataatttctggcttcgttaaccgataatggcgaaaaacgccatgcactgttttctcttccatatatgcggctttcgccgtctcctccagaaaggcaataggcaaggtgttcaatccatagttggataccatcattggcagttaagttcgccgggcgccaacataaaattccatccggttgaactttattcacttttccggtcaaagtgacagtatccaactcatagcatagctcaataacagaactctccactctctcttcacggatcttatctgcaagtaactgcatcgcttccaactgattaagccagtaaacttccccaaatgcgccatgtggcagcccgccagatgcacgcaggtgataaaacagcgattcaggctgttcctgctcaatcaggatatttagcaatagttggttgaattgataacgttgcaggtgatccaatacaaagggttcttcttcaggcagctccgtttcttcaataacaaaatggactttcagtgtttgctggaagaatgccctgactggatggcgatagaaccgcaccagctcatccagtgatacctcttttatttcgctggtgtcacaatctaatggctgaccaaaataaaccggggaaacgccctgcaaactagccgccggcagccattccgccgcataactttgttgttcatgttcaggctgaaaattttctatcgcgaaagggacacgggtatgctggagcaataaatggtttctgatcctttttgcgctgtcatcaacattcagcatctcatcttccggcaagcggcaactctggcaaatataatccagcagttcattcaccagtacggagggattgcactctttatcatcgcggattgatttaccgatatagctgacataaagacattcttctgctgagatcaaggcttccagaaacagatagcggtcatcatcacgtcgtttccgatcacctctctggcttttttctgccatgagatcaaaacccagtggtggaatagttcgcggataaaccccatcattcattcccaacagacaaacaactttaaaaggaacagaacgcatgggcatcagggtacagaaattcagtgaacccgccagaaaacgctggcttattttttcatcatcaaaacgaagtgccagttcatcacgcaacaataccagcggtattttttggtcataatgcgcatacaggccattttctaccactttctgccattgctgggtaatcagtgccaataccagctctgtttcattatccgcaataaaaaaggtttccagcaattgtgggcaaataccgagccagtccgccagaggctgttcttcactcaggatcttgcgccagcggtttagctccatcagaaattcagccagttgccctgccaattctgcggccaatccgctggattcatcataaggtaaaacatcattccacggccctgcatggctatccattgcataacccaatagcatacgtgtcaggccaaaatgccaggtattctgccctgtagcaggcagggacagcgcttcaatattgtcatcgtccagcccccaacagatcccggattcttttacccaacgacgtaataaacgcagtccttcttcctgaattgaaaatttacccgccagtgccgggacttccagtagtgccaatacctgctcggcggtaaaacggctttggggtaaatccagcagagtaatgaaagcctgtaataccggatgtgcctgacgggctttacggtcagaaatagcaaaaggaatataacgttcactcggggcattaccgaatacagcctgaatataaggcgtataactgtcgatatccgccatcatcacaataatatcccgtggcgtcagagaaggattttcatctaacaggcgcaggacataatcctgcaaaacctcgacttccctttgtgggctatggcatgaatgaaaagatacggagcgatcttttcgatcaatcggacgttttttcaggctattgttgaatgtattatctgttgaaccaatctgggcatgatcttcaaggtccagaatatcacgctgaatctgatgtaaaaggcaacctggttcctgttcaacaaagccatgaatatcagcgtctggctccagctgtgacagcagataaagattgtctcggcccagttttccccatgatgccagtaacgggttactcagttcctgttcgccttcttcgttgaaaagagaaggggcattatctggatcccggaaccgctccagatattgctgagttcgataatgtttaggtttacggctgttcagtctggcgagaaatgtataactctgaatatccccccaataatattggcatggattggtaaacatcaggtggatatcaatctgttgccccagcgccttaattacctgcatataagtgggtggcagggaggatatgccacagataaaaacccgtgaaagcagtttttcccgtggaaaatggcctttttccaacgttgaaataaaccggctatataaatgggcacgatgccacataggctgctgtaattgaagggtatattcgttcagtgcaacccatagccgtttttgccactcctgactggcgctcagcccttcaacaagttgccctttttcccagctttccagccattgcggacgataaaccagatactggtcaaacaggtcagctaccctgccagccaattggtgaattttgcgtttatcgttatcctgatcaagataatgtctgagtgctataaattcaggttctgttaacagaccaggtaaaagtgtcatcagtttccatttcatagcatctttgctgaatgcactttctttcggaacgtccggtaataccacagtgaacatctgccagataaacgttgccggcagtggaaactcgatatttgctgcaatccccagtctttcagccagctgaatttgtagccactgcgacataccggggctttgaaccagaatcacttctttgtcaaatgggttggcgagagggttttccccaataaatctcgtcatcaactccttcagaagatcaagttgatttgaatgataaactgtaaacatcaatactcccacctgcacaaaaccagcgttctaatttacctgaaggattatagccttttgtcaccttcaccgttatccggtagcaccccgataattcaaattcctgctgaaactcagtttcccacccttgttgtggcgctgtttcatcccgtggaggtttgccttctgataattcatatcgttccaattgttcatgtgccagctttactgccttgagttgcagccagtactgctgaaaatttgatgacagcgcctgatggtaacgcatcaaacctaacagggagatagcgaacaccacagatgccaccataacctccggcaaacttatgccactctgtcggttatttctctggtttatcggggctattttcataaacgattttcataaataacgttcataaacaaaaagcagcctgagtcacagggcaaaaatccagccagccactttcaataggaataagtgtatcccgatttaagtgtttcatccgtttcatccattgataaaactcaagctgttctcctgcggaaaactgcgctgttccctttaacagaaaaagattgtcctcaaagtgccggaggcagcttttcagataagaaccgggcttttgtaaacagtaccagttttccagtttctgcgactcaagcggccataactggacttttccccacgccagagatgattcagcatgttgaaaagcattcagataccgttgttcatcaaacatcattaacatggcgttttcctgttgataatgaagtgctttcagcgtcatcaaacttaatgtcagcatcataagaatagagatcaataaggcatttccgctttgctgttcgcatcttgaatacctgtgttgattcaccgaattatttcctgatattacgcaaccggattgtggtgcgatgatgatgaataatagaaggagatttcacccaactggccttgatggataacgtgataaatattactccatgcagtgacctcgattgttcaaggtgaaacttatcaatattcacctctttgggatcaaaaagccgttcccagccattgtcctgacaacttaccgcccctcttttccattcgagaatgcgattatttaaccgataaccgaagaattcagaggctgcatgttcaggttcttcccagcgattatttaaattaagatcaaacgcgctaataaagcaggaatttgtagattcagcctgtttattttggatcaccagcggttcccctttacattgctttctgtccagacaataacccgctcgtcggagatctttttccatcatatgagccacgcggttgatcagataatgaagacgatactgacgataaagatcgaggatctgactcgataaaaccggataggtttttgccatcgcaataaaaatgacactaccaaccaacatggcaactaacacttccaacagggaaaaacctgactgtttttgcctgtaataaccaatagcccagttcataggttttttattccctcacaatcaggcagctgatttagattattactgcatgttctgatcctgccccgtcctgagatcacaacacttatttctccggctgcatttgccagcgcgaagctggctggcattgcggtattccggataccataaaaatcaattcggtggctagttgctgatgccagaaacacatcatcatggggggaactaacccgttctccctcaccttcatggcaatcactgcttttagtggctgatgaaactaaacaccagggcggcccagccaccagccataatgtccgttcctgattccgataattagccagagcctgctgcctttccataaacgacagcacattctgcgctgccgattgtaagtgcaggctattctgataattttcccagctatacagcccccagagcagactcatagaaactaaaaccattgctatcagcagctctaacagcgtgaatccattttgtttattacccatcagtattcagcctatgccgcaattcattccgacaggcaaaatatattcaatccgaaagagagtaaaagcgtcagtttctatttatgcgagaggatttgaggaaagaaatcagtatattgcggggttacattttatttgcgagcctactcgataatattaccaagagactctggaatcattgtacatctgggatgtgagtaaaaccatttccgcacagttgcaacaatgacataattgattaaaatttgctcatattaatgatttaatatactatactgaatataaaatcgttaataaaacagctatcctctgcatatttcaagatgcaacttacataaggagtatcaaatgagcacttatgcccaggcccgtgattacaacgacactgatgtagtgatagaccgcattgcaactgtttctgacatcataagaaaagcatttacctcaggtcaggcccatatcgataaacgtgtattgggaaagagtgatgttgaattcatgtttgaagttctggccagcacaactaaggcgatggcaatagaagaaattactcctgaaaagaaaacgctattacgccgcttaaaaagcaagctcattttcatggaaaccctgaaaaaagatggcggggtgctttcatcagcagaaactgccaagcaattaggtgtatcgaaagtgactgttaaaaattggaaagatgcaggaaaactattagcactaaatattgatggggaattttattttccagtatttcagtttactgataacagcaagatgtctaataaaggtgtattaaaaggaatcggtcaattactgcctttactgaaagagagagggtttagtgatcgtctgcaatattcgttctttatggagaagcgtaatactgcattgaatggcatgtttccagaaggaaaagaatttagcgttgcccagttattacaagagggggcatctgatgccgttatgcaggaattgcatcatcttgttcacttatacggctctcaggatgctgcataatcaggaaaaggggataattttcccctgcctgtctgtatattctataaattccaatatcagccttcttctaccgggattcctaattgctctaccagaatatctgccacggatttcccctgatattcaaattcactaaggcgctgtatagaatgtgctttagtgactgcaatcccagttccatcgggaacatcatgccatagagcaaaacattcctcagtcgtcacgttagaaggaaatttgataccattcagcccggctacatggacttttttagccagtaattgagttgttttccgggatgatgtggtcatatcgttgagtgtcaacgaggttttctttattaattttgttgtatcaaagagcctcagatccttttcgatgacaacaataccaatatagaaattttccagatcagattcccgaatccccagcttcccctgaaatacttctttcattgccgtcaggggatcactcgccagatacattgtgccatttatcccgtcagttaaaccaaaacgggtatcggtaccattcggattgaaaaaaacacaacttccgccatactctccatgttgcaatcgtattttttcactacttgacggtactttcattgaacaggcgtgaaatatatcctccgaaaaactttccacttttttttcaatagatttacgtttcatttcaaaactctcactctttattggctgtgatgcatcttgaaatccatgaggtatatctttgtcactttctcgttaatttatttcttctgtgagggtattcaggttttccagaaatgataatttattaaattgtttttttctttaccgatttacttatccgatgatatctaaatataaaaagaatttttccatccccaaaacggggatggaaaaaataagtaattatttttactgactgaattaggtcagaattagattgcaaccggtgctttaatacccggatgcggatcgtagccttcgatttcaaaatcttcgaatcgataatcaaacaatgatgctggcttacgtttgataaccagtttcggcaatgcgcgcggttcgcggctcagttgaagtttcgtctgttccatgtggttgttataaaggtgagtatcaccacccgtccaaacaaaatcacccacttccagatcacactgctgagccatcatatgcaccaacaatgcgtagctggcgatgttgaatggtagccccaggaaaacatcacaggaacgctggtaaagctggcaggacagtttgccatctgccacatagaactggaagaaagcatgacatggtgccagtgccattttatccagttctccgacattccaggcggaaacgatgatccgacgcgagtccgggtcacttttcagctgttcaataacgttggtcagctgatcaatctgacggccatccggtgcgccccatgaacgccactgtttaccataaaccggccctaaatcaccattttcatcagcccattcgtcccagatactgacgccattatcatgcaggtatttgatattagtatcaccattcagaaaccataacagttcatgaatgatggaacgaagatggcagcgcttggttgtcaccagcggaaagccttcctgcaaattgaaacgcatctgatgaccaaagatcgaaagtgttcctgtgcctgtgcggtcatcttttgctgtgccttcttccagcacttttttcattaaatccagatactgtttcattttgcctcttgtaccttgtctttctgcgtattttttcgcgtattgttgccggtgttattgttgctgggacgtttataggcccatatcatcatcaatatcccgactaaaatcattggaatcgaaaggatctgacccatgctgatcccatcaaataatccgagctgggcatcaggctggcggaaaaattcaacgatgatgcggaatgcaccgtaaccgatcaggaataatcctgagacgcttcccatcgggcgtgacttacggataaataaattaaggatgataaacaggacaatgccttccagtaccatctcatacagttgtgaaggatgacggggcaggacaccatatttttccagaataggccataaagaagggtctttagttgccagtgcgatgtcttcactttgggagccggggaacaacattgcccacggtgtatcaagcgtaacacgcccccacagttcgccattgataaagttaccaatgcgccccatccctaatccaaaaggaaccagtggagcaacaaaatcggcagtttgcaggaagtggcgtttagtcctgcgggagaaccaccacattgcacaaataacaccgatcagcccaccgtggaaagacatcccgccatcccagaccttaaacagatacagagggttttccataaacaccgggaggttatagaacagaacatacccgagacgcccgccgaggaataccccgacaaaccccgcatacagcaggttttctacctcgttcttctcccagccactatttggttttgctgcccgacgatttgccagccacatggcaaaaacaaagccaaccaaatacataaaaccgtaccagtgaagtgataccggcccgattgagaatatgaccggatcaatattaggaaatgccagatagctagtgctcatcgttccccactaaaaataatgttgtgtgaatgccctaaggcagatcattgtaaataacagatcaccgtaaataaccgatcaccttaaataacaatggtaaataatagcatgggcggctaaatgccaccacgcaccagcccaccaaggccgtgggtttccataaaagcagaacaaatttctttcacctgttgggtggtttctgccctcagaatttcctgaataaaataactcagttctgcggaatctaaatgatgtaataggtatttaattcgtggaatactccggccgctcatgctcaggcaacgataacccaaaccaactaatatcagcactcccatcggcaaacccgccatttcaccacaaacactaacgggtaaaccaatacgctgactttcatcaacaatctgttttaaggccttaatcattgccggatgaagattgtcatacaaagaagcaacatgggtattattacgatccaccgcaagtaaatactgggttaagtcgttggtaccaatagagataaaatcaacccgtttcttcaattgtggtaacagcaggatcagagagggcacttctaccatgacgccaatttgtggcatcgcaatggttgtgccagcagattgttcagcttctgtctttgccctgttgatcagttttttggcttcatcaatctcttcaatacagcttaccatcggtaacaatattttcagatttccggtcgatatattcgctttcaacatcgccctaagctggatcagaaatatttccggctgatccagcgttatgcgaatccctcgccagccaagacaagggttttcttcatgaataggcatatacggaagatgtttgtcagcgccaatatccagtgttctcaacacaactgatttgtcagggaaaagtgtcagcatttcctgatagcgatttctctgttcatcttctgatgggaaaccgctatgcagcataaaagggatctcagtacgatacaacccgacgccatcaatactatcgcctatttgttgctcatatttcaggctcagccctgcattaagctgaacccgtactctctctccacttttaagccgggctttttgttgctgcccgccttcggccagtttactgagaacctgctcttcttcgatgatctggcgatattcctgaacaaccagtggctcaggatcaatgaaaaattctccccgatatccatccagaatcaacattcggttatgcagcaattcaggatgaatatcagcgcccatgatcgccggtattcccatcgccctgactaagattgcagaatgtgaatgagttgccccatcacgcacaataacacccaccagcttatcctgcggaatttcagccagtaagttagcgctgagttcatctgccaccagactcaacaaccaccgactaaagtcggtgggttagtgattaacggactgaaagtccggatacgcatcgactgaacgatgcgtcaattatccagcctgaagtgatcattcgggttcggttcaaaatgatgcgccagataggcctttatcatctcttccgttaactgacctaccgtcgcacaaaaatagcctctgccccaaaaatgctgaccccagtaacgctttttcaagtgagcaaactcttcaaacaacttacttgctgtccttccctttattcgcctcatgatttctgagggcgctaagctcggaggacaactcaccagtatatgcacatggtctttgctcacgaccccttctactatcctgatttcaaacgcttcacaggtctgacgaactagctctctcacccgtaagccaacttcacctgtgagcactttgtgtctgtattttgttacccacacaaaatgatactcaatctgaaataccgtgtggctgccatatctgtaatccatattgcacctctcgtgcaacacagtatcgcagctaaagctgaccgactaaagtcggtggttttaacctttcatatggaaaaataaaaaaacaagtcgttgatcttgccatgaacaatgccggcatccgtgatatagccaaagccctgcatataagcattaatgctgtcgtacgcgttttaaatctatagttcccctcgtttttgcaacactaatttttgatgaatttttggcttgcttaaatctatccggcgtctctataggcaatgtttgagggtgatcaaggccttgaatacatgaccgtcgcttaatgtcggtgtatgaacaacaccgttttcagcaaaccagatttcagaggttgtcagcagccagcgtttgccatcaaaggggacaataccgtttttatcctcacgtataatcacaggctctgacagtgataacgacacaacaataatcgctgtttcgccgttcactttgacagtcatagctggctatgtgatatcactgatacatcagctatctcccgctcccagccacaacaacgcatctccggggctaatggcacttcccggctgacagctaatctttgtaacccggcccgcctgtggagcatgaatcgccagctccatcttcatggcttctacaataatcagcggctggccttcttccacgtcatcgcctgatttgaccagtactttccagatattcccgctcatatccgcactaatctgcaaaccatgctcattaagatccgcttcttcttgtggctgttcctccccatcctgaacagaacgctcttcttccggctgttcctgttgccagcgcatgacctcggtttcaaaagccactgcctgtcttagtttgaaataggcaatatcttcggcattttctttcagaaagtgcaggtgttcggcaaaatcaaattgcgtattttcaatatggatagcagtacgcccctcctgaaaatcctcccgtaactgttctaactctgcttcagtaacaggataaaaacggatttgatcaaaaaatcgcaacagccacggcttatcttcctcgaactgttcatttttcagaaatttgttccaaatcggcagggttcgtcccaccagctgataacctccgggagaatccatgccatagatacacatatacgaaccgccaataccgacagttccttctgcggtaaaagtacgtgccgggttgtattttgagcttaaaaggcgatggcgagggtcaatgggaacagcgcacggagcacccagatacacgtctcccaacccgaggatcaggtaactggcatcaaataggatacggcgcacagcttcacgatcagccagcccgttaatacgctgaataaaatcgacgttattcggtaaccacggagcactggatcttaccgtgctctgataacggtccacggctcccagtgttgcgctgtcttcaaatgccatcggcagatggataatgcgagatggcactttcatggtgctgacattgccaagctgtttctccaaagagagcaacaaagcgatgagtttctgctgttctatttgccgattgtcatagcggatttgcaaagaacgtacacccggagctatttctttaattcccggttcagctaaaacatgtagtttttccatcaacagatgtacccgcaggcgcagcgccaaatccagaatattttcaccatattcgatcagaatatagttatctcccgcctgacgataaacaaccgccggagcagaatgagtggcggaaaccgctgccagcacggcaccagaatgttcttcttctatctgtaatgttcgctctagttttaatggtgcttccgacgttgatctcaacgtggcaataatacgattttgctgctcttccagagtaatcgcttcttccatactgacgggatggaaacggatacgatctcccggcttgacctgaccgactttccacaattcagctttggcaatggtaacagggcaaacaaaaccaccgaggctaggcccgtcacgggtgaggatgacaggaaaatcgcctgtaaaattgatagaaccaatggcgtactcacagtcatgaatatttgaaggatgtaaacccgcttcgccgccatcaggacgcgcccagacaggttttgggcctattaaccgtacacccagacggtttgaattgtaatgcacctgccattcggcagagaaaaattcatctatataatcctgagcgaaaaaatcaggcgcaccatgcggcccataaagtacgccaatatcccatatatcgccataaacggggatcgaggcaggttcaggtgcctttggtaggctgattggtgcgggagttgtacaggcgggtaaggctggctgtgagatgggaagcatatcggcaatttttaagatgcggccagcatgtccgccaaattgcccgagagcaaaggtagaacggcttccgaggtaacagggaacatcaatgccatttctgaccgcaaggtatgtacggcagccggattgtgcccgccctatctcaagtatttgccccgctttgatatttagtggttgccaataaggtacgcttgtcccgtctaataatgcgctactctctgcgccggtcagcgcaatcagtgcgtcacaatgaaactgtaaggttggcccctccagcgtaaattccagtccggcggccgattcatgattaccgacaatccggttcgctaaccgaaaagccagatcatccatcgggccggatggtggaacaccgatatcccaataccctgaccggccgggataatcctgaacactgctccatgtccccgctttcagaacctcaataacacttgcctgaggttcaaagctatccagcattcgggtccagacttgtcctttttggaatggttcactggctgtaatttgacgtaggtattccagattagttgtaatgccatgcaattggcaggaatccagtgcttcacgcagtttgatcagcgctttttctcgattttctgcatgaacaatcattttagcgatcatcggatcataaaacgcggaaacctcactgcccgtgctcacaccactatcgatacgtataccttcagagaatttaacttccgtcagaacacccggagcaggctgaaagtttttcagtgggttttcggcatacaggcgcacttcaatcgcggctccaaccggtgcccgctttaaatcctcccagtcaatgggtagcccagccgcaacccgcagcatatattccactaaatcaagcccggtcacgcattccgtcacaggatgttcaacttgcagacgggtattaacctcaagaaagtaaaattcatcctgttcgacatcgtaaatgtactctaccgtacctgcgctgcgatacttcaccaactggcccaattgtactgcggaatccagcaacgccgttcgggtctgctccggcaaattaggcgccggagcttcttctacgactttttgattccggcgctgcaaagagcaatcacgctcttccagcgccacaacattccctttaccgtcgccgaaaatctgcacttcaagatggcgtgcctgcctgatacaccgctccagaaaaacaccggtatcactgaaaaactgttcaccaagatggcgcacactctcccatgcctcactcagtgcatttgcgtcataacaacagctaaggccgatcccaccaccaccggcagtgcttttcagcataaccggataaccgatagtctcagcggcactaagtgcttcatccagtgaattgagcaaccctgttcccggtgtcatcggtacacctgcttctgcggccagttctctcgctcggtgtttcaggccaaattcaccaatctggtgtgatgtcgggccaacaaagacaatacccgctttttcacacgcttgtgcaaacagtagacattcagacaaaaatccatatcccggccagatggcctctgcatggctctgttgtgctgcgcttatgattttatcgatacacaggtaactctcactggctttttccccgtttatcggtaatgcgatatcagcatctttaacatgttgtgaatttttatctgcgtctgaatacacagccacactgacaattccgagccgtttcagagtacggatagcacggcaggcaatttctccgcggttagcaatcaatacagttttaaacattgtctttctcctgattgataacccaattacgccagccaccgaactctgtaatatccgttgcacctttcagtgcaaccggttcgcagataaaacctttcacccagcgaccatcggctaactccagtgaaccgatgcctaatggtggcggaatttcagcaacgaatgcaccaaaataggccagtggaatatcccaaagctcaatactgatggatgctcctgtgtcatccctcactaatccgggcttggggggctgagtgttggctagttcgtaaagtcggtaacagctcgcggtctgtgtcgtctcaacaaatacggcgttacgttcggttaattggtcgttcagaggcatgccccgaagatgagctccgacaaccgctaaacgaatatgctgcccggatggtggtaacaccatcgcttccccatcaagtaattggccggtagcaccaagtggtaatgcgaggtgctgctgccagcgtagaccaaatgatgcaagtgcccggtcgtgccaggctggtgcaagtaaggtgatacctgcgggtaatccatcagttcggaacggtgcaggcaaggcaagtgcggaaagattggcaaggttggtgaaattggtataaatgccaagttcagaattatagtgaatcggcgttcttttaatttcttcaatcgttctgattgtcggtgtcgtgggaacaataagagcatcaaagccggctaatatgtgctggatcttcctcgccagttctgcccgtaggtattcggcattaaacgcatcgacggcgctgtaatttttaccactgtcaataatctggcgcacttctggatccatcattgcaggaaaactgagcatgccattcacaacagtcgtgcgctcagcaacccatgctccctgataaagttgctcacccagttggttgaataccaagaaatcaattggctgaagagtggcccccatattttgcaactcgtgcagagcctcctgccatgcggattcagcaatcgtgtcatgacaaaatacaggattggcaggaatagcaaatagagggtgatccggcaatgttgcgggtgtagatgccggatttatgcaggaataagcatcattttcgtcgaatcctccggcaatatccgcaacactgaaagcatcttcaaccgtcagggcaaaaacagataaggtatcgttgagtcgacaggcaggaacaacacctttggcggaaagccagccttttgttggtttcaaacccacaatattattgaagccagcaggcacccgtccggaacctgcggtatccgtcccaagcgcgaatggcactaatccccgggcaacgacagaagcagagccagaactggagccgccactaatataacgatcattgaaactgtttttaacgacgccataaggtgaacgagtgccgactaatccggtagcaaactgatccatattcgtttttccaacgacgatagctcccgccgcttttagtctggcaaccgctgtcgcatcttcatctgcgatatattcaaacgccgggcaggccgcggttgtcggccagtcagcaacatcaatattatccttaactgcaaaaggaataccgaacaaaggaaatgcgtcgggattacgctgataagccggtaaaagtaaaccaatctgagcctgtaactgctccggtgttgcaagataaatccaggcattatcatcaggtaaaaaggaatctagatgctgttgcagtaaagcaaaaacggactccacatcgtgtcgtatccgctcatgccagtattttaaggtatagccagtcattgttgtcatgctgtgatactccagtggatatagttggatttacacagcaatacgcatgccaaaataataatatgctttttttcaactgattaaggttggggaaaatatcagagataatggtttgcactattatggttcattagctgaacaataatggtgcttgtttttaacttagtcgattagcgataagaaaatgggcggcaataataagaataaatatggtgattattattcacctgatgaatgaatcataaattacttgagtaaaaatagagaataaatatgagtgatcattattagaaatagaataagtcacgtccaaattttttattaaaatatcagtatattttttatattttacttaacctgtcaaactacaaaattataggtaaatataaacaatttcatttcacaaacaaacttttataacgaactatctataaatgatagcaataacaacgagtcaattaatgttcaataagtcactgttccgttaaggatgggcagtaagtgtagcgatatcatcattatttatttaatatatcatcggaaatagacatattgcttgtgatccatcccgaccccaaaagagaaaaatgatgaaaacaacatccaagatattagttagtctggcctgtgtcgttatgctcgccggctgtgcccgcacaaccccaataaatactcaacaaacaacaatcgtgacaaaaaattcactacctacagtgaaaaaagcgatccttgaggcagggcaaaaacgtaaatggataatgaatgaaatttctccgggtgttatcgacggattactgaatactcgtgggcacgaagttaagatacgtattacctacacgaataaaaattattctattcactatatcagcagcaaaggactaaaggctaaaaacggaaagatccaccgtaaatataatatgtggactaatacattgaataatgacattcaagtacgtttagctactatggccaaccaataatttcttcatgttactggcgtatttcacgcgaacgtagccctatttttacattaaccctaatttcattagggtttaactattccattggatatacggatatatgaccactccccataattacgaccaagatgatttaagtgcgtttgaagcaattactgaagctcagcgcattgcttttgcaccaatgctatttcagacggcaatttgcctgcgtgattttggtatcttatcttttctggataaacaccataaagagggagcaacaaaagatgaaatctgtagtggttcaaaatcagacaactatggagtaggtgttttattggatatggggttaagtggcagaattattcttaagcgagatgatcgttatttcctcagtaaagttggtcattatttgttgcatgataaaatgactcgcgtcaatatggattttactcaggacatatgttaccagggcttatttcatctgaaagaatcgctgcaagaaaataagcctgccggtttaaaagtatttggtgaatggtcaacaatttacccggctctcagccaactaccagaaccagccaaaacaagctggttttcatttgaccatttttactctgattctgctttcaatgcagcattaaaagccattttttctcttaaccccaaattgatttatgacgttggtggaaatacaggaaaatgggcattgcgctgctgccaatatgacagtaaagtcagcgtcactattctggatttaccccagcaaattgaactggctgaaaaaaatatcctcagtcagggaatggctgaacgtatttcaggccaccctgttgatatgttgtcggattgtaaattacctaaagatgccgatatttggtggatgagtcagttcctcgactgtttttccgaaacacagattgttgatattttacgtaagatcgctgcatcaatgaaaccagatgccagagtatgcatcatggaattattctgggactgtcaaccatttgaagcggctgcgtatagcctcaatgcaacttcgctttattttacctgcatggcaaatggcaatagccgtttttatagtatggacaactttaatcaattcctcgataaagccggatttgaagtagaaaacaaaattgatcagttagggcttgggcatacgctactggtttgcaagaaaaaataattgacggtatttcatgaaattgacattggatattacagattggcaagccgtagctccgggcctttctgttcctgaagaatgggtaaaatggtctgccatttcaccagctgccatagatggctcacactctctagcaaaatgctctcagctcccgatgatgacagctcgccgtctcaattcaggcagccgcctagctgtagattgcggtttaagcattttacgccgaaataaagtggatgccattgtctataccagccgtcatggtgaactggagcgcaattatcagatactgatgaatctggcacaaaccgaacctatttccccaactaatttcgccatgtcagttcataattcgtctgtggggaatctcactattgtagccaaggcaccgctggtttcttcttcagtttctgccggaattgacagttttcagcagggattatttgaagttgcgaccctgcatcatgctggttacagcaaagtgttacttgtcgattttgacggcaagatccccgatttctaccacaatgaaatagatgaaaatacacccatctttccattcgcagttgcgtttctttttgagcaaggaaagagtttacattgtgaaaagcacccgtcaccggagacagaccctgcccttccccagagccttcagtttctacacggctggttaaacggaaaacagcgctttaccgtagctggcgatcattgtgcatggcactggagcaaatagcatggaagaaaagataataaaccgcatcactgaacaggctaactggctctggcgtctactgatgacagggttctgttttgctctgtttggtattggtgggttattactttctctgatctggtttaatttactattggtttttcagcgaaacgctgagaaacggctccgtatcgcacggcgtagtatctcaacctgttttcgcctgttcctatttttgaccagaaaactgggagtattgaattatcactttaatggtgcagataaactgcgtacagataaaggctgtctaatcgtcgccaatcaccctactttgttggattacgtcatcttggcatcgaatctgccggatgtggattgtatcgtcaaatctgcactgctacgtaacccttttctcagtggtgtggttcgctctgctcgctatctcatcaacagtgatgccgagaccttgctgcttgcctgccgcgaaagactggctaccggtggcaatatcttgatttttccggaaggaacgcgtacaacgcccggtcatcctatttcactccagcgcggtgctgccaatattgcggtccgctgtgaatgtgatatccgggttgtacacattacatgcagccaaaagatgctggataaaaaaagtaagtggtatcaaattccacccaaaaaaccgatttataccattaccgttggtgagcaactcgccaatggggatttttctgccgatatagagagcggatacgctattgctgcccgccagctcaatcgccaacttacacagttattaacaccatcaaattactagatgttggatacaataatgcaagaatcaaacatgcaagaactaaaccaaaacttacagatcgaaataaaacaactaattatagataccctgaatctggaagatatcacacctgctgatattgaaactgaagcgcctctgttcggtgacgggctgggattagactccattgatgcgctggagttaggtctggcgattaaaacccgctatggcattgtgctatccgccgaaagcgaagatatgcgtcagcacttttcttctgttgctacattgtcatcttatatccagtcacaacagggataacagcagaggaactcatggaaaaacaaaaaatttatcaggaagtttcacaacttttggtcaaactgtttgagctttctcccgaagatatcacgcctgattcacgcctctatgaagatctggaactcgacagcattgatgcagttgatatggttgttcatttacagaaaaagacagggcgtaaaattaaacccgaagcattcaaatctgtccgcaccgttcaagatgtggtggatgcagtcgagcagctattgcaggaagaataatttctctcatccatacactttgaaatataggaacatgctgggtagctaattgaacctgttgattttattgtttcgtattgccaataccgtgatgttaatcgcttggccatttttggtatgggcgatggtcagctatcggcaatttaatatcatattgcccattatcatcctgtttttcgttttgcgcttattactaagccgtaaaaccatagacagaaaaaaagcggataagcagcaaaacgtaaattggaatacgggctggatactgtcaattgccggaattttactgggtttggcaagttttatcctgcgtgaccaccaacttttgatgtactacccagttgtcgtgaatatcgttttatttaccctttttggcggttctctgtactacgggcctcctgttgtggaaaggctggcccggctcaaagagccgaatttgccaactgaggggatcacctatacgcgcaaggtgacttacatctggtgcctattttttattttaaatggcacaatcgctctcggtacttgcctgtataacgatatgacactgtggacactatggaatggaatgatcagttacctgttaatcgggctacttatcgttattgaatggctggtacgccaacgtgtgaaaaagagatgaaaacctttcctgtatcccaatggttatcagcaggtaatgcctctgacaggctcattacctggggcaatcactgtatcagactgagtacactccgacaggaggtcacgatactctgtcaccgtctgaggaaccataccgcatctcgctgggcattatgctttgatgacagttatcatttctgtgttgctttgctggctactctgcatgccggaaaaacaccggttattccgggacactgccgtgaagcacagttacaggaacaacaatccagctttgatggggttctgaccgatctgcccctaaaattatcttgtccatgctggcctattttctcagctcaacaagacaatattgtccctgaaacaacactgcctgatatatccccagatgcagtactggttatgttcacttcaggctccagcggcgtacctaaacaggtcatcaaacctgtaactgtaatggatctcgaaacccaatggctggcctctttatggcaggatagactgcaatcttgtgttatccgtgcatcagtcagccaccagcacttgtatggtttaactttccgaatctggctgccgatgtctgttgctttgccatttgaacgtaaaatggtggaatttcctgaacagttaacccagtgtccacaggcctctttgacacgttacgcactgatcagcagcccggcatttctacaacgattagatgattctcttcctgccccaaactgctctttcgtggtttccgccggagggccattaaattttgctgatgcagaacgggtcacacaatggttcaagaccatcccaaatgaaatttatggcagtaccgaaacaggcattatagcctggcgagctcgccgggaagaccattcagtctggaagacattcgctgacgtctctttccggcaggataaggaaaataacttacgcgtttactcccccctgctttctactacagatggaatggttctggatgatcgactgctatttgatgaaaaggggaacttctcacttcaggggcgtcgtgatcgcttagttaagatcgaagaaaaacgtatttctctgtctgaaattgaacgtcgtatatgtgcaattgatggggttatcgatgccgcagcactgatcatcaatcgaggaaaacgcaactatatcggggctgtccttgttttagatgatgaagcatttcagcactatctccaacaaggtagcgggaaatgctctcagaattggcgccgtcagctcatttcctggctggaacctgttgcgctgcctcgctactggcgagtaactaccgctattccactgaatgcccaaagtaaacgctcatggcctgagttacaggagctatttaatgaaacccattgaaacccatcttgagcaacctgctccaaacgaggccattattcgcctgtatttagatcctgacctgagttggtttcgcgggcacttttccgttcagccacttttgcccggtgtcgcacagatcgattgggttatgcattatgctcaagctctgtttgctccgggctggcattgttcttctgttgagatggtaaaatttcagttacctttacagcccgaggataacctacgcctaaaaattcattgggaagaaactaagcatcagctgacttttcagtatgatgtggaatcccccgatagtggcgagtgcaaaacggccagtcaggggaaaatcaaattatgtcgctaagcgtaaacacgattacgccatgcgtggttattccctgctataaccacggggcaacgatgtccgctgtcttggaacggctatcacactatcagcttcattgctttatcgttgatgatggcagcgacatagcgacacagcattgcctcgaaaatctggctacagtaacccccgatgtttccttgatccgccttgaacaaaatcagggaaaaggtggggcagtaatggctggaatgcgagcagcagcaaatgctggctatagtcatgctttacaggttgatgcagatggtcagcactgccttgaagatattccgctttttttatccaaagctcagcaatacccggatcgtctgatttccggcctgccgcagtatgacgcctctgtgcccaaatcccggctttacgggcgttatataacgcatttctgggtctgggtagaaacgctttctctttccattaaagacagcatgtgcggctttcgggtttatccactggctcccactctcaatttactgacaaaaaagagtatcggccgcaggatggactttgatattgaaatcatggtccgtctgtactggcagggtacagaaagtgaatttgtcccgacaaaagtcacttatcccgaaaatgggctatcccattttcacgctttacacgacaatctcagcatttcgtggatgcacacccgtctgttttttgccatgttgccacgccttcctgctttattatggcgtaaacgttctttacttagccgctggtggggtaatcgtcgtcactggtctgatattaaagagcgtaaaggtttgtatggcatgaagtttatgctggcagtttaccgccgtctcggacgcaagccatttgaatggttactttatccggttgtaggttatttctgggcaaccggtggagtacagcgtcaggcatcacagcaataccttaatcgcctgaaacagaccatgcagcgcaaaaatattgctattccttccggacttaatagttaccgtcattatttgcgctttggtggtgccatgctggataaaatagcaagctggcgcggtgatctgaaatggggcaaagatatcgaatttgccgacggtgcggaggccattcttttaggtggtgactcacgcggaaaactgttattggtttcccatctgggtgatattgaagtttgccgggcactggctcaacatgcaggacagcgaacaattaatgctctggtgtttactgaacatgcccagcgttttaagcaaattattgaagaagtctcgccacaagcgggcattaatttattgccagtgacggatgtaggcgcagataccgctatcctgctgaaagaaaaaattgatgccggggaatgggtagccattgtcggtgatcgcattgccgttaatccatcacgtatcagcacgcatagagtcgtctggagtcagtttcttggtgattcagcaccttttccccaagggccgtttattctggcatccgtattacgctgcccggttttgctgatgtttgctcttaagcaaaatcatcggttcagaatttattgtgaacctttcgccgatccattggaacttccccgtaaacagagagagcaggcattacagcaggcggttgatcactatgcttctcgcctcgagcattatgctctgttatctccgcttgattggtttaactttttcgatttttggcaattacctacaaataaagccaaggagtaaggaatgctgacagcgccccgttttagcagcgaggttgaattaaccgtccccttccatgacaccgacccgatgggcgtagtctggcacggtaattattttcgttattttgaaattgctcgtgaagcactgatggaacagctcaattatggctaccgggaaatgatcgcatcaggctatgtctggccggttgttgatgcaaaaattaaatatcgtcgcccaatagaattcggtcagaaaatacgagtacaagccaccatcaaagagtttgaaaaccgtctgaaactggtttatcaaatttttgattctgagagcggcaacaaaacaacgacgggttacaccattcaggtggctgttgcagaaaaaactcaggaaatgtcctttgtcagcccggatattctgtttgagcgtatgggagtcaagccatgagaaagttctggttggcagtacttctattatctattaatagtctagctatcaataactgtgctcatgccgtcacgcttgaagaactgcaacaacgcttctctacacaacctgtagtacgggctgagttcacccaagagcgccatattcaaggaatgccgcagccactgaattccagcggtgaaatgctggttgctcaacataaaggactttggtggcatcagcaaaaaccttttcctctcactttagtgctggatgacaaccggatggttcaggctatcgcggggcaagcacctcaggttattactgcggattcaaatcctcagatgtttcagttcaatcacctgatgcgtgcactatttcaggcagatcgggctgtactggaagaaaattttaaaattgagttcaaagaactaaaacaggaaacatggcaactggaactcacgccaaaaacctcccctttggacaaactgttcaccatcattacctttagggc

SEQ ID NO: 111 - DNA, 29792 bp, Xenorhabdus sp.
ctatgaatatttggtacagaatatggccaacgcggtggatattaccaatgtattaacaggtatcgtagcggatcagaacggtgtgccccgtaatctgaccgcaaatattgtgatttaggaggacggatgtcagaacggcactattacaaatagccgatagtagtagttaaggctaccatttttcccgaaggagtggcgtatgaatcctttccatgatcgtcacttttagggtgagattagcatggtgctttgaagaaacctatgtcaaaattttggagaagtggttttacctgtctagggccacggttatccgcggctctatgcctttcactccatagcaataccaaaatcgcttaccggtttttaagctcgcttttacccaatactaactaagaacttataaccaggttagataataagagcactgtggttctatggttgcagatatgttaccgttactatccgttgctgtaaatgtgattacatctcccgcattatcactaaccactctagacttatatgacccgttaattttacatagaaaaatatcaacataagctactttatcagagctaattgctgtgattctgtaattatttgtaggtcttacactgttttcaggtgtgttattgataccttgaactgtgaaattaactaattgctgatttgttgtcgaaccactgacgattactgtccctggctttttaaagagagctttctgttttactgtttcaatatttatatttgtagagcctgtctcatttttaatatatcttacattatcaatctctaacttaactatattgtttgttgtatagatattatgggcttgtacatcatcaagatacaagcaatctattaaagatacacatccctttaaatcactattaagtttacttgactctacggcgtgtatattatccaaagtcaactttgttataactccccgatcgcctattttattattaacggatattaagttaacaacctgctctccttttatatttctaaaagtgagattatgtatagatccgtagtcacctacatggttcaatgctccgttttctattttaactagcgctgctctgtcatcataaatagatggcgttatctttctccagtaccccaatagcggatctatcacggatgggcaatcgtactgacctgaattgtttcctatcacatcatcaaacaccaccattaccctaacatgtttgaatcccagccctcccaacctattgttgtcagcttttattctattgaatgttaagtattctactggtgaatctattttatcatgagcgtcaatgtataaaccatacccattatttgcgtaaagatttaaaccgctaggcgacgatatttcaaaaccagccctaaataatatgccatgacttccgcatccaactacagaaatgttactaagatcagatctaactccttcatatccttcaggaacacctgaatcaatacctatttgattctttgcccgatgatttccaagaacgccgataccgctgagcttaaattcttcatcgtatttctttacaagaatcgaaatgtctttatctgaacacactaaacaccctgtagcaattgaagacatatcaaaccatgttttatttagtccttggtcatagttataaaaatacgtccaattggctgatttacttccatcaatgaaatttgttttatcttctcttcgtccataatagggatcggcaaaccctgcttttcctgattgtgatatgatatttaaattaccaaccttacacgacttagttacatagataggagcatctggcaataccattgcgtagccgtaatgcttgcaaaacagatagcataactcccatgcaccactacaatctgtagcattaatacctttctcgactaaatctgcttttgccccaaaattacgaatatcattcactgaatacccgttgagcagaccaacacacacccagttagtctgaatattttccttttcagtaacaacgtgttccacatccagacagtaagcataatacttaccattcagtaaaagcgcgtcaaatttggattttactaccgaaccttccctaaaattacctgctcgtttaaaaatacctaaactgtaatcactgtaaactgaaccactgaacgatgatccgactaatttatctccaccgttatctttcagtttttcactaaactgctcaggatcgtatttcagtacattaggatcatagaattgctgcgccccgtaagagtcatgcaccgccattgaatggtcttgcgcagtaacaaatttggaaatctgtccgttataaacaggatacccggccggattgatgatcagtggttgtgatacagggacatgcgttccatcctcacgctcaagataaacctgaatctggttctctggtctagccggatcggtatctattttgcctatgtaaatattgccattagggtatgcattgaatgagtggcttatagtgagtaatttagatggtgctaaagtgatatttgttaattctggcatgtatattactccaaataaaatagtggtattcctacacattgacttttagtctttgcagaaaatacaatattattaatatgatgggaattatgaattaccatctcccatataagatatataaataaaacattaatcaatcaaattaataataaaatcacccaaaccaaattatttttaaattaattataattgtataattttctatacattgttttcatcatcataaaactttattaatttccatttgttgatattcgccggtgtagaagcggtaattgctaatatagttagctatatgaatgcatcctgcttgcaagacaaaaatcatgctgacagagaaaccttgtttttattaattcaaattttgcaactttttaatccaaactacttgggttaaaacaacgcccctaactcatttctgccccattgtgtgttggtgtcgctaaataacttttcataatagtgagacactcgatttactttctctgaaagagtctatttgcagattttttcaagaattttttcacattactgagcagttgccacatataccgacaacaatggttacgtgtgactgtttcatgtaacgtgtgccataagtattctattttgttcaaccaaggcgagtagacgggcaggaataagaggataatggtggggttttgagccaaccaacgctgaactgcccggcttttatgaatgcaataattatccaaaatcacggtcagcgttttcacaccctgataatatctttttaagacttccagcattttaataaataagagtgaatttttctttgaacttcccgtatagagaacgtgctttgtttgaacgtcaagagtgcccgcaatgtagtatttttgattttgtcccggggtgataatccgcttttgttgtcctttaaaataccagtcagcgccgattttaggattaaagtgaatatcaacctcatcttcataaaccacgggatgtttctctgaggccagagataacgctttggtaatgagcctcattttctcatcatattcagggtcaggcacctgtaatgtcggggctgctcgtcgccatacaatgcgatttttacagaaaaatcggtaaagtgtgctgattgacagtttgatattaaataattttttgatttgaaagataaaaaaagagaggctccaacgagaacgaatatgaccaaattgctgaggtgaatgttccaacaaataaaacagaacgggcaaaagtggcgttaaattccaccgagggtggcgacccgcggataaaggatacaatccggcccatccaagtgccttaaagcgatcaatccaccgccacacagaggaatgcacggtgcaaagtgttttggcgacttgagacacagatgcaccttgatgtagcaagagtatcgccataatccggcgagcatagtttttatctgccgttttttggacaatttttctcatttgacgccgctcattgcgcggaattggtggtacgatggccataactcagtccttcctttttgtgtttttttggttttgcgattaaaaagttcgcaaaaataggactgagtttctttgattcgcctatcattttgaaaagctatttagctgaattacatcggtaacctatttttaacctgaattctggataaggaatttagataacgacataatgtgtattagctgcgacttgacctgacgttatcctattcgtagggcatgattaaatctgacggtcggctatgagcgaaaagcagacttaccacctttgcgatataaaaggctatctgatggcaagaaggtattactaacattgatatcctccccgacctaaaggtcaagcttttacggagcaccgaataaataatgtattaagggcattaccatcagtcaataatcgcaagacattactttaagatttttattttctattccatgtatggtgtaaccatcaacaaagctaaaaatactatctggttttacagtattgtagtcaacaagaatttgagcctgattttgccctaaaaaaattacactagttttttcgcccctaaggttttcacataggttgttgtcgttaaaatcaagttgatgagcaagaagataaactttataatttaaagtgtcgctgtcaaaattactgccgctccatccccatgtaaaataactgaacaccagcgtcaaaataataaatactagtgattgccaaggaaaatcaaagttgtttttttcatctgaacggtatttaaaataagaacctattggaaataggttcaagagcgcagcaaatataaggagatatacaagttgagatgcatatctaaagaatatatacgcagttaataagctcctcgtaaacggaaaaaatgatgcatctataccgaatatatcgttgataattgatgatgccgtcgcagtagaaaaaacaacaagggccgtaaaaaaaagtgatataattagttttgttataccaaacttccaaagttccctgaataaatgagttctttcgatattgacgccaatccagatagcagaaagaataactgaaagaatgtacgcatataacttcatcccctctaaaaaatcagagtttccccttttactgaccgaaaagaagaaaattactattgcagcaattgcaagccagttgagagctcttactacatcccattcatttcttttttcttcatattctttatcattcttgatataaataactgcatcatagatgtcctttattatctgtttcgtcgacttatctgagcgaattcgagaaaacttatcaagtttaaattctgatgccaattgtttcaccacatcttctttactcgaattatcacccatcacttttacctttcttataataagttcaccagaaaaagatcatgttataaaagagtataagctgcctcatgatcccttactgaccctatgctaaatgcaatcataatggtagatttacagtcattccagtggaagtttatgatttttgttaatacaaaaagcctactctcaattggagggaatgcaatagatggaacatagctacaacactcagaaatatttcgcttagctattatcgttgaaggtgaaagtttctcagctagcttgtaactcattacactggcagtctattaattgttgagttgtggggacttaaaattttccaaagttcgctttacacctgagacattcgataagatttttattctttaagcaaaggcgactttcgatctttgagtgccagtaagtatttcgcttcgttgtagcagttcagatttagtctgacaggcattggattaaagtggatggctgtgagatcaaatctgaactactacagattaagtcacgtaatcgcgctactgtgttagaacttgcggaaaatggtggtgctgaggctgtggcgcgttttcttttcggcgagctttatacaggaaattttgaggatttttatcgttcattcttgcaacgtgaggttaactctttgttgtctcaggatgaattatttcaacgtaatgaagtgttttcgcaatgtcagaatgagtctttccagcgcgaagaaattttgattcgaaaacgtttcaaaaagaaatgccccctttttttgaagttagattgtccatgagttgagaaaattatgagagcagatttgtttcaacagttgctaagtggtgtaaaagagatggttgcaattgagaacggcgagctgcaaccaaactcttctcgtgttcatcgtcatgttgtttctgatgctgattttgaattgacgaaaaaccgtttcaaggttgcgaaaaatttgaaaaaaagtgaccgtgaaattcggtgaaaaataggggtcgaatacgggacaagatgtcctttgtagcaccgcctgttcgcagacgatgttacaacggtcttggtcatggctaagccaatacacccttacgagactactttttagatgccctaagaacagaagacgggaaagcatttatttttcaaaaggaccaatatcagcgatataaaaaataaaaattcacttactaacacggggtttattgagggatagcatatgagcaataagtatcaacgggctattgatcacttagccaaaacatctgatccagatcgaatcatcggtgcaatacaggctgtagaggatttgttttcagccagttggcttgagaaacaagatggacatcgactccagattttatgggacagaagggataccatctctacttcagagttgtattccttgggtaaatccattctgaaattaagtgagaataaccgacagtggctcgaaacgagcgccagagaaataaagaaaaatattaacaactctcacggattgctgactgaaatcatactcattggctccttgtctacagaatttggtaagatcgcgccatgcactaagtctcatcctttgtatgattacaccattgatttcaataccggatatcaatataaggtttctgttaaaaattttgatatctctatacatgagaaatgctttaacaagcaatgtgaacatattcgaacaaccttcaaaaattttcttaagcgtaaaaaaatttcgggcagattgaacattatactcgaacatgattttttgacggagtatcaggcaaagataatttgtttctttattgtatttaagattgataagtacggcatttataccttatttgatggtcgcatcagtatcaacttcaaccctttgaatgaatatgagaataagggtttggtttatccatctgatatcgtatttattatggccagacaacattacaatgaacagagaaatatcaaagacaagataaagaaggctcatgatcaactgtcaaaagatcctagtgatgaaaaatcgattaagaaactaattattcggttaggccctacgacgaatatagacctgatgcataagtatatgcaggagctggcggaagactgggagtgttgtggttttgacatgtatatattgcttcagccagctgtcgtgtcagatgttgaaaagaatactacgatgatatcaaccaccgtctatcatggtacaaaatcattctaccttgcccctgaatcgtcaaatatcagacaaaaatttgaaaacttgggattgtttaaatttgaggttggtgtaggtgcaataaactatgagagagtacctttggtgatcatggctaatggttcattaaagaatatcgacttgtcatcgttttatacctatcaaaggggcgatgtttatcttaaggctgagcgggttggggatgattatgttggcaatttgtccaatgtgacatccggcgtgttgcttcactcagtcgtggataacatagtcttatcggccgtctgtttttcgacagacgataaattattgattgtctgaaacggttgatggggaagtcatgaacaaagtcagtacattgagtttgacacgtaccctgaatcacctcacagtgtaaatcctaggatgtggatgactatatctggcacaaattcggttatctgattaggtttcgctcagatcatcaatagtgtcagatcaagtcttatttggtacaactaactctcttttgccccattgtgtgttggtgtcgctggctgaattacattggaaatctatttttacataactagaatgagtaaattgaaaataaagttcttctctcgcattaaggagaatgtgatgtagtttacattgagtagccgaccgtcaaatttaatcgtaccctaccgtaagatagcttcagatcaagtcgcagctatacacataactactaaacaaggtcaaaatacattaatagttctctgccatttttttccaattacgcgaaaagttgatagaaccgcttttaccatgtcttccaccattggggcagcaaaggccaaaaacaaaggtaaatctgtatggaaaagtattagatagcacagaggtataccaaagaaccatgctgctactacatctatagtaatgataaagcggttgtctcctccactcctgagagtaccgacgatatttaccgtagaaagtgatctgataacaatagtaaataatacaatagaataagcagcatcaacaaagtcaatagacctttgtgataattcaggataaaaagataaaataaaaccatttagcagatagagcagggctgcgagtagtaaagcgaataccaaactcaatattatacacaaacgtgatatagttgtagctctttcatattcctttttacctgacgcttcacttattacaatccccgcagcgattgcaataccccaataagcaatatgggctagatttgtaattgaagagatcactgcagacgaagctactaactctttgccttgaaaagcaattattaaagtgtataggtttatactcgccgcccacagtaaggcatttatagcttgcgcacctcctatcctcagcaattctctaaaggatttacacttataattaaacttatcaaaatcaaggtacaatccattatacttttttaatagaaaaaataagattatccctatttctactaactttgaaagaactgaacccaatgcggcgccaataattccgtatccatccatgtcagctataccaaaaaccaaaaaatagctgaagaaaatatttgaaactacaccactcgcagatatcaaaaacgtcaaaaatgtgtcaccaagtgcattgagaagacctatataaacttgaataatagcggatgccaaaattgtatatgaaataatattgagatagtctattgctttataagcgtaatcttcctctccccaaaaaagcaatataatatcttcgttaaatagttttataatagaaaaaataaaaaatgacaaagtaagactaagtacaagtccattagtcacaatcaattttagagtgtttttaaagtgcttattttgagcaacgataacagatactgaatttgaagaagaatagactacacttaaaaaaaccaacataatgctagttgccagtcccattccagctaactcttctgtacctatatatccaaccattattgtgtcgataattgacatcgaagtaaacaatatagattgagccataataggtaaagcaagcttaattattctataagtatcagtggttacacgaaatgtcatttgattcgcctcaaaactgatcgttgacgaagtatttcttcaattccccaatattcatattgtaataataggtatgtttcatctaataaatgcttagagtgtatatattcaaaggcattaaagttagatttacttttactaacaatgttttctggttgaggagtatgtattgaaactgatttggaaacgaaactaaatatcgccccctctttcattagtctaatacccaactctatatcctcacctccccaagatttaaatgactcatcaaatccagatattgcgtcgaagagagatgcgtgtatagctattacccctccccaacaatacacccatggtgcacgcaatttctgcatatccatatcataatatgaaagataataaactctgggatcagggaaagtagaatttaagatatatagctctaatgcaccttcaattccataactttcaatatctctaagaattatttccttgtggttattacagttagtaatcccataaatatttcctagggatacacaacgtttatcatacaaagaagattcaataatactcaatacagcatttttttctaaatatattccacaatcaacaaatagtaaaatttcaccactagcaatccttgctcctctgtttctagctaatgaaactcgaaatccctcatccctttgagagacaataattacttcatgcatgcaattaatactttttatatttatgggttcatttgagccgtcgtcaactattatcacctccaattcaaatttattttttaatgcttgattatctaaagatgatatagttgataacaattgagttgtgttgttataacaaggaatgataacgctaataatcataataaattaacctaaaatatctcattttcaattatttttacaatgtcatgattaccacatatcaatgtttgagcagtgtttatatcattaaataagtaatgtacctgaaagccagcctcctttaatataatatatcctgctgcgacatcccattgatacaaatttagctcaaagaaagcaagcaagcgatttgcagcaacatatgacatacagagagctgcactaccatttctatagggcaaatagccagactcgagtaatgttgttaacacttttgaaatttttctcttgtcatcacgataagacgtaccaaaagctaagtagggtacaggatcatgctctaagaactgatgagattttgccaataatcttgtggagtttaaaaaagcaccttgtccatggtaagcactaaaacattctttacgaattggatcataaatcaaaccaaataatatgctgcctttcttaaaggcagcaatagatatacaccatccaaacacacctgtggaaaaactatgagttccatcaattggatcaataatccaggtatattcgctcgtatctgcaataccataaacggaagattcttcagaaaaaatagtatcactaggaaatatatttgaaatggatttttttaaatattcatctacaatcagatcagcgctagtgagcacatctctttcttttttatatttacatgtaaatgtgagattgttgaacatttctagtaaaatacttcctgcatttgcaataacttgcttggcatgtaaaaacctttcatccattagcatacttctttatttcctataaattagatagttatttataattaaaaaatccagtttgctttccttatagaaattaatagcatcttcgggagtttctacaatgggagtatccttgccattggaagaaggattcagcaggattgggatacctgtaagtttgtaaaactattaataagattatagtaatctctgtttaattctctagtcactgtttggacacgggcacttccatcaacatgtactacagcactaatttgctctgatttttcaggtatcacttgtgaaaccttgatcatataatcgctatcttcattgccaggcctaaagaagtctaaatatctatcctttaaaatggaaggcgcgaatggacgaaattcttcacgattcttaatttcaatattgatataatcgagcatctcttttcttctcggatcagctaatatgctcctgttccctaatgctctaggtccaaattcagatccatttctaaaacatccaactacctttcccttactaatatgttttgcgacaacttcgtccaaattatccggcttagttattgcataattatcattcaagtattttcgtaaactagatttagattcatcgtattttatcccaaaatatggattcccattaaataggattttttctttatttaatactttcatccacccataataacatgcgccaatggcgaggccattatcgccagcggctggttgaatataaacatttttgaatggtgtattctttattattttaccattagctactgcatttagtgctaatccacctgcataacataagttatctgaagcatacattttatggtatgaattaagtatataaaataaagctttctcagtttgttcttgtacccatttagccaaatcagcacaatactgaaaatcatccttaatatttgtattttttattcctaaatcctcaattagatcataatttatttttaccctagcatcctcaatcaaaaataattcttcagggaatctgccacttttaccatatggtgccaaacccattaattttccttcgttgaaatctttaccgaatacaaatttactagcccctccatatagcccaccaatggaatgttcgatatcataaggagcaattttgtatttatctagatcattaagattaaattttgagtaatctttaaatactgttaccacattattattaaaaaacttatagtagctctccttttcaaaatagtcgatataatccgatttagataattttcctatttcactaggaactaggcttatgtcgtgatctaaacaactgtcaatactccctcccataccatcgcatacaatcacggcagactctgaaaatggagaggtgccaactgcgctatatgcgtgcgcaatatggtgactaatcctaacaacggggagatactcaggtataattctacctcggcgtttgataatgtcatcgggcttatgtttttcatttactgtgtatttctcaacaaataaatctacatccttaaaagtgattccggctgcatttaagcaataccttatggcatcgttatcattaaatccatcatgcttaatcttagtaagcctctctttttcaattccaacgataatcttaccattcttcattaagcatgctgatccatcatgagatagtccagaacctaaaacataaattggcttattcatagttcccctcaaacttaaaacatgtattttggtacttcaaaggcaatcaacttttgacactcagaaattgcgtcttctatttttaactgcacaggaggggtcttttgagtccatgctgaaggaccttttaaggcgccttttaatcccatatctctagcaatttttaaataacgtatagcatcaatcacaacaccagctgaattttcagaatcttgtaccgataatttagtatcaatttcgactttacttcctccaaatccggtaagttccaggcgtatgtgtgcaaccttgttatctttcaaataaggaatataagttgatggtccagcaaaaatagaatcctcgtgaacttccacaccggcaatttcattttgacttctaataacgttctcttttgatatttttttggatgttaatctttcttgaaccatcatattattgaaatcagtatttcctccaatattaatttgctggtgatagtcaacagttaaattccttgagagagctaattcctgatatacttgtgacaatattgatgcacctaaatgactcttcatatcatcacctatgatagggatccccttatcatagaattttctgtcccattcaggatcagatgcgatgaaaactggaatgcaattaagcaacgaaacaccagattccaagcaacattcagcaaggtactcggtagccttttgagagccaacaggtaaatagtttatcagtatatctatttcgttttttttaaggctggaaatcaagtcaattggtttttgagtgctagaaacacgaaatcctcgatcttcaggttgattactcatatacggagacacgccatcaaaaacttcaattttttcaacgatcggaccttctggtaaatcagtacagaatattcttgcacaattaggctttgtaaaaattgcttttgatattggtaaaccaacttttctacaatcaacatcatatgctgctttcacattgatatctttgattgaaatacccaagtcattaattattggatcactatctaaatgataattaatcccttgataaagagacgaacaacaattcccaataccagcaatagcaatattaaccatattaaacatccttttcttcagcgttttttaaaattatcaaatcatttaatttaaatatattctcttcttttataagcaaatccgtcatttcatcattgtatttttcagaaatatattttttattttctaagtttgtcttataatttatttcatcgttttctggatgagataagtgcactccctctatcccttcaaataaatgaaatttataattagctttgtgaagtcggaaaccaagatcaatatcttcaccaccccatgatgtaaaatgttcatcaaaacaccccaccttttcaaaaagttctttttctacactgaatattgttccccataaaaaaacccagggtgcaggcatagagcataatttatagttgaatttctcgtatgaattttggcgaatatctttgccaataccttgttctttcattttcctaattgtgctatctacatcatctagatcaacttttaaatcccacttattttcagagtaaagaccgtatacatatccaatcgaaactgattgtggattatagctatggaatttgatcacactttgaacgaaatagcttggcaaaagcacatcagcatcaacaaaagccagtagttccccttgtgcatttttagctccaatatttctcgctcgggctacgcgaaaaccttcgtcaggcacatatatatatttaattttatagttataatctagcttagtaacagcgagacaagtctcatcgctagaaccatcatctacaactattacttcgaaatcactgaagtccgcactttgcttgtttagtaaagctaacaaagacatcaggctttcttttttgttataagaagggataattatactcagagtcataagttacttactccttgattttactctttatttcaaaaaaagaggctttaaaattatgcttatctgatagagtgtaattttcttgtaatgataagcaattatttaacctattcagaaactcttcaattacttcattaatattaaaataagaaccaaatttttcaatatatgaattcattgatattataaacccttcaatatcatttttatatttttctttcaaaaaggtttcaggacgatgttcagaatctcctttaaatctatatttaaaaggaatgtcttctagtactttaataaatgctccttctgcaaccatattcatccaagtgacatgatcttccgaaactgaaaaatcagggaatggacatctaagcgctaagtcaacattaaccgtcgttcctgacgttgggaatatgtagccacagtgtcttatcatatcaagatatttattatttccttctggaatataccgactatgctgaacagcaacatcgagcatatcactcctaaaattttctagagaaaccgaattacctttttcatcaattccactaaaagtggtactaataattaagtctgattgattaatttgttttgcagcacataacgttttttctatacgatatggatgtgcaatatcatcatcatcttgaaataaaatgaaattagcattttgtttatgtgcatactttacaccaagatttcttgctgacgacactcccttttcattctcgttaactataaaatgaaatctattatcaattacattttttggaaaaaaatcttgtattctaatattcaataaatcatagaaacttgaattatcatctactattacaacacaccaatctgggattgactgagcatgtattgagagtaaggtttcaatcaaataatcattatctcgcttactctgtgcatgatgaggaattacaaaccaatttgacattgatgtacaaccttatttatttcttttgcaaaatcaactatccaatccttcggctgaagtaacacttgatggggaaatgccattgttcgattgaaaaaattctcagcacctggaaggctataattcatactattaagtctttcgaaatgactataatatttatttctatcaactcgatgaggttggtaaagcgggttattatttaaaggtctatcgagcttttcaaaaggtattcgatatctctctgagaaatggttcgatattatttgtgcttgttcatttttaatttcacaattgaaatcaataacacaacgccaatatactctctgatcaacattttcatctaccctaagaatattacagattccactctttctaaggtaatagttaagaataatggcatttaaacgtcgattttcattttcattatctaatcttttaagaccatttaataaaatggcacactgcatctcagtaatattatagttccttccttgtacttctccatcaccagaaataaccataagatttcttgggtttacgttattatttctagctctaccatccatcattaaattttgtattttagggaacctctaaaaactctcaatacaaaaaataagatcaattttgaactcaccaataactgaccttattgtgtatgactttttcttgcttgttcaggggaaaaaaacaaacgcatcactttttcatcacatctcgaaattaaaaagcatgaatacccgattttccgaaataaaccaaacgttgcaaatcatagcaggttgccttcatcgtcatcgcaaaattggctcgcagctggcctatcgtccgaataattttttcacccatctgagagagtgagccaaagatatgttctacgcgtgcccgagttttcgctattttcttatttcggcctttttggcagtgtgataagggcttattacgtgccgcttttctctgaatatgcacacgatagccctgctccttcagcacacgttcacgcttctggctggcataccctttatccgcataaatgtcccgacgggtatttgacctgtccaaaacagcttcaaaaaactggctatcatggacagccgcggttcctgtcgcgatgtggcggatcactttatattttgtatcgacattaagggtaagtttatagccaaaataacgcttaccgtgctttttcgtccaggttgcctcggtgtctttctggcatcgtttgtttactgtccagttatccggggttttgccctgacggatttgttcattttcttcctttttattgggctgcttaggcacggggatcaacgtggcatcaatgatttgccctcctttgggaatgaatccctgtgctgacagctgatgcttcgcctcttcaaataacgctctggcaccttcctgcccaatccgtttttcgaaacaccaaatcgtgttacggtctggaatattaatgacatcggtcaagcgacaaaaacgttgccagctcattcggtcaagcaattgatattccattttttcatcggaaagattatggaaatgtttcaggataatgatgcgaaccatcacctccgtcgggaatggcgggcgtccccctttgggggaaataatacgtgggacgatacggtctagggtgtcagccagtgccgagaaatcaacatatttatcaagaacaagcagcggatcacctaattcatcgatttttcgacggtgatattcggatgcctgtttgtctttttttaaagcagaacgaggcggtatcatgatggcgctaccttgcagagaggtactgtgcctacattttactcaattttgtggctgtgaaaagtttttagaggttccctacagttgatgagctaaacggttatccggccttgcaacaacctgaaactgtcgaggatttttaatccgtcgatctgatgaggaggcaaggttcggacttcaccatggcgcagcaaatttaaatgattaccagacgccggatatatgaccgtgaaccgaaattagccatacactgagtcactaaaaaagttgaatattacgggacgtccatatatgacagtcacccactttgcttcagtgcctgccagattaaattcgggtcagattttttttcagcccaaattgattttcctgccaataatgtctctattggtgtgcgaccacaacatattttcccttgatgagtgcgatgataattgtagttaagggaccctgcctgttgaaccataatggcgctcgaaagctacccagtcttgttcatccagaatctccgcgacactaaatgcactgcgttctcccatttgcttgagataatccccaaggggaagagagccatccaatacaggtaatgccgcgctttgacaaattgacgtttagtatgagcagacggttccagttttcgaatgaataaggtcataaaagatcggtacctgaaggaagagcaccgatcttaatggataacatgagcttttacgacacactttgtagcccagacctgaaccccatcgaacacaaatgggccggagtaaaagcgataagaagagaaaaaaggtgttccgttgatgagttatttatggagcatgtagaatgcgtcaaattatattgattctgctatatctttaaacgaagctgagatttgctaataatgggaagctctggcttcccatgcttcaggacataaatcccagaacgaaactcatcgaatcagctaaattcagcctttaatttaggcaaaatctgatcagcaaatattctcagtcctttaatatactcaggaaatattaacatcacgccatccagttcgcaggtacgtagcagttctgacagttgcctgtagcaagtttcaggtgagccgatggcggtatgcgtcatgaacgcattttgcgatctttctaccatcgcattattttttccatccgtatcaacaccaaaactgtgcatcatgtttctgaccgcccccacatccaatccctgctggtaaaattgagcaagggtatcggcataagcatcattttcagcacaaataattgtacacatgcagaatgttttggttgtggtgttgtattctgaggcgatgcgcttagccgttaagctgatcttgcgtgtttctgcttcatctttgccaccgataaaacagacatcagtatggcgcacactgaaacgcagaccacattcggattgcccggcacaaactaaataagggcgaggacgtgaaaggggtttaggttctgaaacacactgtttcaggttgaaatatgttccctgatgatcaacctgtttttctcgccataaccgttttatcagaagcgtccactcttcagtcatggcgtaacgctgatcgtgatccagcttgctgtcccattctcccatttgttcaaactcatcgcggaatgaaccggagacaatattcagccccgcacgcccctgactgatatgatccaatgtggcgatcattttggcggtgaccgcaggattgtgcagaccagcatgaattgtggcaatcagtttggcacggtgtgtcacctccgcaatgccagccatcatggtgacagattcaagtgaacttccccagtgatccgtttcaccgccaaaacctcgccattttcccatggacataataaaatcaaggccgatttgatcggcaaaaatagcagcctcacggttttgtttataagacgcatccagtggtggtgtgtttttggagataatccacccgcctttagcaatcggcaggaatacaccgaattctttttttgacatcactatttccttatttgtgcaccgataaccctattcagtttcgactgaatggtctctcattttttggctgggcggtttcatcatcagtgtgacgaccaacacaataaacacaggaaaagctaggatgaggaaagcccatgtaaaactaccggaataatctttaatggcgccggcaaagaaaggtgccaaacaagccagagtagaaatcagattcataatcgagaatagctccagatagggattacgaccaaaataattggcgagcaatacactggaagcgaggaaagtcataccatatcccataccgacgaacagcgtaaacgcaatcagaaatggccatgaagaggcaatacttagggcaattaagccaagaataatgaccgtcagactgccaagcagtaattttttcggttcaagccattccccggcagcccctccggccaaccttgaaaatgcattgatgaaagccatggaactcagcaatccagcggcaatggcttcactgaaaccattttcaataatatgggcgactgcaaagctgttaaccgtaataccacaccacaaaaaagccgtataggtggcagcaataacataaaactgccatgtccgtagtgcctgccgggctgtccaaaactgttgggtacgatagatattggatgaattttcgctgttgttcttttggttaacagtcttagcgtgggcaatttccctgtccccttcctgaagagtgagaatagtcaggataacaaaaatagtgagcacaatggcagagatcatccagtgcattcgccacgttccccagacccgggttgccagaaaatagatccacgggccaatcacgccacccagtcctccaatcgtaaaatagaagccaaaagccagagactgtttttcatataatcgtgaaataacataggtgccgggcacggttgccagaaaggtaaacccgataccgattaaagctgttccaatgaaatatgacgcaatggtatgtgtgtgatagaaattgtagaagccagccagaaaaataagcagaccgataaatagtgtgaaccgaacaccgatcctgcgaataaacacggttggcaggaaactggataatccgcaggtcaggccaagcaatgtgaagcctaaaccggcatcagtccaactccagcccagttcattaatcatactgggcaggacaacacccaatgacgtaaaggttgttgctgtggatagaaaataaaccatgcctaaaagtatcagtaaaaaccactgataagtacgtccgaatttgtcgtgttgagtggacattatgaccccatcaaggatatgaaccattaaaaacggtattattttaagtatttatcagaaaaagctgtatcgaataaacacgccatagctcaattggtttgtgcgaaagtaaggcgtatcctttattttgtatttatttttgatcggattaacgacaaaacctgtccacagatgaccggactgatagcctaattgttttcctaagtcatagtgtaattctggcttgaaatcgaacatctctggattatcgcgttttcccaacgtgtaatcgaatgtgcctacgatgcgaaaatcacctaactgattactgaaaggaattccatagtcgatatggatgcgttgatcatcccagttgcctttggcattattttcaagataaaaaatggtacgcaaccagctgaatcccgcaacttgccagtcaagactgataccgggaaaatagtcatactttgtgtttttggttttggcaacccactgggcaaacaaaacatctttcaatgggccataggaaaagtcatagcctgtcattttgctggcactgagtctggggacaaatttatagtaataagtgcttttatctcctttatagctattttgcagtgaattttgccagatactgtagatatacatatcgcctattttgtaatcgccaaaggcttcaaggatgggagagagggtttgctcaggcgcgactttgttttcgagctgaaagtaaaggctggtatcaattgattgaaaattaacaaatttatttgcgtgggcatgatttgtgaaaaaaaataatggtgtcaataataagcatattgaagttgaattttttttaaaatcatcaagtaataacttacaaaaattaactatatttaaatataaacggtatatgttttttattttatgtttatcaaaaacaaataacataatggcacctgttttttattattagatgaatgttaaattcaatgtttacttagctatagatttatgtcaagcactttaaatcaaaataaaaactgtgattattttaatttaaattaatcaatatgcattttttttattgtgattttaatcactttttttcaagggagcgttgtttaatatataatgattatcatggcaatatatttattattaaatttagaggtggattcgtgtcaaatgtagcatttggtaactctatttgtttttcatctcctcactataaatcaactctattgggtataaatgaatatttgacaggaaatgaaaaaaacttttatttatatagtggtgctataaaaattttaatgtctctattttttaatttgccacatctttgtggtattggaggggatgctattataatcaataaacataaaggaaaaatatcggttatcaatgggacaggaaaaactggtaaatatcaaaatagagcatcttatgaagataaggggtttaattcagttccaagaagaggtgtttatagtaccatggtttatggagctccctatgcttttgatcgtctggtcaaggaaggggatattgatttggtgagtattataggatcattaattaaagatgattttcataaaggatttattaaattacctaattttaaagtattgtttgataaagctaaattagagttttcacaagcaacaaaaatgactgaatgggaaggtttattctgtggcgaacaacagatatctcagtcatttattaatacaatgaaaagaatttctcaggcaggatttattgattgttacacaggagagttaggtgattcagtctataatcaattatctaactatgatgtaaatttatatgatgaatctgattttttaaattatcgacctaatgttagtgaaataaagaaaataaaattcatggatagtgaagttttttgtcatggctcaaatagcccttggaaagaattatttttattccttaaaatttatgaaatatttgctgagaagaataaaaaaatagattatgagaaaatttgtaagcttacaccttatatagaagacacagcagatattataaaatataattctgagaattatgcagatgaaataaaaaagttcgctgaattattatttgatatggctgaaaaagattttttagatgagaaggatattagacataaacagagtcataccatttttctcgccggagtaaataaatatggtgatttaatcggtataactaattctattttcacaccattaggagcactttttgaaatagaaaatacaggtatcttgttatctaatagatgttatgcttttaacgaaactagtagtaaagaaacttttaaaagcaattctcctgttaaacatacgaataattgtattattgtcgaatcagatgatatgaattttgtgataggaacagccggtgggcctgtacaatcccaaacattatcatttgtaataaataaaataatttctgaaaaatttgaaccatataatgcagtaattgaacctaggtttgctaatataggataccatgcaaaaacaaaaaaaataacttatttaacagaaagtaaggatgctggcggtttatttataagtacagaaggacatagtaataaattaggtgttgttcaattggctggtattaataaaaaaaatggtttgcttttctctgtgtctgatccaagggggcaaggcgtagcgttgggttattaatatgaataaagttattaataataaaatggatatattcattgtatcttctgcattttttttagaggtgcttgacgcaactattttcactccggttttaatagatatatctaatgaatttaaaactcctatagaaataacaactatttcgctagcatcatttgttttctctttagctatatttactcctttgagtataaatttattttctaaaacaggagcaaagaaaaaatttatcataggaatgatgattttctttgttgcttcttttctatgtagcataagtaataatatttattttttatctataagtaggatgttgcaagggtttgggagtgctttggttgtaccgataggcagaacattggtactaaataaaacaaaaaaagagaacattcccgttgtaatgacttatttagtatggccagctctttttgctcctgttatcgcacctgtaattggtggatatttaacccaatactataattggagatatatattttattttgttttattgtgctctttttttgttcttgtattatctttaaaatggttatcaaataatgaagttattttaagtagtaatgacaagattgattttttatcatatttgagttggttttgcttggttttttctgttttttactttttctctcttgcaactactggctatatgactctctctttattttctattgttattttatttttgtctttctatctcacattaatcaaaaaaaataaattatttgattcaagtttactgtcaaataatttttttagaattaatattatttatggaagcttttttagagttgctatttactgctttccagtttttttagttttatcattaatgacgacttttgattacactccattaatgagtagtgtttgtattatctttatctttataggtaatattttagcaaaaccagtggctgctaatattctgacaaaaattaaaaatataaaattgtatttttttacatcatcatctttttgttttttttctattttatgttttataaacaagggggtatacagtgactctacatgtgtttacttcttgtgttttatacatggtgtagctagatcatttcaatttttaggctattcatcaatagctttttatggattaaaaaaagaaattttatataaagctaatatattaaataattcagtgatgcagttaaatgctatgcttggtcagtctatacctgcaatgttatttgctttgatagattttaataaaaatggctttatgtatttacatgtttatatattattaatttgttctttacttcttgttcctctcattcattctttttttattaaaagtaaggctacgtgattgataaatacagatgagttttttatgcgaatggcattacatgagtctataaaagccttaccaaggtgtttaccaaatccacctgttggagcaataataacatataataatgtcattgttggaaaaggatttacccaagaatatggaggtaagcatgcagagattatcgcaattgagaatgtagaaaactcaattttattgcatgaatgtaacatctatattacgttggagccatgttgctattatggaaagacaccaccatgtgtagataatataattaataatagattcaaaaaagtttttattggcatgattgactgccactctaagaataatgggaaaagtattgatatgttacgtttaaagagtatttatacatgtgttggattattaaaagaagaaatagaggtttttcttgttaaatatttatggagtaattaatgaaaaacattaaagtaaggaaaaatgttattatacccattgataatacatccaaagaaactagatttattactttttctggattagaagatgaacattttgcaattagtataggtgagttaaaaactgaatcacctgtcttaataagaatccattctgaatgtttaaccggagatgttttcggttcacatcgatgtgattgtggatctcagttacaagaagccataaagaaaattgatgataaaggtaacgggcttattatatatttaagacaagaagggagggggatcggtttatatccaaagattgatgcttatgatttacaaagtaaaggtattgataccttcactgcaaatgaaatgttggggtatgaagatgacctgaggaaatttgatgatgcagtactgatgctaaaagcgttgaatgttaatacagttgatttaattacaaataatccagaaaaaattgattgtttattatctaataatataaaagtaaatagaattattccaacaggagtatatgtcaccaaagaaaataaaaaatacttggaaagcaaagtcaaaaagaaatttcatacaataaatattaagtgaggaagtttatggggagttttgtattaaatgttgctccaacaggaatgatacccacaaaaaaaattaataaaaacgtccctatttctgtaaatgaaatagttgatgatgtattacaggcagcagagtatggagcatcaatggcacatattcatgccagagatcaagtaacagaaaaaccaatagtatctgatgaagcttacggaagaataatttctgagattagaaaatacaataaagatattattatttgtgtttcgttaagtggtaggaatgtctctgatgttaaccaaagagcattaccgttagaattagagggagatcttaaacctgatatgggaagtttaacattgtcttctttaaatttcattaatcaggcaagtgttaattctcctgagactattcaatttctagctaccgagatgaaaaaaaaactaatttcaccagaaattgaagtttttgacactggtatggcaaactatattagttttttaacaaaaaaaggattactaccaaataatatttatgccaatgtgcttcttggtaatattgcaggtgctcaaagtagtttttctaatatatctgctatattatcaaatattcccaataatgttatatgctcatttgctggattgggtagttatcaatctcaagctacatcattagcattagcttcaggatatggtgttcgaattggtctggaagataatatttggtatgataagaaaaaaacaattttggcgtcaaataaagaacttataaaaagaattattagattagctgatgaatttgaaataacaccagctaagcctgttgatgttagaaaaaaattaggtttagcacttggtcatggtcattatgggttacttcaataatatatttaagggtgaataatggaaaatgtatggtttaaaccagaaggatatcagcgtacgtccaaaagattacagttaaagtgtttggaattactgttaggattttctgaaattaaaggtgatattttagatattggctgcggtacgggtaactcattaaatttaataaaaaaaagtgacataagtaattatctgggaatcgatatttcgtctgatatggtagacttcgctcgtaaaagtcacgatgatgaaaaaattaactttgtagttgatgatttcctgaattatgaaaatcatgaaatgaagttatatgatgtaattgtttgcgcagcctgtttacactggtttataccaagagagcaggaagtattagataagatttttaactatttgaaaccaaatggttatttattcttatcatgcgcatttgactttgattttttctgtggtgaaaaagatattcaaggaaaggtattagaagttgtaagaaataaatattctcctgtttcgccttctgtagtcttcgatgattatcgatttgacaatgagaaatttaagaatttcactaaatactttaatatactaaaaagttatcgtattgaagagtcaattgatttttctaattatgatgatttcaaggattggcatttgggaagtggttctgttatatatcagcaattttccaaattagatcaagaaagtgcagtcaacgatttttatcagatactctatgataaatatctttctaatgaacataaagtttcttattcaaccggactattcttgcttcagaagagagggtaataataatgtatactggtatcgtacaagggaaagaacaggttttatttttgaaaaaaaatcatggagttagttcactggtgattagtaatcgtaataatttttttaacggtgttgctattggcgccagtgttgcgattgatggtacatgcttaactgtcactcaatttgagggtgacagagtgtattttgatatttctgactttacctctgataccacaacattaaaatttctttctattggcgatcaggtcaatatcgaacgttcgcaccagatgaataaagaaaacggtgggcatagtctttacgggcatatagaaggcatggtcgaagtagtcgaatttacagcaactggagaaacttatcggctggttatccggattcctcagggcaatatcaaatattttttcctgaaaggttttatcggactgcatggatgtagtttaactatcaacgaacttgatgaagaaaataataccattactttaaatttgatccctgagacactgcgaataactaatcttaataagattaaagtgggaaattttcttaattatgaaatcgatcaaacgacaagaacaatagtagatactctgtccagaacattagcacgaaaataattctgggtaagcagatagcaggttacggtaagaacgcgggaggtagtaatttattgataagagcttgtacatagatttgtgtaattgctttattttgatatggttaattaacccgaattctgaataagaaattgacaaaaggcctgttccagaagcaaaattttggtgaaaaaccagaaaccactccgaggaggaacaggccatgaacaagttagtggaaattttctgcgatgtcgacgatttttgtcgtcttttcatccctcagtgggagcagttttgtctcgataacggataacagaaaatgatctcccaacaattaaaaatttctatcaggatattatcaatacacttgcacataaggatctagataaattatggaaaatgagtaaacctgcatgggatgaatgggcgatggctgaagatagtaatcctagaatattttttaattcaatgagttttgctgaactgagtgatagtcaaaaatatacaatcagaacaattcctcaatggcaagactttgaattagttaaatacaaaggcggccgattatttcgtttagaaactgaagtttttggtcgttctccgataataatggatagaataaatacagatagggtagcaacttacagcccatatttatctattattgatgggaatattgatatttctagataattaattcatttttgttaacttgttattaattaacttggttaatcaaattcaaattaataaaatctaaatagtttgtcataatgatgagactctgatatttctcatttctttccaagtcgttaacgaggcttttttcaaaaaaattttcacattacgaataagctgccacataaattggcaacaatgattacgtgtcaccgtttcatggagtgattgccataaccgttctattttgtttaaccaaggcgagtagaccggcagaaatagaagcgtcacggtggggttattcaacaaccattctctgaccttcttacttttatggataccgtagcagggcgagatctcacatttttcataaggttatttaggtcaaataaaagtcaatatacggacttttataagcatttctctccttaaaacgttaagatcacgctattccataaacagtgtgcttaataatgaatatttttaattttatcagaaaaatagatgacccacgttctgacatcaataaaaaacatgaattgatggatgtcatttttttggccttttctgctgtgttatgtggcgcttctggctggaaatcgattcaagaatttggtgagttacaaatagagtggcttaaacaatatacctcatttactcacggcattcctcgtcgtcactgtgtggctaatattatcaaaatgatagatcaagacgcattggtcgaagccttttatggctggatcaaccagcgccgggttacggggggcaaaagtctcatcgcgattgatggaaaaacgctgacaggaacctgcaaagggacattggttga

SEQ ID NO: 112 - DNA, 32396 bp, Xenorhabdus sp.
tctaaggggcaaaaagatattggttatgatgaggttgttgcccgttcagaaatggaacattctagccgtaatgcggccattgcttatctgatgaagtcattcggtaattttgaaaatgatgtgcttacagtactgcaaacttattttcagtattgtgctctgaaaatgaattgtgttgaattatcccaatgctttatttacttggctaataaagggcggatgatcgattccggtcagcaaattttaagcctccggcaaacccgccagatcaatgcgctaatgttgacgtgtggcatgtatgatggttcaggcgaatttgctttcaggatcggaatgcccgggaaatcaggagttggcgggggaattgtctgtgttgtgccgggagagtttactgtaacagtatggtctccggaactggatcgtgcgggtaactcactagctggttgtgcagcattggaaaaattagccgcccgcatcggacgttccattttttaacttgaaacattagcagctaattgcagtagctctgaatagaagatagaggagtgcaacgctgaggagaaacaggagaaggtatgttacgaaaaattgtggttgcggcatcactggtatttgctgttcaggcacaggctggttcagagtgccggacgacactcaaagatgacattattgtcacggccgactcagttcagatgattggtgaacacaggagcctgaaaattatgccagatggttctgtctttcgtaatggtaaagcactatcgctgaatgccgatcaacgcagcaaagcaaaacagtttcagcaacttacccggcaggatttgccatgggtgaaaaaagaggctttaaaccatctcactgacgcccgtcaggcgttggataaagttgtcactgaaacgatgggaaaggatagcaatattcgcgttcgtttgactaagttggaatctggcctgaataagcaaattgataaagtattggaaacccgtcctgatggtatttttttccattaccaggccatcaaacagatagaaacggaagggaaggatctcattcagcagagtttgggtggaatattgcaggacagtattaacgaaatgagccgtaaaacaagcaatcaaaatggtgacggcaaacagatgttaatgtctcttctcggcgggctgggaggtatgcagaatggctttgaggcagaatggaaaaagcaggaaaaagagctaaaacgctttaaaggagaagtgtgcgataaagccaataaactggaacaattgcgcacccgctttttgaattccattaactaaatcacagtatttcatatcaaataagaatcatgatgaaatcgattcttatttgattgacatcctacattgggcatctagaatgcaaatcactttttatacacatgattacttcaggtgccctaatgaaaaaaatcctgccgattattttagcctcattattttctgttactagtcattccgcattcagccagcaatctacaacatttacgccaaattcagtcatcactcagtctggggattatctcacggtaaaacatcattccggagaaactaaggttaagaaaaatcctgagagagtggttttatttgacttcggtacttacgattcaatggccaaattagggctatctgagcgtgttattgcactgccgaaagaaagtttgcctgaatatgtgagtagtaacgtatctgaaaagatgaatgatgccggcgggatgaaatctccggatttagaaaaactggctgaaataaaaccagacttaattgtgatcaccgggcgtcagggtgatttttatgatcgtttatcccaaattgcacctacagtggatttaagtacggataataaaaattacctgccatctgttgaaaataatctgaagctattaggtgaactgttcgataaacaagatgcagtaaaagcacagcaggctgatttagaaaaaacgataacgactgcgcaggaaaaagcaaaatcttcaaataacaaggtgctggttttattacataatgctggcgagttatacccgaataatcaaaccgttgtttacaatgtggtgaaagcgcagcgcgctgaattaccaccgaaatcagataacgataagagccgtcttgtcactgcggaaatgattgctcaggcaaatcctgatgtcatctttattattgatcgcagtaaagcgattggagcaggggagttaacaaaagctcagtttgaaaccgttcaggtgaagtcaaccaacgcttataaaaatggcaagatagtctatttgcaaccggatttatggtacctgtctggtggcgggatagagagcctgacgcgtcaggtgaatgcaatcgctgatgctttataatcactctgattaaatgtgttcataaaataaggccgcccttgaaattcaaggagcagccttatttttgcagaagctatttttacaaaaatagcgctataaaaactgttctacaaaaacatttctaataacgaattcaggaataattttccgtgtttcgtgatctgccagtgtgtatcactttcagtgatataaccttttgccagcgcagcatcgatttgctgtcgaatagtgctttccggtaacccagtaaaattactgaaatcctttcgtggcattgcttccagcaaacgaaaacggttcatgaaaaattcaaatgggcgatcatcgtgatccacttgatgttgcttatctaaataacgcccttgcatataaccgcgcggatgtttggttttcactgtgcgcagaatacgcccgtcttcaaacgatatttttccgtgtgctccgcaaccaattcccagataatcaccaaaccgccagtagttcagattatgctgacattgataatcctgtttggcataggctgaggtttcatactgttgatagccagcttccgtcaataacctatgcccttgagagaaaatatcccacagcgcatcatcatctggtaggactggcgggcgtgagccaaaactggtattgggttcaatcgtcagctgataccacgacaaatgaggtggtgagagttcaatagcctgacgtaaatcgttcagagcttcatccagtgtctggttaggcaggccatgcatcaaatcaaggttgaaactgcgcagactaagactatccgccagccgtgcagcgcgtttcgcttcttccgggccatgaatgcgccctaagcggataagcttatctgagccaaaactttgtacaccgattgaaatccggttaataccagcctgttgataggcactgaaacggtcagcttcaaccgttcccggattcgcttccatggtaatttctgcctgcggggagaggggcagtagctccctgacaccatcaagcaaccgttgcattccttctgcactgagcaaactgggcgtacctccaccgataaagatagtggagacttcccgcccctcaaccattggcaaatcatgacgtaaatctgtcagcagatgttcgacatattcctgatgtggtacatccccctttaatgcatgtgaattgaaatcacaataagggcacttttgcacacaccagggaatatgaatataaagacttaatggtggtaatttaagcattacgcatggcttccaacagcatttttaaggcttgtccacgatgtgaaacagcacttttttgttcacggcttaattctgctgctgtacagccaaattccggtgcgtagaaaaccggatcataaccaaaaccgccattaccggctggctcacgggtaatgaaaccagaccagcggccgtggaagactagaggagtcggatcttctgcatggcgtaaataaaccagaacacaattgaattgtgcctgacgttggtcatcaggaacatcgctcatggcttccagtagtttttccagattatcctgatcggaggcatcggctcccgcgtaacgagccgaataaataccgggagcaccaccgagagcattgactgatagccctgaatcgtcagcaatcgcaggtaaaccggtgactgccgcagcatgacgggctttaatgatggcattttcaataaaggtcaaaccggtttcatctgcggaatttacacccaattcagtctgagcaacgatatctaaaccaaagtcagccagtaaatcagccagctcccgtactttgccagcatttcctgtggcaagaacaactttctgcattgtttctatccaattaacttattatttattaaccaattaagctcggaattaaccacgctaaaacatcggcacggagagcatttagcgcatacaggatcagaatcacaatcatggctgagaaatccaatcctcccatagaagggataatgcgacggataggtgccattagtggttctgttaattggagcagaacgtaatctacagggttacgtccctgactgatccagctcaataatgcgcgggcgatcacaagccagaataccagtttacctgcggcagtcagcagttcaattattccaagagggaatagctggacaagaaattgtcctgttgctaaccagtaaggcagcatcagtttgagcatgacgagaatgtaagcaaaaacaaccgatgctgtatcaatagggccaatagcgggaagaaccctacgtaatgggcgtaccacgggttgggtgattttaacgataaattgtgagaacggattgtaaaaatcacaacgtacccattgcatccagactcgaagcagtaaaactgcggtatataaatccagaactgtaaaaaagagaaagtttaagaattgcatgtagcagccctgatcaaattatattggttgtttaaaataatttttccatttcctgtgcccggcgtattgctccctgcatagcttgggatacaacttccggcagatggttttcataaaaaacgcgtaatgcttcggcagttgtaccacctttagatgttacctgttcacgcaggatagcaaaaggaagttctgcctgtgattcagcaagtttagctgagcccatagccgtttgcagaaccagttctctggccgtttggctgtcgaagcccagacgctctgcttcctgttgcatcgattccataaacaggaagaaataagcaggagcactcccggcaacggcaataatatcattgatgccattttcatcatttacccagcagactttgccgacgctgttcattaatacttcagcaaactggcgatcagattgattgacctgttcaggtgcgaacatgccgctgatcccttgcccgataagtgagggcgtatttggcataatgcggataatattcagattttcctgcaaaaatgagtaaaaacgggaaagaggaataccggcagcaatagaaagaacaagtttttgctcaaaattgacttgcgaacgcaaggaactacaaacttcttccatcatttggggcttaacagccaaaacaataacatcagcttcctgagcatagcgaatattgtcactctggctgttgatgccatatttttctgccagaacatcacggcgaattgtgttgggcgagcaggcagtgatttgtttggcaggatagcctttgttgatcagacccgcgatgatggcatgagccatattccccgcgccgataaaggtgatttttctattttccatgaagaaatcgtctcgaatattaatgagttaatgttgagctgttaattaacttgctgtagaaccatactcgcgggcaccaaaaatggcggttcctatgcgaactaaggttgagccacaggcgatagcggcttccatatcatcagtcatccccatagaaagtgtatctatccgtgggtattgtgcctttagtttaataaaagcctgttccatccgacgaaaaatagcggtttgccgttcataatcttcttctggcgcagggatggccatcagaccacgtaataccagattagggagtaaatcaactgttgcagccagttcctcaagttcttccagaagaatacctgatttactgttttccccactgatattaatctgaataaggacattgagaggggccatgctttcagggcgttgttcacttaaacgctgggcgattttcaatcggtcaatagtatggcaccagtcgaagtgttcagccactaaacgacttttattagactgtaaagggccgataaagtgccacaccaaatcgttgtggttaacgaacagttgaattttttcaactccttcctgaacgtaattctcgccaaattccctctggcctgtggctatcgcttttgcgatggcttccgcaggtttggttttactgactgcaagtaacgtaatttcttctggagagcgcccgcatttctgagctgcaagggcgatgttgttcctgacatcgtgaagattttgttcgatattgtgcataagaaactcaggagattaaaaaatgaatatggaaaagttagtggcccttagtgtaaagcataatgcctccgatctgcatctttgtgtcgggaaagtaccaattttgcgcatcaatgatgtgttatatccacagacacatctggcagagattgataatgacttcatcaatacatggagcaacggaatattatctgaagagcaacagcggcaattaaggagcgcagggcatgttgattttgtcgtggaaatgccaaataaaaggcggctcagagggaatttattctatcagcaggagcacctttcattggtattacggttaattgctgacaagtgcccgaccctggaacagctatatgcaccagatattattcagcgccttgttttaccggaggaaaatggactggcagaaaatgggttgatattagtaacaggtgcaaccggaagcggtaaatcaacaacattatcagcgatgattaacactctgaataatcatgtcagaaaacatatcattacactggaagacccgatagagtttgttcacctaagccggaattgtctgatacagcaaaggcaaatcggggaaaatgtgccggattatcagaccgcgctgaaaggggcactaaggcaggatcctgatgtcatcctgttgggtgaattgcgtgataaagaaacgatccggctggcactgacagccgctgaaacgggccatttggttttatcaacattacacacccgtggagcaattcaggcaatagaccggctggtggatgtatttcccgcagatgagaaaggatggatatgcgctcagctggcaggcagtttaaaggcagttattgcccagcagctgcttcctgctaaggatggagggagagtggctatttatgaaattttagtcgtcaatcaggctgtcagccatttgatcagggaagggaaaaaccatcagatagcaacgttaatgcaaaccggagccgcttgcggaatgcaaacctacgagcagagccgccaacaacgcagattatcgggattgctggcggaatagctggcaaaatagtggaacaaatacctatgattataacttcactgtattgttggcttacgataataaccctttaattataaataactttttattatcaacaatgttgctcaaaccagctttccaaaatgacgacagcagaagtggaatcaactttgcctttatcaagagcacgatatccgccatgagcaaacagatgagagcgcgcttctaccgttgttaatcgttcatcgtgcagttcaacctgaacaccaaagcggccatgtatacgattagcaaattttttggcctgtgcagtgactggctgttctgtgccatccatattgagtggcaggccaacaatgactaaatctggctgccattctttgaggagtttctcaatcatatcccaattaggagaaccctctttggctttgaaagaatctagtgctctggctgtgccggttatttcttgtcctatagcagcaccaatactgcgggtaccgaaatcgaatgcaatcactgtgcggtttttcatcaggcatgtcctgcttgtaatgcgagattgtggatattaattcccaataaggatgcagcttcacgccagcgatcagcaacgggggtattgaaaataattgagggttcagcactgacagtaagccagctattttccataacttctttttctagctgacctttttcccagccggcataccccagtgtcattaaaatatttttcggctgacgtggagtgcctaatgcttcgagcatatctttggaggtcgttaccatcgtctcatcagagatttgtatactggaactaaatccggacagtggcgtatgtagaataaaaccatgttcttcagataacggcccacctgccataaccgggctgttcagattaatgttatcgtctctgtcttcgggggaaatttctaatttcttcaggatcccctgaatagaaacctgagctattggcttattgataattaaccccatcgcaccgttttgatcatgttcgcagatataaactacagaacggttgaaataaggatcagtgagcgaaggcatagcaataaggaaatggtgctgtaagttcatgttttttgatgatgatttttacgataaatgaataaagtggcccacacagcatgtgagcctatataataaatggcaaacgctaccaggaaatggaagttgtttagcctattataccgtttgtttacccaatcgtttttcaattgcattcatcagcatacccgtaacagagacctcagggaaggccgcttctatttcacgtgcacacgttgggctagtaacgttgatttctgtcagacggtcaccaatgatatcaagcccgacaaaaattaatcctttttctttcagtacaggtgcgacagcgcgcgctattgcccagtcactttctgacagaggccgggcttcaccgcgtccgcctgctgcgaggtttcctcgtgtctcaccttgtgccggaatacgggcgagacaataagggacaggttcaccgtccacaaccagtactcgcttatctccgtccttaatagctggcaggaaattttgtgccatacagaaacggctgccatggtctgtcagcgtttcaataatcacaccaatatttgggtcatcctgtttcagacggaaaatagaagcgccacccatgccatctaatggtttaaaaataacatcaccatgttttttatggaattcacgcagtgttctggcgttgcgtgttaccagcgtatccggcgtcagttcagggaaccatgcagtaaacagtttttcattacagtcacgcaggctttgtggcttgttgacgatcaggcttcctttaatttcagcccgttccagaatataagtcgcgtagatgaactcagtatcaaaaggcgggtctttgcgcatcaggataacattcagtgtatcaagggcaatatcctgttcactaccaaactgataccactgcagagggttttcttccacagtcagcaaacgggtgcgcgcacggccttccccctgatgcagatagagatcattcatctccatgtaatggacttcccatccacgtttctgtgcttccagcagcatggcaaaactagtgtctttcttaatattgatggatgaaattggatccatcactataccgagcttgatcattctttctccttaacccagatcaccaaaacgaacttgtagtgctgtaattgcagtgagtgccgtagtttctgtccgcaggacacgaggacctaacaggatatcagtaaactggtgatttgccgtcatttctatttcttcggcggataatcccccttccgggccaatcagcaggcgtaccttttccactggcaacggtagagtattgatactttggctggcacgagggtgcagatttaattttaggctgttatcggtttctgcacaccacgcttcgagtgacataaccggtcggatctcagggatctgattacgtccgcattgttcacaggcagaaattgctatttttttccactgttgcagttttttttccagcctttccgcatccagttttacaccacagcgttcagaaagtagtggcgtgatagtgttaacacccagctccaccgatttttggatggtgaattccattttttcaccgcgggacataacttgccccagatgcagatctaatggtgattcgtgatcagccaactcccctgtatggatatatactttgaccgtctttttactggcttctgtaatttctgcattaaaaacctgattgcttccatcaaagagctgcaaccgttgaccgttactcattctaagtacacggccaacatggttggcggcatcatcactaaggctaatttcagctcctacagtgagaggatcagggtgatagatgcggggaattcgcatatttttctttccttttttctccggataaccccggtatggcatatgctgccatgataaaggagcgctggtagcctaatcaagttgtctatcagacaaaaagaccttgcgagctggctcgcatatttatttcataatggcagttttaatagatttttcattgctaatgacctgtgggaaaatttaatattcaccgtgttctgattaacgtcaggaaataaataagggatatcattacagggatgttatttatggaagctgtattgagtattttcatggatggaaaaaatcagtggatcaataatccagttaatctgaatgatataataatttcgtttttttgcattactttagttttcttagccattattgatataaagacttatcagttaccagatgttttcactcagcctttattatggttcggattggtgtttaatagcggtgataatttaattccgatcaagagtgcgatatatggcgccatatcagggtatttatttttgtgggtattatattggttatgtcggtgtatttttaagaaagagggggttggctatggtgatttaaagctgtctgctgcaataggggcatggattggtatagagatgatccctgtgttgatgcttctgtcttcaatctccggactgttagggtttgcgattatctggctgaaaaggagaagttatccagggtttattgcttttgggccttatctttgtttttctgccatacttttgatgtttttttatctatctgggattaatattatcgagctagctcaagtttagataactcagcatattggatatagtcaggaaacgatagaaatatcacagcttaaaagagtgtactatgacactaaaaataacagcattattagaaaaccaggtttttgcaccctacaaaggaagcttaatcaataagcaaggtttaagtttattaattcaggatcaggaaaatacaattctttttgatactgggcctgatggtagttttatcgataacgcaaagaaattaaatatagatttatcgaaggtttccaccgttattgtttctcatggtcattttgatcactgtggtgggctccctttttttctactaatgctaaagtgatttgtcatccagaggtgataaacaaaagatattatgggtggttaataacgaaaaatcatgctctgaaatttaaaatgttatccagacaggttaattatgataatttcgacacctttttttcaaaagatgaaactcacattaatgataacttcatttattcaggagagattaaaaaagaagaaagtaaaagttatggtgtgattgtaggtgagagttactctcctgattttatcaaggatgaaggagctttaatttataaatcccgccacggattaattatttttattggctgcgggcatcgtggtgttatcgatatggttgagttttgtaaatctataacgggtatcgataaggtctatgccattattggtggcttacatttacgttatgcttctccctttaaactattgcgtatcaggcgatatattaaaaaagaaaatatacagcatatttatgcttgtcactgtagtggtagatggggaaggttatggctaccgaatgcgaagaatctgtctactgggcaatttattgaacttggttaatattaaatgcgagaattggaaaaatatgggagagagcaggattagagcctatagtacacattaattacatggtagatgttaaaagcatctaatgtattgggctactttctgcatacaatagatgttaaaagcatctagtaggctgggtagctcctgtatacgctagacgttggaagcatctagctggtttaggctgttcatcctgcttgcgctagacgttggaagcatctagttggctttaagctgcctaccttacataacctagacgttagaagcatctaattatcttaggttggcttgcttatctctccgttgaaaccaaatctaaataaagtgagttttttattcaagttgatttattgcagtatggctcattggtcacaacttcagtttattaatgagttataaaaataaaaaaatgattaatgtcacttaatttaggaattatttgtgtttaattggtgagtttgtgtttttatattttggttataagttttattctcatttaaatataaagtattaaaggggttttggaaatgataatttcattttttgttatggtgtttttttcggggaatgactatttgaataaaataagggtgctactattcgtaacacccttgataattttaatttattgaggccacgtcatttcgcctttcagaacttttgcacttaattcaaggctggattcttccgcaagatttggataatgttttttcataactgagattaatgctgcggaatcttttgcttttggtaattctttctccagtgtagccagataattttgagtaaaattcactgactccagtgtcatggctgtatgaccgacataatgacctggtaccacagtttcaggtttcaggtttttaatttggtctaatgtttgcatccagttctgacgggatgatttagtctgagtgtcggcaatccatacatgaatattctcagatacagtaacaccgccaacaactgcttttaatttaggaacccatacgaaagtacgatctgctgccggaccattcaaaccttcaacaatcaatttctcaccgtctacagtgaaagtatttcctttcaatggctcagggacaataatttttttcggagcctgatcttgcagaacaccaccccagtacgccagtttaccgtctttggtctcattgatagctttaatcgtttctggtgaagcgatcactttggcttcagggaaggcttcagtgatcacatcaagaccaaagtaataatctggatcagattggctgatgtagatcgttgtcagttttttccccgtcttctggatcattttgaccagttcctgagcatcgctttttctgaactgagcatcaatcagcacaacttcatgctcaccactgataacttcagaagagaccggaaaaatgctttcttcacccggattgtaaatatccattttaagttcaacggcctgagcgaatgtccccattcctaatgaaagagctgtggccagtgcggtatttaatattgttttatgtactgtagtcttgttagccatcattgaattcctaaatgcttatctgcttgaatggcgcatataatagattgcatactccgattgaaaaatcccataattggcaactgtttgttgcataaatcaatcgaatcagcgtggggatacagaaatatagatggacaggatcacagcagcacaggtttttgtcacaattgttgaacagggtagtttgagtgcagcggcagaacggcttgatatgtcacgggcaatggtgtcacgttatttgtctgaaatggaaagatggtcagaaattcgtcttttacatcgtacaactcgccaaatcagcctgacatcagcgggagaacaggcttatcagcgaagcctcaagctgatagaactggcggaagcaatgccagttcaacaatcgacagaagctaaaactctgaaagggcagctgagagtaagctgttgtcaggcattgggaattagtgcactgtctgtggctatccctgagtttatgcgcaagtacccgcaaattggggttagtctggaaatcagtaataaagcgactaagttggttgaagagcgtattgatttagccattcgtattactaataatctgggactgaatttaatcgcccgtccgttatcgacttgccgttcagttatttgtgccgctccttcttatttagccggaaaaaggtttccccagaaacccgatgatttggcgatacataattgcctgacttataacctttttgacaaaaatttatggttatttgaaaaacaggatgaacaatattcgattcctgtcagcggcacgttaagtgctaatgaatcaacggttctgatggaagcggctttacaaggagcgggtatttctatgcagccttattattccgtctcaccctatttaaaatcagggcaattaattgagttattacctgattatcagcctcagacgatggggatttacggtatttatgtcagccgtcaaaatatgcccgctaccttacgggccttattggattttctggtggagtggtttgattcatcctctcactggcagcaattaacgctgaaaagctgatgctaatttctgaggaaatagcttagcctgttgttttaaatgactaataaatatttcaaccggctcggaagatgggcgatggagcggtttaattaagctaacgataaaaggaatttctatactgaatggccgtatacagaaccccgtgtttttatgctgtgcttttttattcagatagtcgagagcggtcagaggattgacaatcgatactccgataccttcactaaccatggcacatactgatgatgcactgtgggtcaccatgatcatcctgcgtgaaacctgatgttcgttaaatatcgcatcgataagctttctgtagctgtcagtaatagaaagactgataaagggctgatcatgaaaatcttctggtgtcagttgtggtttttgtgcaagtggatggctctccggcagaacgcagacttcattcaatgtcagtaaagtttcacgttcagttccggcaggtgtctgcatatgttcggttaaaccgatatcgtggcgttgtgccgaaagccactcttccagtagtggagactcctgtggaatgatggtcagttgtgcatcaggataggattggttgaaactgcggcagactgaaggtaataaagattgtgagaataccggtaaacaagcgatagataattgcgcatactcaaattggcgaatactgtccgctgcattgagaatcctttccagcccgtaataggagcgctggacttcttcaaataacctcagtccttgcgcggtcgggaataaacgtcctttgattcggtcaaacaatttaaatttcaacaactgttctagacgcgccagttcacggcttactgttggttgtgaagttttcagcaaaaccgcagcatcagtcaggttccttgtggtcattacggcatgaaaaatctctatatgtcgccatgagcaggcgtgcatagtgttctcctttagatttcacttcgagactgtttcacgaagaaaaatgcctgttagtgtataccatataacgatgtgtttaaaaataaagcaaaacaatatcagaaatgaatagcttttagcaaaatagatattttccttcccgcctttttgctggcaataatgaagtatctgctgattttgtgagaacgctccaatgacaatacccactatgactgttaattcaggtactgataattcaggcaataattttacgccagaaaaccttcttgctttgcccgaggtttacggaacgccattatgggtttatgacagcgatattattagcagacaaattgggaagctaaagcagtttgatgttatccgttttgcacagaaagcctgttctaatacgcatatcctgcgcttgatgagagagcagggtattaaagtagattcggtatcactgggcgaaattgaacgcgctcttcatgctgggtttcagcccggacgtgataaatctgaaattgtgttcaccgccgatcttattgatgaagagacgctggagcgtgtcattgaactagatattcctgtcaatgccggttccattgatatgctggaacagattggtcagcgtcagcctgcacatccggtttggctgagaattaaccccggattcgggcatggtcatagccagaagacaaatactggcggtgaaaatagcaaacatgggatctggtttcaggatttgcctttagctcttgagaaaattcatcaatacaacctgaatctggtcggtctgcatatgcatattggttccggcgttgactaccagcatcttgcgaatgtttgtaatgcgatggtcgaacaggttgtatcgtgtggagtcgatattcaggcaatttcagcaggcggagggttgtccattccctataaaaacggtgaggaagccgtggatacttgccattattataatttatggcatgaagcccgtcagcgtattgaacagcacttggggcaccatattaagctggagattgaacccggtcgttttttggttgctgaagccgggattttgatggcagaagtgagagccgtaaagtcaatgggaagccgtcattatgtgttggctgatgccggttttaatgatttgatgcgcccggcgatgtacggcagttatcaccatatttctgttttatctgagaactgtgacggaacccacagtgatattggggaaaatagcagtcgttctggcttgaaagaaacattggtagcagggccattatgtgaatcaggagatgtttttacccagctggaaggaggggaagtcatcccgcgcatgctacctgatatttcagtcggtgattatctgatttttcatgataccggtgcttatggtgcatcgatgtcttcaaactataatagccgccctttgatcccggaaatattgcttgttgagggacagcctcgtttaattcgtcgtcgacagacaatacaggaattgttatcactggaagaagtgtaaaaaaaacggggctgtgatgtgccccgctttgtttactatttacttatcacttgtatcagcattaagccgctttgatttgcttattcgctttttttgttgcgttaggtacagagagtgcgtctgcttcaaattcatcaacattgattgagcgcagtctgctggcttccgctcgtttcagaatatcagcttcttctttggtgatcttattatcagataatgctttttcagctaactgatccagacgtgtaaagcccagatttttgcctgcttcacggctcaggcgggcatgaataggctctgcggcaataacgtcatgcagggcttcttccagtaatccatgaggattatgctcgcttggtgtcagatactgaccacgaccaatccgatcacgggttgcagaaggagtctgtaatatctgagccagtttgtgatccagtttatccgctggagcagtgcgtgaacgacccagagggaagacaattcctcgcattaaaccagctaccagacggttagggaagttacgcagtaaatcatgcagagccagttctgcctgatacagagcatcttctaccgcccattgtaccaatggtaagtcttctttctgacgtccttcatcttcatagcgttttaaagtggcacttgccaggaagatttgactcagaatatcgcccagacgggctgagatacgttcacggcgtttcaggctgccacccaatacgcccatggagacatcagacatcagggcaaggttggcactcaggcgattgatgagctgatagtaacggcgggttgcatcattaaccggtgtgctgctcgttctgccattagtaatgcctaaccagaggctgcgcagggtattgctggcaacatgtccgaggtgaccaaacagcgctttatcaaatgctttgacatcatttttttcagccgcagctatttcagccagtacataaggatggcagcgaatggcgccctgaccaaagataatcatgctacgggtcaggatattcgcaccttctacagtgatggcgataggtgctccctgataagaacgggccaaaaagttagatgggccaaggcagatacctttaccaccagcgatatccattgcatcaatgactgcacgctgacctctgtgggtacagtgatatttcacgatagccgacagaacggcaggtttttcacccagcataatgccgcttgtgatcatcgttgctgctgcatccatcaggtaagagttaccggcaatacgggccagtggttcttcaataccttccattttgccgataggcagtttgaactgacggcgaatgtaggagtaagcaccgatagccatagcgatacttttcagcccgccagttgcgttggacggcagagtgataccacggccaactgacaaacattcaaccagcatacgccagccttgcccagccattttcggcccaccaataatgtaatcgataggaacgaaaatatcctgaccacgggttggcccgttctggaatggaatattcagcgggaagtggcgatgaccgatttcaacccccggggtattggttgggataagagcacaggtaatgcccagagattcagtctcacccagtaaatgatccgggtcatacaatttaaatgccagccccagtacagacgcgataggtgcaagagtgatatagcgtttattccagttcaggcgcataccaagaacttgatcaccctgccattcgcccatacagacgacaccagtatccggaattgcacctgcatcaaaaccggcttccgggctggtcagagcaaaacagggaatttcttcgccacgggcaagaccgggcaggtaatgttttttctgctcatcggtaccatagtgctgcaataattcacccgggcctaacgagttaggtacgccgacagtgattgccagaataccggagacaccagacagtttttgtagcacttgtgattgggcgtaagctgagaattccagaccgccatattctttcttgatgatcatcgcaaagaagcgatgttttttcaggtaagcccacagttccggaggcaagtcagctaattcgtggctgatttggaaatcatttgccatacggcaggcttcttccacagggccatcaatgaatgcctgttcttcagcagtgaattgcggtttagggtaattgtgcaattttttccagtcaggattgccacggaacaaatcaccttcccaccatgttgtacctgcatcaatagcttctttctctgttctggacatgcttggcataactttacggaatgctttcaggccgggagcggagaataaagagattcgggtcggggtgaaaacaagagggaacaggataatagcgagtggcagcagtagccagtagctccataagccggtaacacccataatgaatgtataggcaataagcagcaggctgctaacagtcaggctgactttgcggtaacaaagcccgccaattaaggctaaaaataagatgatgctgaggacggtcatagtaaaactcctgtaaatctcaggttgagttgtcagaggtctgacctgttgtgttgttcttcttttttagatgaggaaaaggcttttatcaatatatttacatgttaattacaatccagctcacaaagtgattgctgtttttgctgtgatagtttcgtcggggtgtaatgaaatcttctttcaggagggggaatccgttacactcaataactgttattattaatcccgaagacatttcctttcaggagtatgagccccatgtatcaagatctgatccgcagtgaattatctgaagccgtagagacactgaccaattttctcaacgataatgccaatattgatgccattcaaaaagcggcggttttgttggcagattcattcaaagcgggaggaaaagtactttcttgcggcaatggtggttcacattgtgatgccatgcattttgcggaagagttgacaggccgttatcgtgaaaaccgtccgggatacccgggtatcgctatttctgatcccagccacctgtcctgcgtaagtaatgattttggctatgattatgtattttcccgctatatcgaagctgttggccagcaaggtgatgttctgctcggaatttcaacctcaggtaattccggtaatattattaaggcgattgaagctgcccgtgcgaaagggatgaaggtaatcaccctgactggtaaagatggcggcaaaatggccgggacagcggatgttgaaattcgtgtgcctcatttcggttacgcggatcgtattcaggaaattcatatcaaagttatccatattttgattcagttaattgaaaaagagatggtaaaagcctgattgcagcgtgttaatagaaaccagtgttagcagaaatcagcgttaacaaggtatcaggttcaggttagaggtaggcaatgtgtgaattacttggcatgagtgccaatgtgccaacggatatcattttcagtttgagcggtcttatccagcgaggcgggaatacaggccctcacagggacggctggggaattactttctatgagggtcttggatatcgaaccttcaaagatcaccagccctgttatcattctcctgttgcccgttttattcagggctatccgatcaaatcagaggctattattgcccatattcgtcaggctaaccgcggcaatgtatcccttgtgaatactcatccgtttacccgtgaattatggggaagatactggacttatgcccataacggtcaattgaaagggcatcgtaacctgaaaacgggaaattatcgtccggttggtgaaactgacagtgagtgggcattttgctggatactacatcagttatcggtgaaatatcctaaacggccttccaactggccagcggtattccgtttcatcgcatcactggcagatgaacttcgggaaaaaggtgtgttcaatatgctgctatcggatgggcgatttatgctggcttattgctcgacacaattgcactggattacccgtcgttcacctttcggtaaagcaaaattgcttgatcaggatattgaaattgattttcaggaacatacgcagcctgatgatgtggtatccgtgattgcaactttacctttaacgcataacgaagagtggcataaaattgagccgggaagttatgcattatttcaccttggtgaacgcgtagtctgatggagtttggttgtctggctgagctacctgatttaaaacatattgtcctctgatgactttaacagttgcaggtgtgctatgttgaacgaaatattcataagctggctgcaactgttcccaaaatgggtaattgacgttattgtgatggcgcttcatatttgatggcgtcatcctgaaggggtaaatgtcaattttaatttctcgttgcccacgatgaagcgcactttctgcatatcggtatatttcatccatataaagattggtcatggcatagcagccaatagatttacatgcaccatggatcattaaattcttgccggaataaccccggtatttatcgaattgattgggaaagcctatattaatggcccggtagtagctgctgtcgggttttaactgtttaaggctgacgtggtaaaaaccttccgggctttttaagtcccctttcagggttttaggtccaagccctccggagtaattacagataggatattgccgggttaattgataatggcctgtgctgtttttggtgtagagttcaagtactttttcttctttgaatatttgaatgaagatatcagaaccaagctgttttaatggtgatttttcacttaattgtttactgcctgataaccagccctgagcctgagtaactactggtacactaacgagaaaccagctaaacgaaaaataaagaatattttttttcataatataaccacctaagaaggtaataacttaatgacatcctgcgattgaggttatcatgtcgtggcaatatgctgagtaaatataacaacgatattttgtacccataaaagggcagtctggttaaaaagccctccgtagtagggaaaagtgatgattatgctcggctttatcgaatagttaacggttcagcagagaaattattcttatttgcttgagctaaatcactcgattagtcagacagcgtttgggggaaatgttagaatcgttgccggcgaaacttaagagaatattgtaacgattatcggcatgaataacttgagatatatgccgctcaagctgttttttattactgaagtcgctgcatcatcctgcggaaataccacagggtgagctgtagcatatgatttaactgataaacttgtgcaaatcttatgattaaaattaaaaaaggactcgacctcccgatagcaggagcgcctgcccaagttatagaagatggtccgacaattcgccatgtcgccttattaggcgaagaatatgttggaatgcgtccttctatgctggttaaggaaggtgagcatgttaaaaaagggcaaattctttttgaagataaaaagaatccaggggtagtatttactagtcccgcaagtgggaaagttgtaaccattggacgtggagagcgccgtgtactgcaatctgttgtgattgaggttaatggcgacgaaaaaatagcgtttgatcgttatgagcgtacagaacttgcagggctgactcgtgaacaggtagaaaaaaacctgcttgcatcaggaatgtggacggcattacgtacacgtcctttcagtcgttctcctgtcccaggctccacaccaaaggcaatctttgttacggcaattgatactcagccactggcggctgatccgtctgttgttattgcaacgcaagaagaggcttttgttgatggtctgaatgttctgtcaaaactgacggaaggaaaaatccacgtttgccacggcgcgggaaaaattccggcatcggggaacaaccctcaaattacttacagccagtttgccgggccgcatcctgctgggttggttggaacacatattcatttcattgaaccggtcagtgctcagaaagcagtatggcatctcggatatcaggatgttattgctatcggtaagctattcacaaccggtgaattgtatactgatcgcgtcatttctctggcagggccgcaggttaaaacaccgcgtctggttcgttcccgtctgggtgctgacttgctggaagtgactcacggtcagctgaaagagggtgaaaaccgtattatttccggttcagtactgtgtggcgctaaatcagatgaagctcatcattatctgggccgtttccacactctggtatctgttctgtctgaaggtcgtgagaaagagttgtttggctggatagctcccggtacgaataaattctccattacccgcaccaccatcggccatttcctgaaaaagaagcggtttgctttctcaacttccacaaatggcggagatcgctccatggtgccaatcggcaactacgaacgagtaatgccactggatatcatggctactcacttgcttcgtgatttgctggctggggacactgacggttctcaggctctgggttgtctggagttagatgaagaagatttggcactgtgtacttatgtttgcccgggtaaatatgagtatggtccggtactgcgtgaagtgctgactaagattgagcaggaagggtaattcatgggcctgaaaaattattttgaaaaagtagaacatcactttgaggccggtggcaagctggaaaaatattatcctctctatgaggcagtgagcaccgtcttttacacgccgggcacggtgacaaaagggaaaactcacgtccgtgatgccatcgatctcaagcgtatgatgattctggtatggatgtctgtttttccggcgatgttctggggaatgtataacgtcgggaatcaggcgataccagccctgactcatctatacagcggagaggcattacagcaggttctgtcttcagactggcattatatgctggctcagtatcttggtgcatcactgacaccggatgcagggtgggccagcaaaatgctgttgggcgcaacttatttcctgccaatttatgcggttgtttttatcgttggtggcttctgggaagttttatttgccattatccgcaaacatgaaatcaacgaaggcttttttgtcagctcaattctgttcgcactgattgttccgccaacgctgccgttatggcaggcggcactgggtattacgtttggtgttgtggtcgcaaaagaaatctttggcggaaccgggcgtaacttccttaacccagcgctggcaggccgtgctttcctgttctttgcgtatcctgcgcaaatttcaggcgatctggtctggactgcggctgatggcttttctggtgcaactccgttgtctcagtgggcgaatgcaggcctgcacgctctgatgaacaccatttcaggccagcctgtaacatggatggatgctttccttggtaacattccgggttcagtaggtgaagtttccactctgatgattttcatcggtggtgtcatcattttgtttgcccgtatcgcttcatggcgcatcgttgctggtgtcatggtcggtatggttgccatgtcctatctgtttaatgccattggttcagatactaacccgatgtttgctatgccttggtactggcacatggttctgggcggtttcgcatttggcatgatctttatggctacagacccggtatccgctgcatttacggataaaggtaagtgggcatacggtattctgatcggggtcatgtgtattctgatccgggttgtgaacccagcttacccagaagggatgatgttggcgattctgttcgctaacctgttcgcgccactgttcgattatctggtcgtgcaggccaatattaagcggagaaaagcccgtggctaatgataaaccaaaaaataatgacagcatcggcagaacgtttttcgttgtttttgtgctgtgccttgtatgttcgattgtcgttgctggttcagccgtaggtttgaaagcgcagcagcaggaacagaaactgctggataagcagcgtaatattctggatgttgccggtttgctcaagccagatatgacaacagcagaaattaaagaagtttatgacagtcgtattcagcctgaattacttaatttgaaaacggcagcacttgaaaaaagtgatggtaagtttgacctgaataatgctctgcgcagtgatgaaaccagtatcgctttatcatcgaaacaggatttggcaaaaatccgccgtcgcgctgatatggcagaaatctatctggtaaaagatgatcacggaaaaacaactgagctggtattgccaatctacggttcaggtttgtggtcaatgatgtatgcgtttatttctattgatgtggatggcgtaacatctcgcggcattacttactattctcacggcgaaactccgggtctgggtggtgaagttgataacccacaatggcgtaagcaatgggttggtaaaaaactgtataacccggaaggtgctccggcgattaagatcgttcgtggtggagccggtgataatccttacggtgtagatggtttgtccggagcgactctgacttccaacggtgttcagcatatgtttgatttctggttgggtgataacggttttggtccgttcctgaaaaaagtacgcgagggagccctgaaagatggctgatagcaaagagataaaacgcgtcctgcttgggccgttatttgataataacccgatagcattgcagattttgggagtatgttcagcattggctgtaacaaccaaactggaaactgctttggtaatgacgattgctgtaacactggtaacagcattctctaacttctttatttcattgattcgtaactacattccgggcagtgtgcgaatcatcgttcagatggcgatcatcgcatcgctggttattgtggtagaccaggttttacaggcgtatgcctatgaaatctcaaaacagttatctgtgtttgttggccttatcatcactaactgtatcgtaatgggccgcgcagaagcctacgccatgaaagcaccaccggtggaaagctttatggatggtatcggtaacggcttgggctacggtgttattctgttgctggtgggttttttgcgcgagctgtttggctcaggaaaactgttgggcattacagtgatggaatccatcaagaatggcggctggtatcagcctaatggcttattcctgctggcaccaagtgcattcttcatcattggtatgctgatttggggtctgcggactctgaagcctgagcaggttgataaggagtaacaggcaacatggaacattatattagtttgtttgtccgtgccgtctttatcgagaatatggcgttatccttctttctcggtatgtgtacttttctggcggtatccaaaaacgtaaaaaccgcttttggtttgggcgttgccgtaacggttgttttggggatttcggttcctgccaacaaccttgtttacaatctggtactccgtgatggtgccctgattgatggcgttgacctaagcttcctgaacttcattacctttatcggtgtgattgccgcactggtacagatactggaaatgatcctcgaccgctacgttcccgccctttacaacgcattggggattttcctgccgttgattacggtaaactgtgcgatttttggtggtgtttctttcatggcccagcgcgactataacttcagcgaatccatcgtatatggtttcggttcaggtatgggctggatgctggcaattgttctgatggccgcaatccgtgaaaaaatgaaatatgcggatgttccggcaggtttgaaaggactggggatcacctttattaccaccgggctgatggcattgggctttatgtccttctccggcgtgcagctctaaaggcgggaagaattcatggatataatcattctaggcgtagtaatgtttaccctgattgtgttggcactgacagcaatgattttgtttgcaaaatcgaagctggtgaacaccggggatattaaagttgaagtcaacggcgatgaggataaaagctttactgctcctgccggtgacaaattattgggtatgctggctaatcaggggatttttgtttcctctgcttgtggcggcggcggttcttgtggtcagtgccgtgtaaaaatcaaggacggtggtggtgacatcctgcctaccgagctgtctcacattaacaagcgcgaagcgaaagaaggctgccgtctggcatgtcaggttaatgttaagcaagacctgaaaattgaattgccggaagaaatattcggcgttaaaaagtgggaatgtgaagttatctctaacgataataaagcaactttcattaaggaactgaaactgaaaattcctgacggagaagttgtaccattccgcgcgggtggttacattcagatagaatgtcctccacatgttgcccgttattccgattttgatgtaccggatgagtaccgcgaagactgggataaatttaacctgttccgctatgtatccgaagtcagtgagccgactgtccgtgcttattctatggcgaactacccggaagagcacggcatcattatgctgaacgtgcgtatcgctacgccaccgccaagaaaccctgatgtgacaccgggtatcatgtcttcttatatctggtcactgaaagcgggtgataaagtgacaatttccggcccatttggtgaattcttcgcgaaagatactgatgcagagatggtctttatcggtggtggtgcaggtatggcaccaatgcgttcgcatatctttgatcagctgagaagactgagctccaagcgtaagattactttctggtacggtgctcgttctaagcgcgaaatgttctataccgaagattttgaccagttagcggcagaaaatgaaaacttcacatggcacgtggcattgtctgatgcgctgccggaagataactgggatggttacactggctttattcacaatgtcctgtatgaaaactatctgaaagaccatccggcaccggaagattgtgagttctatatgtgtggacctccggtgatgaacgcagcagtcattaagatgctgaaagatcttggtgtagaagatgaaaacatcctgttggatgatttcggtggctgataatttgaatcaggccatgatatatatcccccacaatggcagtaaattgtgcggatatataacactttgatttaacgataagcgcccacattttgtgggcgctgacgattcagaaagagtaagttatgttgaataaaaaaattatcaactggggtgtaatgctactggcggctatgctgttgtcagcatgtggtggccctgaacagcagaatctgagtgggcaaacgatggggacttattactccgtcaaatatgttgctgattcatcagtcccctctccggaaaacatgcaaaaagagattgatcgtttactggaggaagtaaacgaccagatgtccacttaccgaccaaattctgaattgagtcgttttaatcaaagccgtgaagtgaatacgccttttccggtatcggcagccaccgctaaggttgttaaagaagccatccgcattaataagctgacggatggtgcgctggatgtcactgtcgggccattagtaaatctatggggtttcgggccggaagggcgcgtaacgaaggcaccaacagaggatgaactggcaacacgtcgcgcatggattggcatcgataagctatctgttgaaggcaatagcctgattaaatccattcctgagttgtatgttgatctttcttccattgctaagggctatggcgttgatgttgtggcggaatatctggcttctcagaatatcggtaattacatggttgatattgggggggaagtccgcacggcaggtaataatggaaaaggaacaccttggagaattgcgattgaaaaaccctccgatagcggaatgacgcaaagtgctcaggaaattattgcgccgggtaatatggctgtagcaacatcaggtgattatcgtaactactttgaacagaacggcgtgcgttattcacacacgattaatcctaaaacaggccgacctatcgcccacaatctggtttcaatcacggttattgctccaagctgtatgagtgctgatggtttttctaccgggatagatgttctggggccggaaaagggtatggaaatggctgagaagctgaacattccggtctttatgattgtcaaaactaaagatggttttgaagaacgttatagcccggcctttaagcactatttacaacagaaagacgatttacaacagaagaaataagagggaaggttatggaagtctttgtcgcagcctttatctttttcctgctggcctttgcgggaatggcgttaggttatatttttaagcgcaaaagcattcagggaagttgcggcggtttgggaagcatcggtgttgagaaagtttgtgattgccctgaaccctgcgatgctcgtaaaaagcgtgaagcaagagaagcttctcgccttgctcagttagagaaaaaccgcattatctgatgtattttcgtttttcaaatcaattgagaaatgggatttgaagtaatttgaaatagcccgctgtcagaaaaagcagcgggttttattttttatagtgtattaaaagggtggcaccttttatgcgcttgttgtaaataactttttaccgaactcatggagatcccaagatcttctgcgacttctttatagcgcatcccttgcagctgagtcagcagaaatgcttgtctgacttttattggtagcttatcaagcgtgctatctatcctttctaattgctccagcagtacaagctggtgttctgttggataggaggtgtttttcggcacggtactgatatagtccaaataattctcttcgagctttttccggcggtaataattagcgatagttctgcgggcgatggtaattaaaaacgctttgggataacggatctcagccatatccggatattgcatcaatttgataaacacatcatgggtgaggtcttctgcatggttgagactggcacagttctgtttgatccagctcagcagccattcgtgatattcgttataaagctgacgggctatttcattgtgtccgaatgtgcttttttgcacagccatgtgatattgcctgaatgaataaatttgataatgattattatttttatttattgatggaagtcaatagtagattatagtgataaccctcttaaaaattaagagggtatattgcattggatgtttaatggcagtcagaactgctgtgaaatgctgagtttatagttgcggccaatgcctgcactagcttcccctaagtatgggtaataatctcgattgaacaggttatcgacggtgatacgagcttcaagaccttgtataaaaggtggttgccagcttgcaaacaggccgtgcagggcataacctttggtttttggtagatcccaactttttgccattggatcactatcagatgctgaacggtcttgtttacgaataaattcacctttccaccccattgccatgtgccactgtggaactttaatgccgagcatcgcatgtgcagatcttggaggaatttcagtaatccaggttttatgccctatccacggatcacgcatggaagcatcacgttggccgcgaatggtggaaaaggaaaattttccgaacagtaccctgctatcatagaaagtctctatttccaatccttctatggtataacccggcagatttcgataattggaaagtggtttttcacaatttgtatacgaaataccatctaactgggctttacagtatattccacgccttttgaaaatttcgtttttgccacggttgcggaataaagtggtacggatttgcaggctgtcaccttcaagcattaaatcatcgaaatcaagaattgcaccgaggcgaatacccgtcattttctcaacatcaagattccggcttgaaccaggaagactgccggtcgcctgcacttcatattgttcatcaataacgggtgcacgccatgtgcggctgatatcagcgaaaagtgataggtttttgtgtgcctgccatattgtacctaaatggggagaccaacctgcgtaagttacgctgctgtagtcatgattaatttcaggtgacatattgttataagcagatgctttgtttttttctccggtgtttttgatgtgatcataacgagctcctagtgttacggtaacgctgtctattttcagagagtcctgagtaaataggctataagtttgctgaactccggctggcatataaccgggctgataatagccataattaaatgtaggatctttctttttatttttatcaaacattaggacatcacgatcatttttatgccagtgggcaccaactaataattcatgctctataagattggtagagaatacgcttttattactgatatcaaccatggtatcagtatacttaatccagcttttttgccccataagtgatgcggatgtgggttttacatcctttatctcagggcgtcgatcattttgtctggtatttgaataggctgaggttatggttaaatttaaccaagggttatcttctggtgcgatattccatttagctgaatagttttgatctatttgatctcgaaataccaaaagttttcgccatgcatcattccagccatatttttctatgtcgctttcagttggtacattcattttatcccgtttagcagcccacggttgccagccatctgactctgaacgcatagcagataagctgacagtatgcgtgtcattaggatagaaattggttttcaataaataggaagtttgattattttgtgaaaactcaaaacgtgtcccatcggggcgcttgatattatgaccatctcgtttgctgaaatacagcaagccatccgcgtagccattcgaatctctgccatataatgcagcgctgttgatccattgcctgtcattggtatggaagctttgcttaataaatccaccccaatcctcatcagggcgcaataagtcattggcatctttagtcacaactttaattgagccaccaaatcctccattgccgttcaatatattgtgcggccctttatcgacatcaatgcgtttgattaactcaggttcaataaaaatagatccctgacgatatttctcaaatccttttggagcatcatccagtgtcactttgacatcttcttgctctcccattccccagatatttaatgtctgtccaccgggacgtggtgaaccggacatcgaaacgccgggaagctgcccgagcagctcagcaatattatccgcctgagtccgatcaatatcttcctttttgagcgctgaactaaccgcactgggactgttggg

SEQ ID NO: 113 - DNA, 29759 bp, Xenorhabdus sp.
atgactttggcgacaaatatcagtttattgagtaagttaggggctatccctttacagcgaaatcatgcaactcttcagtcaacctctgctgacagtacacttctggataaaaataaacaactttctcccgcaataacttcccgttcagaaaatactaaacaagctgattcgctctatcaatcattgataacggcttctcaaaaccgagttatggatacacctgaattaaaagctaatgatattgcaggaaaacattcaaaatttattgattatgcactggctcaggtcacccgtgatgtttatcgccgaaatagttttggcattggtgactatgtacgcatgtcagatgaagagctaattaaagcgggtattgaccctgatactttggatgatcgttctacagggtttcaggctggggtttatcgaaataaggggttatatattgtgtcatttaccggctcaaacgaaataaaagattttatggcgagtattcgtcaggggcttggatacaatgaagcacaatataatcaggcggtagatctggcaaaatcagcattaaaagcatttggtgagaatgttatttttaccgggcactcaatgggaggagggctggcatcaatggctgctctgacaacaggaaagcctgcggttacttttaattctgccggtgtttcagactggacactgaaacggatgggatggtcaccgggagctggtcgtgaaatggcagagcagggattaatccggaattatattgttgaacatgactggttagataatctgcaaaaagcattaccaattcctcagcccatgggaagtcagattcttcttgaatatgaatacaagccggaaaatttcatcgattcgattgtgcgctatagctatgcgttacattcattcaaggctcattttttggaagctgtgcaggaattaatggttattcataggccgtggccagggaaagaagataataaagaatatgggaaagaaagtgtgatgatggctgctgcgggtaacgatatcaaagataatattatcgcttcaaataaagcgtcatcactgcaaacatgggcggtagatatgagtgatgatgaactgggtgttttattcagccaatcctatcagcatactaatttacagccgcaattaagtaaggaaagggtggaaaaatattattcagcttaattgtttgtcttttaattaagaattaatgcgttgagaacaatatcgataacaagcgggcaaatagcccgcttataccaagataggttaattgtcagtagattctggcaattctggtttagggtttcctgaaggagcgcggcgctttccgatgtttttgctgtcacgatgacgcactttcacccgatttttcttcgattcttctgtttttttcttttctttacgctttgccagcacttttttggatggcttatagcttttattctcacttggtgctttggtttgtggacgaagttcgtcaacaacccgcactttcagtggttcctgaagatagcgactgatttttccaagtaatggatggtcatgggattcaatcagcgcaattgcggttcctttgcggccagcgcgggcagtccggccaatcctgtgcaggtaaacatctgctgtgcgtggtaaatcaaagttaaaaacgtggctgatattttcgatatccagcccacgggaagcaacatcggttgcaaccagcaccttaacccggccatcattcaggcgcttcacggcgtctgttcgtttagcctgtaccatttcgccttcaagaaaactggactgaatacctgcctgatgcagccattcaaccaattcgcgaacacgctcccgtttacgtacaaaaacaatcgattttgtaacgtcttcttgcttcagcaaatggcataacaaggctgttttgtgtgccagattatcagcacgataataaaattgctggattttcttacgctcacgacgggaaggttctgcatcgatctcaacaggatctgtcagcaggcgcaccgcaaaatcacggatactttcgccttcaagcgttgcggaaaatagcatggtttgtttacgccagcgggtttctccggcaatcgtctcaacatcattggcaaaacccatatccaacatgcgatcggcttcatcaaggatgagggtttctactgcacggcagtcaaagttttcttctttgatatattgcagcagacgccctgtagttgcgacgacaatgtcctgattctcactgaacacttctgcatgattcatgtaggctacaccaccagtaatcgtggcaatatccagatgagtatgtgcagccatctctctggcctgctctgcaacctgcatcgccagttcacgggttggtgttaaaatcaaaatacgtggtggccctgatttcttacgtgggaaatccagcaaatgctgtatagccggtagcaggtaggcagctgttttgcctgtccccgttggtgcagaacctaatacatcccgcccgtccatggccgcaggaatggctgccgcctgaattgcggtcgggcgttcatagcctttatcatttaatgcatcaagcaggcattcatcaagttcgaagtcggaaaagtttgtcgcagtcatcatatacctctgtttgggccgatgattataaacaggttaggctcattcttcaccctataacatgcaccagtgttaaaagtatcaggtgtgcgtgtggcttttatcctcgggtcataagatttatgctatgaagaactttggttttcaacagatataattcatgacgttaatacacaaacccgctttgcgtcgcggtggtttcacattcaaacaattttttgtcggacatgataaatgtgccatgcaagtcgggactgatggcgtgctattggggacatgggcaccggtagataatagaaaaaactgtctggatatcgggtgtggcagtggactgattgcactgatgatagcccagagatccggaaacgatacagttattgatgccgtagagctggacgaagatgcagcaatgcaggctattgaaaatatcgatcaatccccgtggcctgaccgcatcagggtataccggcaggatattcatgattttgctgtgagaagcgaaagccggtatgacttgattgtgagtaatcctccctatttcgaacctgccattgcctgtcgtaatgaggcgcgcaatcaggcgcgttataccgaagcactgactcatcaggggttattggactgtgttgaacaattgattacccctaacgggttattttgtgtggtacttccttatgggattggaaagatcttcgaaaaaatggcgatagaatgtggttggtttccccattatcggctcaatattcgtgataggctggataagccgttacatcgtttattgttgggattatcccggcagaggcaggaaatacaggttagtgaactgatgatccgtgctactgatggcacatattcaaacgagtttcagcagttagtgaaagatttttatctttattattgatagggttatcgttcataaaaaccttaaatttttttacgtaagattgggataaatctttctgttttccataatctaaaatcgagtgagccactgaatagaggctatgatttgtactataaataaaaagtgcaatgcagaataatcggtggttgtaacacaaaattacaatcaaagttgaacttcacatgtaatgaacactcaaaggtgatgcttgttcgagtagcaaagtgtcatgactggtgtaatgtcagtgtaaatgtggagttttacctcaggagagtgagcctcggatgagcgagcagttaacggatcaaatgctggtcgagcgagtacaaaaaggcgaccaaaaagcgtttaatttgctggtaatcagataccagcacaaagtggcaagcttaattgcccgttacgtacctcaaggcgatgttcctgatgttgcacaagaggtatttattaaaacttatcgggcactgtcttcttttcggggtgatagtgctttttatacgtggttgtaccgtattgccgttaatactgcgaaaaattatttggtagctcaggggcgtcgtccaccatccaatgatttggatgctaatgatgcagaaaattacgatacgtcaagttcattaaaagaaatttcgaaccctgagaacttaatgttgtcagaagaattaaagaaagtggtatttcgtaccattgaatcactgccagaagatttgcggatagccattacgcttcgggaacttgatggcctgagctatgaggaaatagccgtcattatggattgtcctgtgggtactgttcgttcgcgaatctttcgtgcaagggaagccatcgacaataaagttcaacccctgatccagcagtaagcagtagtggaagcaccagcagcagtggaaacagtagtagtggaacaaaataatattgaagggtactggcatgcaaagagagaaactttccgcattaatggatggagaagctcttgatagtgaaatcgttcgtttaatctctgaagatgctgaaatgcagaaacagtgggaaagatatcacctcatccgggatacattacgtggtgatgtaggtgaggtgttacatttggatatcgctagtcaagtggcacaggcgcttgaaaaagaacctgtccatatcaatccagcagctattccggaatctcagccaaaacctgatacgtggcagaaattgccgttctggcataaactccgcccgttagtgacccggccctgggctagtcagataactcaggttggtgttgcggcttgtgtgtcaatggcagttatcatcggtgttcagcaatataatgggtctgacactgatgctcagcttgataacccggtcttcaatacattaccggtgatgggttctgcttcacctgttgggttatcggttcccgctgaacatgatgcttttggtggcgacttgagtacgcaggtgcgggaaagtaataagcgtattgatgcaatgttgcagcagtacgaacttttccggcgtattaatgcagaaaatgaacaagggttgccagaggttaacgcaatacattcgggagaacaaagacctgtaatctcaaataagtaataaaaatgaaatatactgtttttttcattttattattcgggagcttcctgaatttatcaaaagcctcggttcagcaaaaaaatagcaccgaggctttgttacagggtatggggcattccgtacagaccttgccttatgaacttgcttttattaacctgagccagcaatttattattcctctgcgttatcgacacgttattattgataatcagcccatcgcacaacttattcaaatggataacacgcgccgtgagattattcagcgtggccatcagataagctattacgaatcaggtttggattcatttagcctgcgtggtaatcatattgtagactacctgcctccgatcatttttgctgatttttctcagatacagaaattctataattttattgatgcaggctcgactcacgttggcgatcgtcctgtctatttcgtgcgtataacatccaaagataacgatcgttataattataatttattgatagacaagaaaagttatctgcctttgctgattgagttatttgatcaggaaaaaatggtggttgttgaacagttccgtgttatatcctcaagggtgaatgacgatatcaagcaggaattgaacgccattgtgaatttgaaattgccaccgatgttagttattccaaaagctgaaaaagtggcatttaactggaaggttagtaagctgcctgaaggttttcgggaagtttcccgtaatcggaatcggttatcaaagacagaattattggaatccatcatgtacagtgatggggtattcagtttttctgtaaatgtggtaaatgctggcgcaaaagccgctgatgagccactgtatcgacaggggcgaagaacagtttatactgtgtcgaatggcagacacagcatttctgttattggcgaattacctttcgccacaattaaacagattgccggaagtgtcacatttacgggggataactgatggttaaagaatgggcaacggttgtccgttggcagcaaggccgggcggtattgcgttacggctcctcttcggggtgtggcagctgtcaggcaaaaacagcctgtgggtcgtatttgctggaaaaactggggccggaaaatatccaccaactggagttggagattgctcaaccacttcaaccggggcaaaaagtcgaagttggtattccggaaagtagtttattacgttccgctatgctagtttatttaaccccactattaggtctgtttttaggcgggttgctcagtcaatactggactactgagcagttatgggtatgtgtaggtggtattgctggtggtctggccggttttgcttttgcccgtaaaattgctgcatattgggataatcagcaggcataccaacccgttgtgttacaaattggtttacctcccgatacgattaaggttctacatcaggaataatctgttttaccataatcgctttcacgatttattacgaatattttcactttctggtcatactgtatgggttatacccaatagatttcaagttgcatcgcggcagcaagagaatgaatccccaggagcatagacaattatgtgactggggtgaatgagcttagccaataaagaggcggcttgaaagatgaagggtataggttgaaaaccgtaggcatgactaggttttcactgtgttgacatgtagaatacggcttttcaggccagtggccaaacccgtatctaataaacgtcgctttatgtccatcagtgtgtccataggcgaatgattcagaaatattaaggcaaaaaagatttaataatgaagcaaataagaaatttctccattatcgcccacattgaccatggtaagtccacgctatctgaccggattattcaaatctgtggtgggttgtcagaccgcgaaatggcagcgcaagtactggattcaatggatcttgaacgtgagcgtggtatcactattaaggcgcagagtgtgacccttgattataaggcacatgacggaaacgtttatcaattaaactttatcgacacgccggggcatgttgacttctcctatgaagtttcccgctctttggctgcctgtgaaggtgctctgctggtcgttgatgcagggcagggcgttgaagctcagacgctggctaactgctataccgcgcttgacatggatctggaagttgttccggttctgaacaaaattgacctgcctgccgcagagccagagcgcgtagcagaagaaattgaagatatcgtcggtattgatgcaacagatgccgttcgttgttctgcaaaaaccggtgtgggtgtacaggatgtcattgagcgtctggttaaggaaattccagcaccggaaggtgatcctgaagcaccattacaggcattgattatcgactcatggttcgataattatctgggtgttgtctcacttgtacgtgttaagaatggtacgctgcgtaaaggcgacaaaatcaaggtgatgagcacaggtcaggtatataacgctgatcgtttaggtattttcacaccaaagcgcattgaccgtgacgtattaaattgcggcgaagtgggctggttggtctgtgcgatcaaagatatccttggtgcacctgtcggcgatacgttaaccacagcgcgtcatccggcagaaaaagcattaccgggtttcaaaaaggtcaaacctcaggtttatgcgggattgttccctgtcagctctgacgactatgaagcattccgtgatgctttgggcaaactgagcctgaacgatgcctctttgttctatgaaccagaaagctctactgctttgggctttggcttccgttgtggtttcctcggcttgctgcacatggagatcattcaggaacgtctggaacgtgaatataacctggatttgatcactactgcaccaacggttgtttatgaagttgagaccaccagtgatgaaatcatttatgtggatagcccatccaagttaccgccattaaacaatattaaagaactgcgtgaacctattgcagaatgtcacatgctgttgccacaggaatatctcggtaatgtcattacactctgtatagaaaaacgtggtgttcagaccaatatggtttatcacggtaatcaggttgcgctgacatacgaaatcccaatggctgaagtggtgctggatttctttgaccgcctgaaatctacctcacgtggttatgcgtcgctggactataattttgttcgtttccaacattctgacatggtacgtgtggatgtgttgattaacggtgagcgtgtcgatgctctggcgttgatcactcaccgtgataactcgcaataccgtggtcgagagctggtggaaaaaatgaaggaattaatccctcgccagcaatttgatatcgcaattcaggcagccatcggtactcacattatcgctcgttctaccgttaaacagttacgtaaaaacgtactggcgaaatgttatggcggtgatgtcagccgtaagaaaaagctgttgcagaaacagaaagaaggtaaaaaacgcatgaagcaggttggtaacgttgaactgcctcaggaagccttcttagcaattctgcatgttggaaaagattaattaacaaggtcgtaaggagtctaaatggctaatacttttgccttgatcttaacgtttgcaacgttaatcaccgggattatctggtgtatagatcgctttaaactcgcccctgagcgtaagagaaaactggctcaggctcagaaacaggcagcgggcaacgaatctcaggaagctgcaattaaagaaataaacaagcctacatgggctgagacatttgcatctgtttttccggtgttagccattgtctggatcctgcgttcatttgtgtatgaacctttccagatcccttccggttctatgatgcctaccctgttgatcggggacttcattttagtagaaaaatttgcctatggtttgaaagatccgatcacacaaaccaccctgattaaaaccggtgagcctaaacgcggtgatattgctgttttcaaatatcccgtcaacccaagtatagattttgtaaaacgggtgattggcttacccggggataagattgtttacaactattgggataaagagcttcagatttatcccggctgtggttacgctcagcactgtaaagacattctcccaattacttatggggatgtgtatcttagtgactggactatctcagaaaagataaagaaagacggtacgattactaatgaagtgcatcagattcctgttgggcaaacattaggccctcgcacattgcgtcaaggggagcgggttgaaacgttgggtgatgtttcgcaccatattttaacgcttccgccacaacgtgagccggagtttgttcaggaaggccaaccggtaggtacctgggttgtacctaaaggagagtatttcatgatgggcgataatcgtgataatagctctgatagccgtttttggggatttgttccggagaagaatctggtcggacgggcaaccgctatctggatcagcttcaataaacaagaaggtgagtggcctgactggccatgggtacgtttcagccgaataggtggaattcactaatatttatatattagcgaagcattaatttatctctcagtgtagaatattctctcaaacgagatgactggcttcctgaaatgattaactttttaggaagctagtgcaaacgcaacagttttgtaaggcatatcattaaggcagaaatccggtatacacaatggatttcaagatgcgtcgcggcggcaagggagtaaatccccatgagcatagataattatgtgactggggtgagcgagcgcagccaacaaagaggcaacttgaaagacgaagtgtatagcctcacaggtctgttgcgtgtgcttttatttgacggattctaactgaattggtagcacatgaactccataataatgaacaggttacagcgtaagctgggatatacctttaagcagaatgatttattgcttcaggcgttaactcaccgtagtgccagcagtaagcataatgaacgtttggaatttcttggcgactcaatcctgagctttgtcattgctaacgcgctttatcaccgttttccccgggttgacgaaggcgacatgagccggatgcgcgccacattggtgcgaggtaatacactggcggaacttgccagagaatttgaactgggtgaatgtctgcgtttagggccgggcgagttaaaaagtggtggtcatcgccgtgaatctattttagcggatagcattgaagccctgattggcggtatttttttggacagcgatattcagactgttgaacaaattgtactgaattggtacgaaagtcgtctgaatgaaattagtccgggtgataaacaaaaagatcccaaaacgcgtttacaggaatatttgcaagggcgccatctgccgttgccatcatatctggttgttcaggttcgtggggaagcacacgatcaggaatttacaattcactgtcaggtcagtggatttgagcagcctgtcagaggaataggttccagccgtcgcaaggcagaacaggcggctgcggaacaagcattaaaacaactggagcttgaatgagcaaagaaaaaaactattgcggattcgttgcaatagtcggacgacccaacgtcggtaaatcgactttattgaatcagttactgggtcaaaaagtctccattacttcccgtaaacctcagacgacacgccatcgtattatggggatccatacggaaggggtttatcagactatttatgttgataccccgggccttcatgtcgaagaaaagcgagcaattaaccgcctgatgaaccgtgctgcaagcagttcaatcggtgatgtggaactggtcatttttgttgtggaaggtactcactggacaccggatgacgaaatggttgtgaataaactgcgtgacctgcgttgcccggttatgctggttatcaataaagtggacaacgttacggataaaaccattttactgccgcatatcggttttctcagccagcagatgaatttcatcgatgttgtgccgatcagcgcagaaaaaggcacaaatgttgataccatcgctaaaattgtgcgtgagcgcatgccggaagcggaacatcatttccccgaagattacattactgatcgttcacagcgtttcatggcatccgaaattatccgtgaaaaactgatgcgttttctgggtgaagaattaccttattccgttacagttgaaattgaacaatttgtcactaatgagcgtggaggttatacgatccacggcctgattctggtagagcgtgatggccagaaaaaaatggtcattggtaacaaaggcagcaaaatcaaaacaatcggaacagaagcccgtcaggatatggaaaagctgtttgatgttaaagttcatttagaactttgggtcaaagtgaaagctggctgggcggatgatgaacgtgctctgcgtagccttggctatattgacgatttataaggttaatcgtggacggctggcagagagccttcgtgcttcatgggcgcccttacagtgaaaccagtttgttactggatttttttactgaacatgaagggcgagtgcgtgttttagcaaagggagcacgtagccgccgttccaatctgaaaggttgtcttcagccttttaccccgctactggttcgctggagtgggcggggtgaaatcaaaacattacgggatgcggaacccatctcgttagctcttcctttaaccggtagcgtgttatacagcggcctgtatgttaatgaactcttatccagagtccttgaacagggaaccgcttatcctgtccttttctttgattatctccaatgcttgcaggtgttggccgcaagtgaatacacgcctgaatacgccctgcgccgttttgaattatcagtgctaaataacatggggtatggcgtggattacctccattgtgcgggcagcggtgaacctgtcacagacacaatgacataccgctatcgagaagaaaaaggatttattgccagtctggttgttgatcactacagctttactggcaatgaactaaaggcgctggctgcacgtgaatttcctgatccggctacactgaaggcggccaagcgatttactcgcattgccttacagccttatctcgggggaaaaccgttaaagagccgtgaattatttcatcaatttgtgcgcagaaatacaggtaacacgaaccaaaaaaattaagatgggatcgctctcaataatggagagtgagtacgttgttttatctaatatataattgcaggagctaaaaatggctgaggtattgttaggcatcaacattgaccatattgcaacagtacgtaatgcccgtggaacgcaatatcctgatcctgtacaggctgcatttgttgctgaacaggctggtgctgatgggataacagttcacttacgtgaagatcgtcgccacattacagacagagatgttcagttattagcaaaaaccatccagacacgtatgaatctggaaatggctgtgactgatgagatggtagaaatagcctgccaaatcaaacctgctttttgttgtttagtccctgaaaaacgtgaggaagtcacaacagaagggggattggatgtcttcgggcagaaagctcatgtcggcgcagcagttaagcgtttatcagatgcaggtattcttgtttccctgtttattgatgcagatcatcaacagattgatgctgcggctgaagtgggagcgccttatattgaaatccatactggtgcgtatgctgatgcagaaaatgatgcgcaacaggaaaaagagtttcagcgtattaaagaagctgtaacttatgccgccgctaaaggtataaaagtcaacgcaggccacgggctgacttatcacaatgtacagcgtatcgctgcattgccggaaatttatgaattgaatatcggccatgccattatcgggcgggcattattcagtggtttgtctgctgctgtttctgatatgaaaacattgttgcgtgaagcccgccgttaatggccattatcggactgggtacagatattgttgaaattctccgtatagaggagattgtcgggcgttctggcgaacgcctggcaaaacgtaaaaacttcatggcgaagcaagaatattatcgagccaactgaatgtgaaatctatgcatatcacactggcaggtgaacggtgatattggaaatttaaaaaaatattatgacctcgttctatgtggacgaggtatcagcagaaaagccattttgaataccatgaataatctgaactcagattttgtcagcatgatgtaagagcacaaatttatcccagagttgctcttctgtctctttatgctcggggtcgataataatcgtgtttgttatcgggcatacagactggcaggtaggtttttcataatgccctatgcactcagtacagcgctccggagctatttcatagatttcagcacccatcgtgatagcctgattagggcattcaggttcacacatatcacaattgatgcagcgtttggtaattagtagtgccatttcaatatattacgcaaattattattgtaaactaaagtgagacagaaaataaagtttgctatcaccgtgaagatgtggatataatatcgccactggtttggaagtacaaacctatttatgataagcaagtttcaagcagttcagcagtgagcgttatctttgatatcccttcatagcgaattccttctaatttagttcccataagtacgtataaatcaaatcaaaaatatcatcttgcctcatggcaattaataaaacaattcaaaggaattcgtatgtctaatacaatgactggcacagtaaaatggtttaacaacgataaaggcttcggttttatctctccaaaagatggcagcaaagatgtgtttgttcactattctgctatccaaagtaatagctttaaaagcttagatgaaggccaagaagtttcttttaccattgaaaatggtatgaaaggcccagctgctgccaatgtagtgatcctctaaggcaacatctattttttgcaaaacagttatgctacctattcaaataggtatacatccagataattaaatcccgcaaatacagggtttaatgaataactgtttttcacttcaaaccgtgtagcgttgatgcgcttcacggttttttgtatctgctcatttatttagtgaatttcttgtattatcagttggttacaccatcaatagtcagctttcatgccctgtaaaatatatataatgagcgctttataatactcattgtttctaagaatctattcagaatctttactaaaacttatttatccttgattatttgtggacttgataagttcacacatatcacaatagatatattgtttggtcatcagtagcgccattccgatctattatgaaaatttatgatggagtttttgtaatgaaaccaagctttttttcggagattatcttaccagataattatctcgcgctagattttttggcgtttcatcagcgggatgaaaagtgtgtttctgaaattgtgcagctggatcaggttaaaaaaggcattatctggcacggaaacccggcattactgaccatttcaatggagaaaaatagggctcaggtacagcttgatattgatggtgacagcgcatcttattccaaagatgctttgtctgttttagctaatcacatgcttggattatttcaacctgttgaaatatttgaagaaaaatatcaggaaaacccagtgattggagaactcatcacgcggcaggcgggtttgcgcatttatcaatcggcatcgccttttgaagcattgagctgggcgattataggccagcagataagtgtaagtgcagcagtttccattcgccgacgatttattcaagcttttggaattaaacatacttcaggattaatgtgccatccgactcataaagaagtcatgcaattcacggagcaggatttgtatcagtgtggtttttctatgggtaaagcgaaggcgctattgaatgtctgtcagctaatcgattctggtgaattggatttgtctattgaaactgatgaagctgaaatcagccggcttaccaaaaatcttttagcgattaagggaatcggtatctggacggtcaattataccctgctaaggggattaaattatctgaatggctctttgcatggcgatgttgctgtgaggcgtaatctccagtatttgctgaaacaggaaaacaaggtagatgctgagcaaacagagaaatggctggcaggtttttctccctggaaggctcttgttgcagctcatttatggagacaacaatctagtagtggatattaataacgaaagtttcaataccactctaatccttcataaggctttatgcgtagcgcatcaagacggcttgtcagcgatcccacatggatttcaagctgatgaccgtccggatccaacaggtagattgaatctccctcacttcggttctctttccattgttttactccagcactgagcaatttttctctgaaagcagaaaaatgctgagcttcgatattaaaggcgatatgcgtataatcctgtgctggttttgcttcgtcacgggaaagacagagccacagatctcccagagttaaataagccccattttgccagcgggcgtgtggggtaaatccaagcagattaatataaaaatcgagactatgctcgagatgagagactgccagtgtcagatggtttagccctgtcagcatagtatttgcctatttttatcttgaaataatttatttaaaacaaataattaaataatgttatgcgatcatgcaattacatcgctatgttaggaaaggatattatatctggcaagttttccttggtgtcttccttttgaaatctaataaaatgttccgaatgcttttgttaagatacccttttacccattaagaggttttggcaatgttatctttttcaccgtttgatgatttagctcagcaaattttaccagttgcaatagaaggggatgatggtgcgcacgatgtggctcatttataccgggtttggaaaaatgcccagaaaatctgtgaagctgaatgtggtaatttgaggttagtttttgcagctgttttattacatgattgtgttagtgttgagaaaaatgacccaaaccggcatttagcctcccgtatggcagcggaaaaagccactctgatattaaaagatcttggctggagtgaagaagatattgctgcggtcggccatgcaattgagacgcatagtttctctgcgggattgactccggagacactggaagctcaaattgtacaggatgctgatcggctcgattccataggtatgatgggtgttgcccgttgtttttatacagcagggcgtatgcgttcaggtttatataatgcttatgatcctttggcaaagcagcgtgaatatgatgatcgcgcttatgccgttgaccatttttataccaaattattcaagatagaagcgggttttcaaacggaaactggcaaacaaatggctcgggaaagaacaaagcgcatggaacagtttctgaatgagttctttgacgaaattcaggctgagtaaatccgtattaattaaataaatgtataattaacaggatataaccagcaagagaacatgtagtgacagaaatatatagtgatgaatactggatgcgtcaggccatggatttggccatgcaggcacaggcaaaaggggaaatccctgtaggggcactgctggtagcggataataaaattattgctgaaggttataaccatcccataacagatcatgatccaacggcccatgcagaaattattgcattacggcgtggaggcactcaattacaaaactatcgcctgctggagacaacactgtatgttactctggagccatgtatcatgtgcgcgggagcgatgatccacagccgtatacagcggctggtttacggtgcaagtgatatgaaaacgggagcagccgggtctttgatcgatatcctgcgtcatcccggaatgaaccatcggattgaaattactggtggtgtgctggagcaggaatgctccgctatgttgagtgcatttttcaaacaacgtagggagcagcataaggaattaaagcggctgaaaaagcagcagatggaagagtgataaacgtttactgtataacctgagcggacgcgggggcttctgctggaggatgagaattactggcagttgccggctcagcctgcatgtcaggagtttctgtcttgttacggttgtttctggctctcagatatccttccagactttgataataacgacgaatatttccgacgtagcggtaggcttcatagccccgagcatagccatatgtagtattggtatagtattttttctgagctaacaggggaattcgcgatttaacatccatccagagattaggatctcctttttgcatagttgttaatttgcgggcatcaagaatatgcccataccctatattataagccgccaatgcgaaccaaattctctcatcttcaggaatggtctctggcaaacgttccatcaggtaatgtaaatatgccattcctccttttacactttcttccggatcaaggcggtctttgattcctgcccattctgctgtcggacgggtcagcatcatcatgccgcgaactccggtgggggaggttgccagtggatcccagtgtgattcctgccatgcgatagctgcaactaaccgccagtccagagaaccagcgtatttttcaaaaataggctgatatgtcggcagcagtttgttgattgcacgaataaatgaaatagtatcgaagtaatcgaatgaaccaatatggctgaagtatttatcttccagccgtgaggttataccgttttcggtcagcatgttgaaaaaatccagcattgctgaatagaggctatagtcatcattacgttttaaataccaggtcagcggtttgtcttcactgacatcgaaagcgatcgccagattagggtggatccgctgttgcagggcaaggctgatagaatcactgatggtataatcaattttaccctcagaaacctgctcaagtaattcctgagaattactatgtgatgattcttcccagtttaaatccggataagatttttctttcaattgcttcagctcactgacatgggctgaacctgcactcacaaccagtgagccagtcaggtctgcaaatgagcgtggacgtaccgtacctttacgataaaccaactgctgagatacagagtaataggccgggccagttcgcgtctggttaagtctttctttattgtagataagacctgcggctaaaaaatcagctttgtcattatctaagtcgtcaaaaagctggttaatgttagaacgaaacttaatgctcagcttgacacccagataatcggcaaaccgtttggctaaatcataatcaaatcctacaggttcatttttatcattaagtgaaatcagaggggaactgatggtactaaccctaagttcgccccgcgccaagatcctgtttatctgctcctgctgtttattaggccaactgatgttgaggccaataattgtggcagacaggagtgcgataatgacgatgacaaaataatttatcttgatattgctcaaacagttatctctcgtcagtacggttaggctcagtatgaaatgtcagataatagcatggttaaatttccagtacttaggaattttgcgcaacaaaattgaagcctgcaactttattggagccgttttaaaagtccattgtatgtgttgatagatgaattaacgctcacgcaaacggtttcgtcgaggaaaacattcctctataatgtcggcgtttcccctaaggcatcagtcaggctttgcttctaagatgagagaacctattactatggaaattctgcgtggctcgcccgctttatcagcgtttcgtattactaagctccattcccagtgccaggctcaacagcttcctgtgacagaaatttatgcggaatatgtccatttcgcggaaataaatttacctcttacggcagaagaacaggaaaaattaaacagactattaaaatatggtccttctttagctgaacatgaacccaaaggtcaactatttttagtcactccccggccaggtacgatatcaccgtggtcttcaaaagcgacagagatagttcataactgtgggctgaaacagattgcccgtctggaaagagggattgcctattatatccagtgcggtgaaatgaatgatatgcagtggcaggcactgtcggcgttactgcacgatcgtatgatggaacgcgtgtttactcagtttgagcaggcggaagtgctgttttctcaccaacagccagcaccattgaaacaggttgatattctgcaatcaggacgtgcagcattggaatctgccaatattgaattggggctggcattagcggcggatgaaattgactacttgctgcgtgctttccagaaattagagcgtaatccgactgatgttgaactctacatgttcgcacaggcaaattctgaacattgccgtcacaaaattttcaatgcggattgggtgattgatggtcaggaacaggaaaaatctctgtttaagatgattaaaaatacatttgaacagacgccggatcatgttttttctgcttataaagataacgctgctgttatggaaggttctcaggcagggcgttttttccctaatcctgaaaatggggtgtacgactatcatcaggaacccgctcatatattgatgaaagttgaaacacataaccacccaacagccatttctccgtggccgggagcggcgacaggttcgggcggagaaatccgtgatgaaggtgctacaggccggggagccaaacctaaagccgggctggttggtttttctgtttctaacctgaaaattcccggatttgaacaaccgtgggaagaagagtttggtaaacccgagcgaattgtcagtgcactggatatcatgctggaaggccctttgggaggcgctgcattcaataatgaatttggccgtcctgcgttattagggtatttcagaacgtatgaagaagaagtgacatcccataacggtactgaattgcgtggttatcataagccaatcatgctggccggaggaatcggcaatattcgtgaagagcacatccagaaaggggagatctctgttggtgccaggctgattgtgctgggtggcccaagcatgaatatcggccttggtggcggagcggcttcttcaatgacatctggtcagtctgatgcagaactggattttgcctccgtgcagcgtgataacgcagaaatggaacgccgttgtcaggaggtgattgatcgctgctggcagcttggcaatgacaacccgattctgttcatccacgatgttggtgctggtgggctgtcaaatgcaatgccggaattagtcagcgacggcgggcgaggaggccgttttgaactgcgtaatatcctcaacgatgaaccgggcatgagtccattacaggtatggtgcaatgaatctcaggaacgttatgtcttagctgtagcgccggaacagcttgctctgttcgaggatatttgccagcgggaacgagcaccgtatgctgtgattggtgaagcgacagaagagcgtcatctgttgttgaatgaccgccatttcgataatcagccaattgatatgccattggatgtgcttcttggtaagacaccaaagatgctgaaaaatgtaaattcactgaaagcacaaggaaaagggttggagcgtcagggtattgatttggcagaggcggtcaaacgtgttctgcatttacccgcagtagcagagaaaactttcctgatcaccattggtgaccgctcaataaccggtatggtagcaagagaccagatggtcggcccctggcagatcccggtttcggattgtgcggtgacgacagcgagtctggatagctattatggtgaagcgatgtcgatgggggaacgtgctccagttgccctgctggactttgctgcttcggcccgtatggctgtcggagaagcactgacaaatatcgcctcagcttatgtacaggatttgaagcgagtgaagctctctgctaactggatgtcagcttcaggtcacgcaggggaagatgccggattatatgaagcagtgaaagcggttggcgaagaattatgcccggcattaggcctgactattcctgtcggcaaagattctatgtcgatgaaaacccgttggacacaagatggtgaaaagcgtgagatgacgtctccgctttcattagtcatcactgcatttgcacgggtagaagatgtgcgttataccgtgacacctgaattatcaacggatgatgataacgcattaattctgatcgatttgggattgggacaaaatgcattaggaggaacggcactggctcaggtctatcgccagcttggcgataagactgcggatattcgcagtactgaacaacttgccgatttctttaaagctattcagcaactgattgcagaacgtaaattgctggcttatcacgaccgctctgacggtggcctgctggtaacactggcagaaatggcatttgcggggcactgcggcctgcacgccaatatcagtgcttttgatgaagatattctggctgctttattcagtgaagaattatgcgcggtgattcaggttcgtgaaactgacagggaacaggttgaaaatctactggctgactatggattaggcgattgcgtacattatttaggtcaagccaaagtgggggatgattttgtcatttccagtaataatatggaagtttatcgccagaaccggagcactctgcgtttatggtgggcagaaacaacctggcagatgcagcgtcttcgtgataaccccgaatgtgcagatcaggaacaccaatcaaaacaggatttgagtgatccgggcctgaatgtgaaattaacctttgatccggcagaagacattgccgcctgttacatatccaaacaggtacgcccacgtgttgctgtgttgcgtgaacagggagtgaattcccacgtcgaaatggcggcagcgttccatcgcgctggttttgaagccgtggatgtccatatgagcgatttgctgagtggacgagtgacattggagcagttccagacactggttgcctgtggtggcttctcatatggtgatgttcttggtgctggtgaaggctgggctaaatccattctgtttaattcacgggtgcgtgatgattttgcccacttcttttcccgaccggataccctatctcttggggtatgtaatggctgccagatgatctcgaatttacacgaattgatcccgggcacagaatactggcctcgttttgtccgcaattactctgaacgttatgaagcccgttttagtctggttgaagtgacagaaagtccatcgttgtttctacagggaatggcgggttctcgcctgccaattgctgtggctcatggtgaaggtcaggtggaattcagaagtagtcaaagtctggctgaactggaaaaacatcagcaaatagccctgcgattcgtagataactatggtcagccgacagaaaattaccctgccaaccctaatggctctgttggtgggattacttctgtcaccagcctcgatggccgagttactgcaatgatgccgcaccctgaaagggtattccgtacagtgagtaactcctggcaccctgaggagtggggagaagatggcccgtggatgcgcatcttccgtaatgcccgcaagcagttaggttaataacttaattatccaattttcacttttcatcataaggctctgaatatgtatcagagcctttatttctcatgtcgttatcacagataatgttttttctgcatgtagtttttatctttttgatttatcgttttatttgcgattttttactctgactgtcaaggcatatctctatgactaaaaaaacgataaatcctgaaactgtatttaattctgttcaatatggtttcagtcaggcagtgattaaaacaggaacccgacatctatttttgtctggtcaggtagggattaataaagatgaggaaacgattccgggaggattacctgctcaaactaaacttgcgttagaaaatttgcactcagtgatccgagaagctggtggtgagttaagcgatattacaatgttgcgtatctatatcaagcagggagctgaatcgcatgaaaatcagttggtcatatcatctttattacagcagtatttcccttcagagcctcccgcttcttcttgggtcattgtaacagggttatctttacctgaatggctaatagaaattgaagctgaagccattttagattaatgcaaagatttttcataacacacgaagtgttgtgtaaatgtttttatttggttaacttacgttgttttatgagttaattaaattaatctttttaaaatggtgtctctaaaaagagacaatagtcattttggctgtctcaaaacagagacacttaatattatgatttaattaattaaattaatttaaatcatgaagtgtcataaattagcgacagaaatacataccctgcatcaaaaatacatataacaaagtataaatattaaagtgttttttatttttatataataaaatcaattaattaatagaaactttaaaagttggcacgcaatgtgcttaataaggggcagttgctcattcaattttttatgtcggcccacagagtagggtggaaaaatgccacataagcccggaatgatgccaaagtaaggtgcctaccgtccaatttatgatattcgctttcgggccttatcaagcaacgggcgacacgtggagtgaggcaccacctatatttttataggctcctcgctggcgggatagtagaaaaaatactatcccgccgtcattactgcagattcattttgcccatcgtgttgatatatccgcctgcattattcttgttcttgccagcccatttgttataacccattatttgagactatttttttctaaaactattttttctgaaaaacggcgataaaatccatcatctggctggctttctaccaccttatatcggttagcatcaacgtaattgcaggttttaagatgatttctctgaaaaaaaggcgtttatttccccgatcattgcgtcaattagttgtaatggctttctggctggtgttattaccgctattagttctggcatatcaggcatatcaaagcctagaccaactgagtactcaggcggcagaaataaaccgtacaaccttatctgacgcccggcgcagtgaagctatgattggtgtcgccctcgagatggaacgcagttatcgccagtattgtgttttgggagatgtccggctggaaaaactctatcaacgccaatatcagcagtacacaacgatgctgaataatcagatggcgatgctggccaataaagagtataaggataagtttaatcagctcctgtccgggctgaataagattacttgtcgcaacagtgtaccagaggctgctgccgctaaattacttgaacaattctcaaacgctaataatcagttagtacaggaaacacgcaatattatctttatccgcggtgagcaattacaaaaagaaattgcggataaggggcagttttttggctggcaaagtttaatcttatttctgttaagtgcgtttttaattgccctgtttacacgaatgattattgggccggtcaaaggcattgagcgtatgattaatcggttaggtgcagggcaggcacttgaaaacaagattgagtccttcaagggccccagagagttacgctcactggcattgcggattatttggctaagtgaacgcctgtcctggcttgaatcccagcgccatgagtttttacggcatatctcccacgaactgaaaacgcctcttgccagtatgcgtgaagggacggaattattagcggatgaaattgccgggccattaacgacagatcaaaaagaagtggtcaccattctggacagtagcagtaaacatttacagcaacttatcgaacaattactcgaatataatcgtaaaattgttgatgtccctgccgaacaacaggttgtgtcgttaaaagagataattgatagcgttgtcttgtcacatcaattacctgcacggacaaaaaatattcatacagaaattcagttggatgctgatgattgttgggctgaacctaaattattaatgagagttattgataatctctactccaatgcagtgcactatggcgctgaatccggtaacatttggatttccggtcggcaagtggataaaaatattcagatcgatattgccaatacgggaacacctatccctgagttagagaagagcatgattttcgaaccattttatcaaggaaaacttcagcgcaaaggtgcggtcaaaggaagtggtcttggtttgagtattgcgcaggattgtattaaacggatggggggaaaacttcatctgatagaatccgactttgctgatgtatgtttccggattgaactgccgctaaccgcagagaatgattaaataatatgcacaacaggtttactcaccactttatgatgaagacggagcagcagaatattgtgactcggacagtgaaaaaaaaagcggtaatgccgcatttatctgaacgggctgtgtcccggtgtttccgtactatgatgttactgtttgttccctatttactggcagggtgtgtttcaaattccacttctggtgagctgacaaaaatttctgaagccattatgccggagcagcgtgtcatcgattatcaccctaaagggtgtgatgtgatatggaatatcacaaaaacagctgcaatggaaaatagcctttactggctaagactgatcgactgcacggagaaactgtctccaacggaagcccgtgacaaagtcaagcagttcatggcagatgattggtcacaggttttcaaacagagtattcttatcaaccattcaataccttcagttgctgaacggcgcagtatcatagaaaacctgaatcgatatagctcacaatttccgccttcgttgcaaccattattacaactatggcgtgaccaacaatatttaaaaattagtctggcagagcaaaagtcaaaatatcagcgattacaatcagatagtgagaacaaaattgatcggctgaaagaggcacgaacccggctggaatatgaattacattcaatatcccgtaagttagaaaatctgaccgatattgaacgccagctttcatcccgcaagcaaagccagaatgtctcttcggcgtcagttgaaacagaataccctgttgatgaaagtggtaataaaatcaacgagtcccacccggaaagccattcgaaacgacttccggaaagaaaatcagaaacaaagacagaagataatttttcagaagaaaaaggagctgaagtacaatgaccgcacgcaatcctgctcatctccttctggttgatgatgatcctagcttactgaaattattgggaatgcgtctgatcagtgaaggatttcgtgtcacgacagtggaaagtgggcatgaagcactacgcatcctattaaaagaaaaagtagatttagtcatcagtgacttacgcatggatgagatggatggcatggccttatttgctgaaattcaaaaacagcatccgggtatgccggtgattattctcactgctcatggttctattcctgatgctgttgccgcaacacagcagggtgtatttagttttctgactaagcctgttgatcgtgatgcactttataaagccattgatgatgctctggaattatcaacacctgccatagatggtaaatggagtgagcaaattgtcacccgcagccctctgatgctgcgtttgctggaacaggcaaaaatggtggcgcagtctgatgtcagcgttttgattaacgggcacagcggaaccggtaaagaagtgttggctcaggctattcatcgtgcaagtccccgggcaaagaaaccctttattgcgattaactgtggtgctttacctgaacagctactggagtctgaactgttcggccatgcgaaaggcgcatttaccggagcagtcagtagccgggaagggctttttctggcggctcagggaggaacgctgtttcttgatgaaatcggcgatatgccattggcgcttcaggttaagctcttgagggtattacaggagcgtaagatccgccctctgggaagtaatcgtgatttagatattgatgtcaggattatttcggcaactcaccgggatttgccgaaggcgatgcaacgcaatgaattccgagaagatctttattaccgattgaatgtcgtcaacctgaaaatccctaccctgaatgaacgggccgaagatattcctttactggcaaaccatttgctgcgggaatcagccaaacgtcataagccttttgtgcgcagtttctccaccaatgcgatgaaatgtctgatggcagcaagctggccggggaatgttcgccagttggtcaatgttattgaacaatgcgtggcgctgacaactgccccagtgatcagtgatgccttagtcatgcaggcattagaaggtgaaaacacggcattaccgacatttgtcgaggcgcgtagccagtttgaactgaattacttacgtaaattactacaaatgactaaaggtaatgtcactcacgccgcccgtgtagcagggcgtaaccgaacagaattttataaattattggctcgccatgaactggatgccaatgattttaaggaataaccttcctgtaatttaaatcccataaataattgaaacgtttttaaagccgtattgaactgtctgaaccagacagagaagtgaataatggcccaggagagccgcattctatgagtcgtactcttaatattgcccttgcccaattaaactggctggtaggggatatcgaaggcaacagcgagcgtatgttgcatacagtacaggaacagcaggaaaaaggcgctgatctcgtcatgttctctgagttatcactgtcgggttatttcccagaggatctcctgttccgttctgatttccatcagcgttgccgcgaacagttagtacgcttacaagaggcaagctctcaggttggtattttagttggtcatccgtggcaacagaacggaaaaatatacaacgcactttcgctgttctggaaaggtgaaaccgttgcgcgttatttcaagcaacaactgcctaattatggcgtttttgatgaagaacgctatttcgatgcgggcgagcgaaattgtgttataccctttaaagggtataacttgggtttgttgatttgtgaagacctatggtttgatgctccggttgatgctttgaaacaggctggagccgatattatcctatcaatgaatgcttctccttataatcacgaaaaaccaaatatccgcagtgcgcttatcaaatcacactgccagcgtatccatttgccaatcatctatctgaatcaggttggtgggcaggatcaactgatttttgatggttgttcaaaaatctttgatatgaatggtgaaatcacacatcgcatggcagcttttgaagagcaggtcgagcagtgtcgtttgagtgatatgacaattgagccgatggcaaatcctatccctccattgccgccactggggcaaatttataaagccttagttctttctgtgcgggattatgtacagaaaaatggttttaaaggtgcgttacttggattatccggaggaattgattccggcctgacactggcgattgcggtggatgctttgggtaaagagcatgtacaggcggtgatgatgccattccgctatacctctgaaatgagtattcatgatgccagagaacaggctgaattgctcggtgttgaatttgatattgtctctatcgaaccaatgtttgacgcatttatggcgcagttggagccgatgtttgccggtacagaaaaagacacgacagaagaaaacttacaggctcgttgccgggctgtcattctgatggcaatgtcaaacaagcgccgccgtctggtactgacaaccagtaataaaagtgaatcagcggtaggttattccactttatacggtgatatggctggtggcttcaatgctttgaaagatgtgccaaaaacaatggtatttgcattgtccacatatcgtaatacattatctcctgctattcctcagcgtgttatcgatcgtccgccatctgcggaactggctcccgatcagctcgatcaggacagcctgccaccgtatgacatgctggatgctatcctcgagggatatgtagaaaaagataaatccgtggctgattttgtagcagaaggttttgacgaagcgattgtccgtaaggtgatccggttggtggacatcaatgagtataaacgtcgtcaggctccgattggcccgcgtattacacagcgtgattttggtaaagacaggcgctatccgattacgtctggtttcgggcgtaagaactggtaataacaggaatacttcatgaaaaagattgatgcaattatcaaacctttcaagctcgatgatgtgcgtgaagctctggcctttagagcaca

SEQ ID NO: 114 - DNA, 43149 bp, Xenorhabdus sp.
ctcgatcatatggcagaaactctggcctccggtgaacgtattgaagttcgcgggttcggcagcttttctcttcactaccgagctccgcgtgtgggtcgtaatccaaaaacaggtgataaagtcgaattggacggtaaatacgttcctcactttaagccaggtaaagaattacgcgaccgcgtgaatatctatggcgacagctaagataaaagttattacttaattgctacggcaccttagggtgccgttctttttattattttttgtttttgcgattattctctcatcttcttcatgtatattctttcatttgaaattaacttgcgaagtgtttctaaaataaactttatctgactggcagtattacctaccatcgaatagtcttttccgcataaatggaatttaaatgcagggacagatacggatgcagcaggctcttcagtttcttttttctccacttttttctatctggataaaaccattatctattattagcctaaatcaagcagctatagccgttgtattgggaatgctccctcttttattactgccagaattacctcaaccacgagaaatattgctcttatccgtagccgcaattgttttatggctgatttcttataaattaggccgacttatttcgctgatattatggggattactttggggatgttggaatggccaccaaattctggatcaaataacctattttagcgatgtgacaagatcagcagttattatggttgacagcgtgtcattaaacgaaacagatagagatgagaagcctcgttatagggttaggttaattgagagtgagggaaaatatatttttcctgctttatatgcctcagttttatgggacccttcaataccgcaaaatttctccacgccactttgtgcaggtcaaaagtggttggtcacaatgaaactcagagctgttcatgcccaattaaatcaaggaagttatgatagtcagcgttatgcattatcaatccgccagccgcttaatggaaaaattactaaagcaaatttattggatgatacttgtagtgtaaggcagaaattaatctatagactgatcccggaaatacgctctctgaaacatgctggtattgctcttgcacttacatttggcgaaagagcatggttggagaaacaaactcgactattattacaacaaacgggaattgcgcatttgatggcgatttctgggttacatgttgcgatagcgagtttatttggctgggcttttgccagaggaattcagttcttgcttcccgcatcgtgggttggatttcgtttcccgcttcttgtcggatggctaactgcaatgctatatggatggctttccggctgggggcttcctgctatccgggcgatgttagggttgacagtctggatttatttacgttgcaggaatcatttttgtttttcatggcagtgggttttatggagtgctgcgctgattttgctttttgatccactggcaatcctttctgacagtttttggctttcattctttgcggttgtagcactgttattctggtttcattggatgcctttgcccgaaaggatccgttatggatggcgctgggtctggttgcgtggattacatatgcaattgggaatgatgcttatgttaatgccgttacaactcttgctatttcaggggatcaatattgcatcattaatcgcaaatttatgggctgtcccgataatctcttttctgacagttccgctgattatgttgatattattgagcgttttattaccttttagccagtttattcagccatttttctggcaattggttgattacactatttcgtttgctttgatgcccttgcctgcgtttgttcattcatggactgaaacaggtcatattcctttcttcatcacttttgccggctggatgtccgttgttgtctggcgttttggctggtggaaatcatatatcgggctattatttgcttttgccggaataacgttctgttattttaagcgtgatgatgaatacctatggcgcttttccatgttggatgttggtcatggtttggctattgttattgataaaggaggaaaggcgattttattcgatacaggaaaccgctgggagacggggaatatggcggaaaaagttatccagccttacctgcgttggcatcaactaacacctgaacaaattattctgagccatgatcatctggatcatacgggaggagtggagtacctgcataaaaaaaatccggatattcatattcgcagcccttccagtaaatcagagaacttaccctgtgttcgtggtgaacaatgggtatggcatggattaactttccgggttatctggccaccggaaaaggcagaaaatgtgggtaataatcaatcttgtgttatccgcattgatgatggcaagtatagtttattattaacaggtgatttggagaaacaaggcgaatatcaattgattggacttgaaaaggaaaatcttaattcgactgtcttacaggttccccatcatgggagtaatacttcctctacagcggcatttatacgtagggtcaggcctgaatatgctttaacttccgtcgcacgctacagtccctggaaactgccttcaatgaaagtaaaagaccgctataaaaatgctggaattcaatggaatagtacggcagtttcaggccagattaccggttatgtttatcatgatcacattaaattagaaggataccgacaacagttaatgtcacggtggtatcatcagtggtttggtattcgcggtgatcatgagtagaataagccgctatttcttttggttttggtaactcaataatgaatgataaagacctttctacctggcagacctttcgccgactatggccgatcatcacaccatttaaggccggattgttagttgcggcggttgcgctagttataaatgctgccggtgatacattgatgctttctttgttaaagcctttacttgatgaaggatttggcaaggcagacatgagtgtattgaaatggatgccactggtggttatcgggctgatgcttatgcgtggcatatctgggtttgtatcaagttattgtatctcctgggtttccggtaaagttgtgatgcagatgcgccgtcgtttgttcaaccatatgatgggcatgccagtcgctttttttgaccagcaatctacggggacgctactttcccgtattacctatgattcagagcaggttgcatcttcttcctccggtgcgctggtgactgttgtcagggaaggggcatcaattatcggcctttttgcactgatgttttattacagttgggagctgtctttgatcctgattgttattgctccgattgttgcgggagttattcgtctggtttctgtacgttttcgtcgtatcagtaaaaatatgcaaaacagtatgggaatggtgacaaccagcgcagaacaaatgctgaaaggccacaaagaggttttaatctttggtggtcagaaagttgaaacacagcgctttaataaagtcagtaatcatatgcgtcagcagggaatgaaaatggtttccgctgattctgtttcagatcctattatccagcttatcgcttcatttgctctggcatttatcctgtacgctgccagctttcctgaaattatgggtgcactgactgcgggtaaaattacagttgtattctcatccatgattgctttaatgcgcccgttgaaatcactgactaacgttaatgcacaattccagcgtggtatggcagcctgccagacgttattcactattctggatatggagcaggaaaaagatgacggaaagcgtgaaattaaaaaagcgaaaggtgatcttgaattccgtgatgtgactttctgttatccaaccaaagagagtcctgctctgaaaaatatttctatggaaattccggcaggcaaaactattgctttggtcgggcgttctggctccggtaaatcaacaattgctaatctcctgacccgtttttatgacgtcagtgaagggagtatttcgctggatggtcatgatttacgtgagtatacattatcttctttacgtaatcagatagcactggtatcgcaaaacgtacatttgttcaatgataccgtggctaacaatatagcttatgccagcgaaggccagttcagccgtgaagaaattgaacgtgcggcagaaatggcttacgcaatggactttatcaagaaactggataacggccttgatactatgattggtgagaatggcgtcctgctttctggtgggcagcgccagcgcattgccattgcccgtgctttactgcgtgattctcctatcttgattttggatgaggcaacttcggcactggatacggaatctgaacgtgcgattcaggctgcactggatgaattgcagaaaaacagaacttctctggtaattgcacaccgtctttctactattgaaagtgctgatgaaattattgttattgaagatggcaatattatcgagagaggcaatcataacgttctgttggagaaaaatggcgcatatgctcagcttcatcgaatgcagtttggcctatgattgagcgcatttggtcgggtcgttcatggctctatatcctgttattaccactatcagccctttatgggctggtaagtggcctgcgtaagctgggctataagtcaggattattccgttcatggaaagcctccgttcctgttgttgtcgtcggtaatttaactgccggaggcaatggaaaaacaccggtagttatctggctggtggaacatttacagcagaaaggttatcgggtaggtgttgtttcccgtggttatggcgggaagtctgaacattaccctttgctggtaacggatgaggtaactactggtcaggcaggtgatgagccggttttaattcatcgccgcacaggtgccccagttgcagttgcgccaaaacgcattgatgcagtcaaaaaactattggagcattcttcccttgatattgttatcacagatgatggtctccagcattatgctttgcagcgtgattatgaagtcgttgtgattgatggtgctcgccgttttggtaatggctattggttaccggcagggccgatgcgggagctttcagggcgattaaataccgtaaataccattatcgttaacggtggaacagcagaaacaggcgaattaccgatgacgttaaaaggagaaattgctgttaatctcctgaccggagaaaagcgaaaaatcagcggtattcccaatgcagttgcaatggcggggattggtcatccacctcgtttttttgctgcattgcagcaatttggcgtggatttgcaggcgacacatgcatttgctgatcatcagtcttatgaaaaggtacagctattagctttaaccaatactgggcagaatttactgatgacggaaaaagatgctgtcaaatgtggccggtttgcgcaggataattggtggtatttaccggtatcagcttacttgccggaagttcagggggaaaaattgctggatgaaatttgtgccttaatccctcagccgaccaagggcagaacataacggcagttattctcggatttgtgcctattattccatgaagttcagaatattgccggtaacgccgtaacgtcaggcaaatattaaataaaacaacagagttaacggtgatacatcgcttgtggtattctgagccacattaaacttcaaaaacccgtcatttgggggatgtatggatcaccgtttactcgaaatcatcgcttgtccggtatgtcatggcaaactcagttacgataaagaaaactttgagctgatttgtaaaattgaccgtctcgcttttcctttccgtgatggtattcctgtgctgctggagcatgaagcacgtgctttaccaacagaggaaaagaaataatttatgtttacagtcattatccccgcacgttttgcttcatcccgcctgcccggaaagccgttggctgatattcatggtaagccgatgattgtgcgggttatggagcgtgctatccgttccggtgccggtcgcgtgattgtagccacagataatcaggctgtttttgatgcagtcactgctgcgggtggtgaagcctgtatgaccagtgaaaatcatcattcaggtacagagcgtctggctgaggttattgataaataccaattcgctgatgatgaaattattgtcaatgttcagggtgatgagccacttattcctgagcaaatcatcaagcaggttgctgataatctggctgggagtgatgcaggtatggcaacactcgccgttcagatccagaatgctgaagaagcatttaatccgaatgccgtaaaagtggtcatggatgcacagggttatgctctttatttttctcgtgcaactattccgtgggagcgggatcgttttatgcagtccaaagagactatcggagataatttcctgcgccatattgggatttatgcatacagagccgggtttatacgccgctatgtgcagtgggaatccagcccactggagaatatcgaaatgctcgaacaactacgagtactttggtatggggaaaaaattcatgtagcgaaggcattacaggctccgggcgctggagtcgacacaccggaagatttggaggtagtcagaaaaacttttgcagcctgatatatacttttttaacttcaagttgcaatcagcaatactatgaaaagccttatatctcccccgcttcgcggggagatataacacggatcttgaagtttgattggtataaacaataacaaaacagattcatggcaattaggcgattaagttcgcctaattttttccggctactcagcaataattcgtatcattaattcccactttcactcttttcacctttatctgtaccggaaggtttaattgcctgccagatactacccagagtttcataccatgcccgctccgtgtgagaaaaataatggggtgacggaatatatttttcccagttatacagtggcgttgttactgccagctgatttgccgggccgggaatagggtgcataccacgttgttcaaagaatttcagtgaacgggccatgtggtttgcggatgtaaccagaataaaaggttgctgaccaataaccttttcgacttcggctgcttcttcctctgtatccagcggattttttaatgctatcgtgtcagctacaggaacccccagtgattgtgctaccatagccgcgatttcagcactgctgattgaattaactcccttaccaccggtaaaaatcattttagcgccggggttaaggcgatataagcggataccttcggttactctgggcagactattgctgataaggttggcacttggtgcccattccgggttataagtgaagccgccgccaagaacaacaatgtattttaccgcaggcgcgtgtatcgcatctggctcgtaacgttgagtatattttccttcgacagggagtagtaagttatctgcaacaggctgtaaactcaataaaagcagggtcagccagcttagtgaaagaattgttttccctgttttttgccatcgggtaaaccacagcaggaataaagcgacgaaagcgattaaaatgattaaagggagcggcattaatagcgcaccaacgtatttttttagcagaaatagcatcaacaggccttaatctgattgaattatcaccgcacaggggtaaattcaagggtaaaagtagtgaatttaccgattactgtgccagaataacggtagtaaaaatagcactagacactatctctactcgatagactctataaatactcaatagatacataaagcttagtttattaatgaggcgttttttcatgcgggatcgcaatttcgatgatattgcagacaaattttcgcgtaatatttacggcaccaccaaaggtaaaatcagacaggccgttgtctggcaggatatcgaagaattgctgaatcatttgcctcaacgatctttgcgtattttggatgcagggggcggtgaagggaatatggcctgtcagctcgctgaattaggtcatcaggttatattatgtgacctttccgaagaaatgatccaacgggcaaaaagcaacgctgaagagcggggagttcttcagcagatgcagtttattcagagcccggtacaggatattcaccaacatattactcagcctgttgatctaatcctgttccatgcggtattggaatggataaccgatcaaaaagatgtgatagaaatattgggtgatattattacgcccggtggtgcactctcattaatgttttataatgctaatgggctggttatgcgcaatgccattctgggtaattttcatttagcaacgccaaatattcagcgtcgccggaaacgttccctatcgccacagaatccattaatacctgaacaggtatatcaatggctcactgaacttaatatggaaatagtgggtaaaaccggagtcagggtctttcacgactacctgcaaagccgccaattgcaaaatacagattttccggcgctgcttgagcttgaacagcgttattgtagacaagagccttatattagccttgggcgctatattcatgtgacggcacgcaagcctaccttaaagagcgaattatgagtgaatattcccagactgttcctgaacttgtgtcctgggccagaaagaatgatttttccatttcgttgccaccggaacggttggcttttttaatggcaattgccgtactgaataatgaacgtcttgatggcgaaatgagcgaaggagagctgattgatgctttccgggaagtctgtaaaggttttgagcagacttcagaagccgtggcggtcagggcaaataatgcaattaacgatatggtaaggcaaaagctacttaaccgttttaccagtgaactggcggatggtagtgctatctatcgtttgaccccattaggcattggcattagcgactactatatccgtcagcgtgaattttccacgttgcgtctttctatgcagctttccattgttgccaatgaactacatcgtgcggccgaagcggctgaagaaggtggtgatgaatttcactggcatcgcaatgtatttgctcctcttaaatattcagtggctgaaatttttgacagcattgatctgtcacagcgcatcatggatgagcagcaaaacagtgtaaaagcagatattgccgctttgctcaatcaggactggcaggctgctatagcgaattgtgagcaattattgtctgaaacctccggaactctgcgggagctccaggatactctggaggcagcgggcgacaaattacaggccaatctgctgcggatccaggatgccaacatgatgagtggcggttctgaactggtggataaactggtttttgatctacaaaataaactcgatcgcattattagctggggacagcaatccatcgatctctggatcggttacgaccgacatgttcacaagttcatccgaacagcgattgatatggataagaaccgcatttttgctcagcgtctccgccagtctatccagaattacttcgataacccgtgggtgctgaatgttgccagtgcagagcgtctgctggatatgcgtgatgaagaactgacattacgcaatgaagaagtcatgggtgaattaccaccagagatggaatacgaagaatttaatgaaattcacgagcaactggcggaaatggtagaacaggcactggcaatttaccaacaggccaaactccctctggatttgggcgctgtattgcgtgattaccttgccaaatatccacacaaacgtcattttgatgttgcacgtattctggtggatcaggcagtacgactgggcgttgcagaagcagatttctctgggttgccagcggaatggttagcgattaatgattacggagccaaggtgcaggcacatgtcatcgacacatattgaacaatttatgccagttaaactggctcaggcattatccaacacactttttccagaattagacagccagcttcgttcagggcgtcatattggaatggataatcttgataatcatgcttttctgatggattttcaggaagagctggaaacattttactcgcgttataacgtcgaattgatccgtgcaccagaaggttttttctacctgcggccgcgttcaaatacgctgatctcccgctctgttttatctgagctggacatgatggtgggtaaaattctgtgttacctctatctcagcccggagcgcttatctaatcaggggatattcacctttcaggaactacatgaagagctgttgtcactggctgatgaaaacagactgatgaaattggtgaatcagcgttcaaccggttcagatttggataaacaaaaattacaggaaaaagtacgcacttctctgaaccgcctgcgtcgtttggggatggcctatttcctacaaaatgacagcaataaatttatgattaccgaagcggtatttcgtttcggtgcagatgtacgtagcggtgatgatccacgtgaagctcagttacggatgatccgtgatggagaagcaatgccagtggagagcagtttatcgcaggaaggtaatgaacacgaagaagcaccaacggattcagcagcaggtgcggaggatgaacagtcatgattgaacgcggtaaatttcgctcactgacactcgttaactggaacggtttttttgccagaacatttgatcttgatgaactggtaacgactttatccgggggtaacggcgcaggtaaatccacaacgatggcggcatttgtcaccgcattaattccggatttaacactactgcatttccgtaatacgacggaagcaggggcaaccagtggctcccgtgataaaggtctgcacggtaaactgcgggcaggtgtctgttattctacgctggatgtggtcaattcccgccatcagagaattattgctggtgtacgcttacaacaaatcgcagggcgagaccgaaaagttgatatcaagccctttatgattcagggtgtacctgcttcaatacagccaacacaactattgactgaaaacatcaacgaacgtcaggcgcgggttctgccactgaatgaactgaaagagcgcgtcgaagaaatggatggtgttcagttcaaacaatttaattccatcactgattaccatgccctgatgtttgatttgggggtgatcccgaaacgcctacgctctgccagtgatcgcagcaagttttatcgcctgatagaagcatcgttgtacggcggtatttccagcgcgattacacgttcattgcgtgattacctattaccagaaaatagcggcgtcaggaaagcattccaggatatggaagctgctctgcgtgaaaaccgtatcacactggaagctatccgcgtcactcaatctgaccgtgacctgtttaagcacctcattaccgaagcgacagcttatgtttctgctgactatatgcgccatgccaatgaacgtcgtgttcatctggatgaagcgctggctttgcgcagtgaattgtttggcagtcggcggcagttagtgacggaacaataccgtcatgtagaaatggcgcgggagctgacagaacaaagtggcgcatcttctgatctggaaatggattatcaggcagccagcgatcatttgaatctggttcagacagccatgcgtcagcaggaaaaaattgatcgttatcaggctgatatcgaagagctgacttatcgactggaagaacagactgaagtcgttgaagaagcgaaagagatgcaggcggaatatgaagttgcttctgaggccgcagagcaggaagttgatgaattaaaaagccagcttgctgattatcagcaggcactggatgttcagcagacccgtgctattcagtatcaacaggcactgcaagcgctggagcgagctcgtgagctttgccagcttcctgaattatcggcagagaatgctgatgaatggcaggagacttatcaggccaaagaacaacaggcaaccgaaatcctgttagcactggaacaaaaactcagtgtggctgatgctgctcatagtcagtttgagcaggcttatcagttggtgaaaaatattgttggtgaagtcagccgtagtgaagcatggcacagtgcccgtgaagtattgcgtgaatggtcatctcaacgccatctgtcagagcgtgttcaaccgcttcgtattcagttggctgagctggaacagcgtcttaacagccagcaaaatgcagaacgcatgctggaagaattctgtaagcgttatcagcagcaatatcagccagaagatttggaaatgttgcagggtgagttagaagctcagctggaagaattaagcctgactgctaatgaaagcggtgaatctcgcatgcaggtgcgtcaggaactcgaacaactcaaacagaaaatacaggcgctgactgcccgtgctccagtctggctggcggcacaggaaacactggaccagctttgcgagcagagtggtgaaaatttcgaaaacagcaatgatgtcacggaatatatgcagcaattgctggagcaggaacgtgaaatcactgttgaacgtgataatgtttcgacacagaaacgtgaactggaaaaacagattgaacggctgagccaaccaagtggtgcggaagacagccgtttactggctctggcggagcgtttcggtggtgttttgttgtcagaaatttatgacgacatcaccattgatgatgcaccttatttctctgcgctctatggctcagcacgtcatgcgattgttgtcccggatctttccttggtacgcccacatctggaagcattggaggattgcccggaagatctctacctgatcgaaggagatccacaatcgtttgatgacagcgtgtttgattttgaagagcaggaaaatgctgttctggttaaatcttctgatcgtcagtggcgttattctcgctatcctgaagtccctctattcggacgggcggcaagggaaaatcgtctggaagcgctcagtctggagcgtgatacgctggcagagcgctatgcaacactttcatttgatgtgcagaaaatccagcgtgcacatcaggctttcagccgttttgtcggtaaacacttgtcggtggcatttgatagcgatccggaactggaaatccgtactctgaatcatcggagaacagagctggagcgagaactgtcacaatttgagtcccacacacaacagaatcaacaaaaactggctcaggtaaaagagagcctgtctgtactcaatcggttgatcccacaaattacgattttgctggatgaagccctgattgatcgggtggaagctgtacgtgaagaaatgagtgaagcacaggatgcggctcgtttcctgcaacagcacggcaataccctgcataaacttgaaccgatagtatccgttttacaaagtgatcctcgccagcatgagcaattgcagcgggattatgaaatggcgaaacacagtcaaatcaaagccaaacaacaggcttttgccctgactgaagttgtacagcgcagcgtgcatttcagttacagcgattcagccggaatgctcagtgaaaatagtgacctgaacgataaattgcgtcagcgccttgaacacgcggaatctgaccgcagacgcgctcgtgaacaacttcgccagcagcaatcacaaagcgctcagttcagtcaggtactggcttccctgaagagttcttatgacaccaagcaggatatgttgaaagaacttgaacaggagatgaaagatatcggtgtacaggctgacgctaatgcggaaaatcgtgcccgtgaacgccgtgatcagcttcatgccgcagtacaggccaatcgttcccgagtcaatcagcttgagaagcagatcgcattctgtgaggcggaaatggaaaacctccagaaaaaactgcgcaaatcagaacgtgattattatcagaaacgtgagcaggtcgtatcctctaaagcaggttggtgtgcagtgatgcggatggtgaaagataatggcgttgaacgccgtcttcatcgccgtgaactggcttacatggatgctgatgcactacgttcaatgtcggataaggcgctgggtgcactgcgtcttgccgtagcagataatgaacatttacgtgatgcgttgcgtttgtctgaagatccaaaacgtcctgagcgtaagatacagttctttgtagctgtttatcagcatctgcgtgagcggatccggcaggatattattcgtactgatgatccggttgatgcgattgagcagatggaaatcgagctagcgcgtttaactgaagagttaacggcacgtgagcaaaaactggcgatcagttctaagagcgtggctaatatcatccgtaagactatccagcgtgaacagaaccgtatcagaatgctgaatcagggattacaaatggtttccttcggtcaggtcggtggtgtacgcctgaatgtgaatatacgtgaaagccacgctgttttactggatgtgctgtctgaacagcaggaacaacatcaggatctgtttaatagccagcgcctgaccttctcagaagcaatggccaaactttatcagcgcttaaatccacaaattgatatggggcagcgtttacctcagacaattggtgaagaattactggattatcgtaattaccttgaattagacgttgaggtgaatcgtggctcagatggctggctaaaagcggaaagtggagcgctttccaccggtgaggccattggtacagggatgtcgattctggttatggttgtgcagagctgggaagaggaatctcgtcgtctgcgtggcaaagatatttccccatgtcgtttgttattccttgatgaggcagctcgtctggatgcgaagtctatcgccacactgtttgagttatgtgaacgtttacagatgcagctgattattgccgcaccggaaaatatcagtccggagaaaggaactacgtataaattagtacgtaagatctttaataatcaggaacatgtgcatgttgttggtttacgtggctttgggcaggaaactccggctattgaacagcggcaggaacaggctcaggcgatattctgaaaataatttctctctgagtgagtaagttaaagccgtcattgattatatgacggctttttaatttatgaagataataatcacgttttgaaatatgtgcattgaatctcattttcttgcaattagagtgcttatcattccctcccattgtgatcaggatgagaagaaggaaaaactatgcgtaaagtagtgttagcattgagtgcaactgcccttgctgttggcctaagtagtactgctcaggcaaaagtacaagtgccggaacaagtcagctcaggggtcactacagtagagctttcccaacgtcaggcggtacactgggtttcagtggagcagattgaaaaaagtttgcaaagtaaaccccccatgtctgtgggattcgatatagatgataccgtactgttttccagccccggcttttatcgaggtcaactggaatattcgccgaatgacaatagctacctgaaaaacccggaattctgggagaaaatgaacaacgaatgggataaattcagtatgccgaaacaggttggcatcgatttggttcatatgcacctgaaacgcggtgatgatatttatttcattactggccgtaccagaactaaaacagaaacagtgactaaatatttacaggaagaccttcatatccctgccgataaaatgaatgctgttatctttgcaggagatgatcccggtaaaaataataaaatcagttggatgagagatcataacctgaaaatctattatggcgatgctgatgctgatattgccgcagcccgtgaattaaatattcgtggtattcgtatcttgagagcatcaaattcctcctatcagcctttacctaaagcaggaaaatttggagaagaagtcgttattaactcagaatattaatttaaacatttatcatgtttatttattattaaaggcactttgagtgccttttcttttttatcactaatataagttaatttattataacaataattttcttttagttcatgtaattggatataattggggggctttctgtcttaataagtaattatgtatataattaatactattctcttctgataacattggtctgccgataattagaataagtcattggatagccaaatatacccagtaaatttcatgtatggtttcatggctgataaatacagtcggtaaacttgtcactatgaaaaaggagtatacgtaaaagcgaggtgaactcttatggcaaagaatacggtaaggttactaaaagtttcttttatctgtagcattttagtagtatcagagggagcctttgcaagtcaacaaaacgtattgatagcaaatgatgcccagccattatcatggggggaaaaaaaagtagatactgatatcaactctactcaaatggctcctgtatctttatcaggttctccggaagaaaataaagttcagttacaagaattattacctaaacaagtaaagccgatatattatcaacagtatcacgattatattcactaaataatatgaaaccgttatggcgggatgaaactgccatacaaaattttaaagatcacattgcttgattcggcgttagccgggtttcatcctctatttggtaaatggatgatacaacttaattcacccgaattaaatgaaatggggagggatattattctatctgatgctatgttaggttatcttcactatattaataccattcataataaaggggattcatggttatatggtaaaactccatataaaatcgatttacccccgaatagtttaattgaaaagtggcaacagcacgttaagaataataatctcagcaattacatttcgtcattatcacctaaccattctatgtacgaaccgatgcgtaatgagatgctaaaacaattgaaggacaaacaaccgtggtctgaattttcaatgaaagaaacattaaggcccgggcaaagtagccagagtgttattgcgctgagaaatatattggtccgttcaggtactctagaattttcagtagttagccctgagaataaattttataacaaagagctagttgcagcagtaaagcgttttcagtctttacacggtttagctgctgatggagtcatcgggcaatcaacaagaatatggttaaataccaccccgaaaacccgcgcaaggatcatggcattgaatatgcaacggttgcgtatcattcctgataaccttcctaccgcaattttagtgaatatacctgattattcactattttattatttgaatggcgaagaagcattaagttctaaagttgttgttgggcgtccaagccgaaaaacgccaattatgagtagtgaactgaataatgtagtgattaatcctccctggacggttcctgttagcatgacccgcaaagatatagcaccgagagccatgcgtgatcccagttattttcgcagccgtggttatacagtgttttccagttggagcagtgatgcagccgttgtcgacccttcatcaattaactggggagtcataactcccggtaatttcccttaccggatacggcaggcacctggcccaacaaactcattaggtagattcaagtttaatatgcctaattcggaagcaatatatttgcatgatacaccaaatcaggcttcatttaagcgtgaaatgagagctgtcagttcaggttgtgtccgtgttaataaagcacctgaattagccaatatgttgttaggggatgctggctggaataaaggaaaagtcaataattctttgaaaacgtgggcaacaaaatatgtgaatataccgaaaagaattccggtattcctttattaccagacagcctgggttgatgaaaaaggaaaactacaatatcgtgctgatatttatgaatatgatagccatgccagacaaaaatctgaacttatatctcaggttttggtagccagataatactcttatttttgttaaattataaatggaaaaagttaataatatattttagcagtgaggaatattctcactgctattttttttacctgccatctctcccacactttaattttttattttaattattgcacatttactaaattaatagcttgcattaaccaaatataaatatttaaattcagtttaataaaaactgtattcagtaaatcagaataaaaacatcagctaaaaaatttacattaatgtacaaaaatagtaaaagctacttttttgttcgttgcggttttgttaattgattggtgttaactgttaatatatttttgaaactatctaagaatcagagaaagcagtagagcacaatatatgaataatattgatcataaccgccgtaagtggctcggcgtaagtatggttgcattagggttaggtttattgccccaacatgcactagccacactgacaacaccacgccccaggatcctgcgggtagataatctccataccggagaaacaattaaagccgagttctttgatgggcgtcattataataaatctgaacttattagactgaattatttattccgtgattatcgccaaaatgaaacaaagaaaattgatccaaaattatttgatcaaatttatctgttacaaatgatgatgggaacaaataaaccagttcagttagtttcaggatatcgttcattaaagacgaataatatgttgcgtcatgcaagttcaggcgtggcaaaacatagttatcatacccgcggtcaggcaatggatttccatattgatggcatggagttatcacatatccgtaaagctgcattgaaaatgaaagctggtggagtagggttttacccaaaaagtaattttattcatattgatacaggcccggtcaggacgtggtaatcttattatatctttcatatttcaagtggactgtaaaatggcttgaaagatgacgaatatattaagaatttgtcctgattgtggagtgtaaacaatacaatgaaataccacataatgcctgtcaccgttgcgatgcagaattgtacgttgatctggtgcgatgaaacgctggaagctgcaattgttgatccgggaggtgaagctgaaaaactgatcgctgagatcgagaggcggggagtaaagttaacccaggttttgctgacacatggtcattttgatcatgttggtgcaaccgttgatatcgctaaacattttaatataccggtgcatgggccgcataaaggtgacgctttctggatagaagcgttagaggttcaatgccagatgtttggcgttgaagaatgcccatcttttacccctgaacgttggctggatgatggggatacggtaaaagtcggtaatattcagctttctgtcttgcattgtccgggacatactccgggacatattatttttgccaatcatgctgataaattgatttcgatgggagatgtgctgtttaaaggtagtattggcagaacagattttccgggtgggaatcatgatgaattgatccaatccatcaaagaaaaagttctggctttgggggatgattatcaatttattccgggccatggcccaatgtcaacgttggggcatgaacggaaaacgaatccattcttacaaaactaaccaataattgtttgattcagcattgctgagttttacagatagttggaatcataaccacccgtataacgggtggtttgctcttgccctataagggcttgttaccgactgcgcctaaatgacgctgctttctcttcgttcaagctaagtgtctttgctgctttggcctaccccttgaaggggtctacatgctctttactactcaatttatccgagattaaatccgacttttcttgctctctgatatacttttgaattgtcgcttcatttagccctaccgtactgacatagaacccttccgcccaaaactttctgttgccaaatttatattttaaattggcgtgtctatcaaagatcatcaacgaacttttacccttcaaatatcccataaagcttgaaacgcttagctttggtggaatactcaccaacatatgaacatgatctggcatgagatgaccttcgattatttccacacctttatacttacaaaggtctctgaggatctctcccacacttgaacgaatattattaaaaatcactttccgtctatatttcgacgaaaagacgatatggtatttacacagccactttgtatgcgctgagctttgtgctttaatgcccataaacacctttcataatttgagttgcgaatattagcttgtacatctatatcgtaacggaaaggtgttttttttggtataacgtttgaactccacccgcaaagcgggtggttttatgtttaaaacgctaacgcgacttaatctggctaaagccataagttaaaaaataagggtgggcattcaaatgcccacccttatttattttagctatttttcaaaatcactcagatagtgtgttagtcaggcataaggccgtgtactaaaatcaccccaatacataacggcccgacatatctccatataaacagtaaacactggcggctccgcgatggcatattctcaggtattaaagcattagccttatgtgaccagccaaatacgagacaaatgataattccgaacaatggcatcagaacattggaagtaatgaaatccagcatgtcaaagatggtttttccacctaatgtaacgtgacttagcgggccaaaagataaggaaacagggatccccattaacataatcgatgccgtaacaactaagcttgctttacggcgccgccatttaaaacgactctgaacataagcaacaatgtgctcaagtaatgaaattgctgaggtcagcgcggccatcagtaataacaaaaagaacgtgactgctaagattgaaccaccgggcagactcgcaaaataaattggcattgtcatgaacgttaagccggggcctgcattgggttgtaaaccagctgcagccaaagcaggaaaaatcatcagaccagccagtacacagaccaagcaggagaggattaccacccagatactcgacctacaaatacctttgttactcggtaagtaggaactataagtaatgtggatacccaaaccgatagaaagtgaaaagaatgccagccctaatgcatctaaaataccttttccagtcaagttattgaagtctgggtataaaaataattttagaccttctgatgagccgggtaagcggataccgacaataatcagcattatcatgatcaggaataacattggcatcatgaccttaactgctttttccaaacctttttgcacaccagatagcacgacgtaacaagttagccctgaaaatgccagatgtgcaattatcggccaccagggatcactaatgaaattgttgaaaatagatgtcagctgagaggtatctgtaatatttaactggcctgtgcccgccatcaccgtataaccgatggtccagccaccaacaacactgtagaaactatagatacaccatgaactcagtacacctataaagccaacccatccccagtgtttaccgagtaattttttaaacgcattaacagccacttcacttgtactactgcccagtatgttttcagctagcagaacggctaacccaatcacaaaactaaacaataaaaatacaatcagaaatgcaccaccaccatttgtggctgaaacataagagaatttccaaatggcaccaatgccaacggcagatccggttgctgctaatatatgtcccaaacgggaagtccattgttgactcatgctaacccccaaacagatacagtgccagcacatgtatccagttccacagcagtcagcaaaagagccgcatcagcgttccaaacatgttcacctgcctgcaggttaaccatagacggggaaatcgtatattctgccccgcgggatggggcaaaggtcataaaaccgaatgcccaaatatctttagatgataaacagtatgtcataataattgttaacttattgttttaaatacaattacagataagatagtaaccaatgcagttaattgagttccactcacgaaactggatcctgacccaacaatcagtggtagcatcatattcactaatccccgcaagatacaaaatgatagcgataaaaacagccacaatcgccaataactacctctagataaggtgccacttatccaaacagcgtttaagtgtctccattatctcgtcgatattattgtgtaatgagtctgttagtatctcatttatgttctgaatcatcttgacccagaatagatatgacggagcagtggattatcgtagataatgccacgatatactgttgggtgctacgtttagtgttttcactcaatctaatgagtcttacgctcgttgccatcaattaaagtagtcaaactccaccacgttcagcttacctaatgtcagaagtcatcagaagaaagcatcgcaatctggtaaaacaactatctatatattacttaaatacctaaatatatataatttttcgttagtaccaaaaagatgatatttatgctcacattaatattaaaaaatattgactcaagaaatataatctgtgcacacgtataaatgtaccggtatagttactctgattgaacaagctcatcgccctatcaaatccgctcaaaaccaccttgactaacacgctattaatgcgatatccataatggatttcaagatgcatcgcggcggcaagagagagacaaattcgtcgggaacgaatctgcccagccaaaggctagcctccggtgagaggcaggagcctctcagtaatccccaggagcatagataactatgtgactggggtgagtgagcgcagccaacaaagaagcaacttgaaagacgaagtgtataaaacttaaaattgtcaattcatttttatatcccactatattttatgggtgcttaattttttatattgaacccatgaatgatttccctgcttagaaaaatcattaacatcaattactccataatggtattcaggcccaactttacactcaccagacaaatttcagaaaactcgccagtaattacctttctttctagcttcttatttacattatcttggagatttataatatcgcttatcaagttaagcaaaattatatttatcactcaataacccaattctttttgagaatataatagataactcataaaggtaaaaagcggcactaacttgtgccgcttatcgtttctaaaaataaaattaacgagtaataatcgcttttatttctgctatacctcatgctttgggatttttctttcagccacaataaggtcataaatagcaaatatacccaccgacgacaaagtcggaattagccatgccagtccttggtcagccagagggagatgtgtcgcccattctggtaaaaaatgaacaaggtaatttgaagccttagctgcatccagcaccccaaacatcagactcaccagcatagccggagccagtatccgggaaaagttattccacaacccactggtgaaactcaatagtactagcacaatacaaggtggataaattgctgtaagtaccggaattgaaaacgtaatcagatggctcagccccaaattggaaaccagcatggagaaaaaagccaataataaaaccattgcacgatacgacaatggcagataacgactaaagaactcggcacaggagcaagttaagccaattgcagtcgtcatacaggccataaagatcagtaccgcaaggagaaaactgccatagttgccaaaagtattctgaacataagcgtgtaagatcactgcaccattctcagcattaggtactaatgcaccgctaccttcacctaatttgaaaaaagagaggtaagccagcgtaagaaaaagccctgcgattaagcctgcatatatggtgtagcgagtcagtaatgcagaagactccactcctctggaacgcacagtattaacaatcacaataccaaaaaccattgcccccagagtatccatagtcaggtaaccattcacaaaaccatttgagaatggcatttcctgataaacatcagtcgccggaattggattacctgccggccacaatataactgcaatccccagaataactaatgcagacatcttaataggcgctagtatacgaccaacattatccaataatttacccggataaagtgatatcaggatcatcaacaggaaatagatgacgctgtaaatgaaaagcggaagtttgcctcctccggttattggcgcaataccgacttcaaaagaaaccgttgccgttctcggtgttgcaaacagtgggccaaccgccagataacagacagtagccaatatcaaacccgcggttttccccataggagaactcagcgcttcaataccgcccccgactttagccagagcaataacagtgataacagggaggccaacagcggtcagcaaaaaaccagcagctgcaatccaaacattctctccggcctgtaagccaaccataggcggaaagataatatttcccgctccgacgaataaggcaaaggtcataaaacctaatgccaaaatatctttagatgataaacgatgtgccatagtgattgataatatattattgtttaaaattacatatgaaatgataagtgctataaacgcggttacgaaatgtaaataaaaaaaccgcaataagcaccgaatttttcattggtaaactgaatttttactttaattctgagagaagcttatgctcagtgataagcacatgctacccaatcagagtaacaaccagaatcgccaacaaacaagtataagtaaagcgtttatatcgcaaaaaggcaagcagcaaaccaaaaagcagaataatattccaaattaaatttcaaacatggtggttactcttatctataattgaatgcttaatatatgattttcattttcccattattttttactaataagtctgaatttaaaaaaacactttctaataatgattaaattcatcagagtttttttcattatgaataaaattcggttttatatttactgataggcacaattattttagtgaaaaaatgaacaacaaaaacaccacagcataaatccatgctgtggtgtttcattttcttattactacaaaaacatcaaaatataataatcagctttgtccctgctggatttcatgctttgggagtttggcttctcccgcaatgcgatcataaagagcaaatacaaccactgacagcagagttggtattaaccatgccagacctttatctgctaaaggcagatgagtggcccactctggcagcaaatgtgacaggtaatgagatgattttatcgcatccaaaatcccaaacatcaggcttaccagcatagcaggggccagaatacgggtaaaattatgccaccagcggttagtaaaactcagcaatatcagcgcaatacaaggcggataaattgctgtaagtaccggaattgaaaacgtaatcagatgactcagccccagattggaaaccaacatggaaaagagccccaaaagtaagaccagagtgcgataagaaagtgacagataacggctgaaaaattctgcacaggcacaagttaagcctattgcagttaccatacaagcaataaagatcagtatcgcaaggaagaaactaccatagttaccaaaaacattctgaacataggcatgcagaatagccgcgccattgtcagctgttggtactaaatcgccactgccctctcccagtttgaataaagaaaggtaaaccagcgtcagacaaagccctgcgatcaaacctgcccacatcgtataacgtgtcagtaatgaagatgattccacccctctagagcgtgcagcattgacaataacaataccaaataccatcgccgccagagtatccattgtcagatagccattcacaaagccatttgaaaacggaatctcctgataagtctcaatggcaggaatagggtgccctgcaggccatagtacagcagcccctccaagaatcaccaatgccgctattttgattggtgccagcacatgcccgacgctatccagtaatttgcccggatatagcgaaaccaaaatcaccagcaaaaaataaatgacgctatagataaaaagtggaaggtcgcctgaacctgttaacggagcaatacctacttcaaaagaaactgttgctgtcctcggcgttgcgaataacggaccaacagccaaatagcagatcgttgccagtattaaacccgctgttttaccgataggtgaactcagcgcttcaataccgccaccgactttcgccagggcaataacagtaataacaggcaaacctacagccgtaagcaaaaaaccagcagcagcgacccaaacatgttcacccgcctgtaagccaaccataggtgggaaaatgatatttcccgcaccaacaaacagggcaaaggtcataaagcctaatgcccaaatatccttagatgataaacgatgtgtcataatgattgttacattattgttgctaaaagaattgcatatacaataggaaatattgcaagcacttgaattttcactggcgaaactggatcctgatgaaacagtcagtgattagtatcatatttactgatacttgtaagatacaaaatgatagtggtaataacaggtagaatcgccaacaactgcccacaagtaaaacttttatagcgttaaaaggcaagcaacaaaccgaaaagcagagcaatattccaaactaatttcaaaattagtgattattatcatctatcattgattacaccctatatgatttgcactttttttgcccacattggctaataaatcatttttttgcctgtattattaccatttaattttatttttccatataaaaggttaaaaccaccgactttagtcggtcagctttagctgcgatactgtgttgcacgagaggtgcaatatggattacagatatggcagccacacggtatttcagattgagtatcattttgtgtgggtaacaaaatacaggcacaaagtgctaacaggtgaagttggtttacgggtgagagagttagttcgtcagacctgtgaagcgttcgaaatcaggatagtagaaggggtcgtgagcaaagaccatgtacatatactggtgagttgtcctccgagcttagcgccctcagaaatcatgaggcgaataaagggaaggacagcaagtaagttgtttgaagagtttgctcacttgaaaaagcgttactggggtcagcatttttggggcagaggctatttttgtgcgacggtaggtcagttaacggaagagatgataaaggcctatctggcgcatcattttgaaccgaacccgaatgatcacttcaggctggataattgacgcatcgtttagccgatgcgtatccggactttcagtccgttaatcactaacccaccgactttagtcggtggttgttgagtgaccggcattttgagggtaacaggcgcataacggagctcacagacggcttcacgtgccttacgcccacctcgctgcttaacctgaactgttcttttatctgccggctgtaaagattcactgaactgataaagcttatccgggctttgttcaatgcaacgactttgcattgaacgtacaataaaacgctgttgatgtgtgatcttatcagggtgcgagcatacttttttagcatttcttgaatgaaggcaaatgacatgatctaatgagatttattttccttctcattgctgacctatgactctgattgaacacttatccgttgtgaaagaaacccgctctgatattaatcgccaatacgatctggttgatattattttcctctttgtcagtgccattatggcgggagctgaaggctggcaagacattgtgacttatggccaagccaaaattaagtggttaaaggaataccggactttttcccatggaataccctgtcgacataccattgcaagaatactgcgggctatcgagttggattctttactggaagcgttactgaattgggttaatgaacagcgtgaactgggcggtaaacccgtcatgtctttatatggacgggaagcccgttgcgctttcttgccatactgactcagcgctcttatccagcgcgtttgttcaatcaggccaatgagccgttcttctttgggagcaaaaagtaaaacagaatgggcatgcagaccggtggcactttttcgggatgtggtatagcccatttctttccggacggtctgatgagtaaattccagtgaggtcgtatcttccaatgccagcaaacagtcataggatttggcgtgttcagccgtcgccgcaaatccggcctcggcaatagcggtggcgttaatggcctgattacgcgtaaatcgataagcggcttcaatatccgcgggagttttgagtgattgcacaatagattgcccgatatgattggctaacgagacggtgaatttgataagctgttttgtacgccgactatcgcccaaatttgcgcgagaaaaagtttcatcagcccattgttctgcgtgagtttggaacattttaccgtacctccatgaaatcgttattactcagatcggtaaagtggaaaaagattcaaaaaaatcccccgattttttatcaggggatttgtgtatgaaagacaagactgagatggggtgttggggattgacgaaatgagattgtttttccatgtaatttatgatgttacctacaatgtcaatgctggctatctctacaatcccgctgtccatgttgcaggtttcggtgtctactactctgtaaattgtcaaaattaatctcctgtccagataccaccattatggcggcgaggtgattcaccccgatagtgatcgtgctctttactattctttgaccagtactctcgccacccctgacgtatctcttcgtcacgctgttcttgcatatgctgaggtaggggcgggttaaatgaagatttatagttaatattgaatagtcgctctgctaagacacgctccttagcactcatgattgcgggatgtggcgttttattactgattgccgcgaccagttcattcagatactgttctcgctccttcgggtcttttggcacaaaacagccgggcgatctgcggggataagtgttcatctgaaatcccccctaaattccatatcactggctggtaatccttctctacctaatacctccttttgatattgcagccagttatgttcggcgatttgtttttccgtatatttctgttgctgagatttattattgggattggtgtgagtgttgtaatcgaaatttctcatgctgctatgctgcatttcaggcgttctgtattccaaccgaagaaacagccattgatgctgacgcagaaatccatcatgtggcatctaaaggagccgatgaaattttgcgggattttactgaatatgcaactcatgaaagcagcagagaaaaactacagcaacaatattccgatacatggaaatcactggaaggacacccagatttgcaagaaaaatgtaaggaagtgaccgggattagatttaaagaactgaaacaggcggcataaatggcacagcgtggagttaataaagttattcttgtcggaaaattaggtcaagatcctgaagtacgttattcgccaaacggtggcgcagtaacaaatatcactttagccacctctgaaacatggcgggataagcaatccggggaaatgagggaaataacggaatggcacagggttgtgatattcgggaaactcgccgaaattgccggtgaatatctgaaaaaaggcagtcaggtttacattgaaggccagttacagacacggaagtggcaagaccaacaagggcaggatcgctattctactgaggtggtggtaaatatcggtggaacgatgcagatgctaggagccagacaggaaagccagcagccaccacagcagcacacaagacagcaacaacaatctcagggatgggggaaaccacaacagccacaatcagcaccaccaatggattttgatgatgacgcgatcccattttaggagataaaggtggataagatacaagcttgtataacaagttactccaaacacaaaaatcttaagttggtaggcatagagttaggcgttccatgacagaatgtatactcaatactaagaaaagccaatcatccagttactggcgataaagcgcgatatggctcagtgactgatagagtggctaccattggtgaacggcgatttaaagaatcggtccctatagctatcgataataataatctcaaatttcaatcaactgtagatttttcaataggtgatataactatcgatataaaaacagcaaggataaaaagataccaaagaggaaaaggaataagaaattcagctcccagatggggattttgtataaatagacagcttgatgtagcagatttttttgtattttatgctttgggtgacaatgaagataccaagcatatatttttaataccaagcgaaattgtcacaacaaagaaaacaatatctattcctgaaactctagccagcaaatgggctgattaccaaattaaagaatgcgaattattgccattcttcgaatctcttctcaataccaagtaataacatctaaccctacaccctatcactactctgctgcagggcgcgagcacactatttttactgctttttaaagattaataattttcaatatgtcatttttgtggttttatatcgggtaataattgatctaaatcatggttctttagacatttatagttaacaaaagagttaaaaaataatattgacattttaagtacaaatattaatcaaagtatgctcgcgccctgggaggcggcaagggattgcctcaaataatgcccccaaatttatcccattcaaccacataaaatagctctaaaccagtgctggtttactatgtgaaggttattcaaaaggaaatgaaatgaacacggtattcttgttaatggctgaattcgaaacagctaccattccacttgcggatattgctgaaagatatcttggcatgaaaccagctactgcagaacaaaaagcctcactgggtttgttgccattaccaacctttagatgtaatgatagtcaaaaatcaccacgtatggttcatgttgaagatctggctaatctaatagataggaagagaaaagaatcaaaagataagattgattatttagcgcaaaaaacaaacaaaaaaacaaagggtacaccaatagtacaccacaagaattcaactcattgatttttatataatgtacatcctatccagcatcggcgcaacggagaagcgggaaggtttgaattttcctgaatttccctttgttatactgcttactacaggtttttctgtttttctattttcgtgcattttaatacgttttaggctattttcggtttatcggtacaccatccagtacaccacactcaatggtgtactggtgcctgagaggtaaatcatggcctattataacatagtgaagcgccctcgcgctgatggcactattagatacgcaccagaaagggggagcataattctgcatttaacaactggagccaattctcaatactgggtgctaacactttcatggatgcaaatggaaatttcaaattatcttcaaccataatcaatctttggagtgatggaaaatttgaaacaaatgacgagtctaaagatgcaacagcagaacgtatttctaaaggcatatatcttatcaaaggtgttacagggttaaacatcgatggtgcatggggcggtattgagaatggaattgaaataccattatgtaaaaataaactcccgttaatctgggtcaaccatgaagttctactcgatggttccataaaattaatgacctaccaccgtgaacactcagacgcccccgcattcgccagaaatatacgtgaaggttatgctgacggtgatttaatcgatattcccgatggtagatttgtttctgttcgggtgcaaatgcctgacactatagataaagaatcatagacctaattttttcaggatggttattactaatttctataccgatccatatccagaaattatttatctgttgaattaacgaaaagtgtttttcttgtaagtaataaacaaaaactaacattattaaatcagaggataaaattatggggcctatagacggtacttacgtgagtcacgacgaaagtttttcactcattatcaacaatagtaatgacagtccgggaatattcgatggtatttttaaatcccatgatatctctataggtaatctcatctataatgatatcgtcggagaatacaggtatgtcattcatcaaactgctttccagattggtttttattcaatcatacgttctgaatcagctgaatatattataactgatcattggaatggcgttaggaaaagtgataaaagcttatttatgagcggattacgcacatatgtgacaagcgcaggtttatacgatatacaccattttgaaaagattattctcaagatgacttaattaaccccaattctggataagaaattgacgagaagcctgttcaaggagcagtgttttggtgcaagtcgaaacagctccggggaggaacaggctatgaacaacttagttgaaactttcatcgatgtcgatgacttttgtcgttttttcattccacaatgggaacagttttgtctcaataagggatatcgcctacgtcgtagaaaaggtcacatgtatcccagtgaaatcatgaccatcctgatcctctttcatctgtcgcattatcgtgattttaaaaatttttatctggagcatatttggcgatatcatcatcacgattttcccaccttgctcagttatactcgttttatcagtgtcgcgccttccgttttagtgcctctgtgcagctatctgactcaattaaaaggaaaccctacggggatcgcctttattgactccacgcgtttgagcgtgtgccataatatccgtattccccgccataaggtatttgaagggacagcacagcgaggaaaaacctcaatggggtggttttacggtttcaaattacacctgattattaaccatcttggcgaaattctggccctcaaaatcacggctggaaatacggatgacaggaaagtggttcgggaattagcaaaagaattaatcggttccttgtatggcgacaaaggttatcttagtcaggaactggcaaacgatttagcacaaaacggtgtcactttcatcacgaaaaagcggagtaatattaaagcgagtgtgctggaagattgggataagataatgttatcaaggcgttttattatcgagacggttaatgggcaattgaaatatatctgtcaaatagaacattctcgtcatcgaagtataaaagggtttctgttgactgttttaacggggttaattgcttattgtcataaaaagaagaaaccatcactgaaagttttctactcagaagaagaagatattccagtgacagcttaaacagaattggggttaattaataacccacccactaacataaacccttggctttgtggtggagaagcggcatcccagatagaaacagacggtggaataatattaggccacaggcttatacctaaaccggagaagcctaaaaatatcaataataaggtcaggaaaaatggcgcgtagttaccatagttataggcactacgaacaaggcaccatgtgctggctaaaactaataatggaaccggcagcaagaagtagagattaggtaaactgaaccagcgcaaagcaatatctgcatgtgccaaaggtgtccagatactaatgacagcaatgacagccaataaagcaagagctaaataaacggtcagcgaacacatcttacgatgtaaccggtattcggttttcattattaaccatgagctgcctaataaagcataggcaataatcaaccccaaaccacaaaatagcggaaatggcgcaagccatgagagtgcggagccactaaaatgacggcctgtgatctcaaagccattaatcaccgcaccaacagtaatcccctgacaaaatgtcgctaacagtgaaccaccgataaaagcgcgatcccagaaagcacggtgttctggcagtgctttgaagcgaaattcaaaagcaactccgcggaaaataagcccgactagcatcagtgtcagcggaatggttaatgcatctataataacggaataagccagtggaaaagcgccatatagcgcagcaccacccaataccagccacgtttcattcccatcccatacaggggcgacagtattaaccatcacatcccgttcggtaggatctttggtaaaaggcaatatgatcccgatacccaaatcaaagccatcagcaacaatgtacatcagtgtggcgaagataatgatgacaaaccagataatagaaagatcaatacccattctgtttttctccactaaacggttgctgcatttcagaatgacttggagatgctatttcttcaggcccctgtttcaccagacgcatcatataaaagtacccaatgccgaaaacagaaaaatagaccagaataaagagcaataaacttaagctcatttgcatatcgccgtgcgctgaaacagcatcttttgtacgctgtaacccatagaccacccacggttgtcggccaatttcagtcgtaaaccagccagcgagaatagcgattagaccagaaggccccatcagaagaacaaaacgtaaaaaagcacgggagcggtatattttctgctttctccgcagtaaaacacctgcgacccctaataaaatcattagcataccgaggcctgccatgattcggaatgaccagaaaataatggtagcgttaggtctgtcttcgggagggaaagacttaagagcgggaatttgtttttccagactgtgggtcaggataaggctacccaagtaaggaacttccagtgcatatttggttttctcttcattcatatctggtataccaaataagatcagtggagttgcttcacctgatgtattactccaatgtccttcaatagccgcaatttttgctggctgatgttcaagggtattcagtccatgagcatcaccgataaccgcctgaatgggagcaataattaaaattagccataacgccatagaaagcattttacgtacaggggcggtgtcttttccacgaagcagtagccaggccgcacacgccgcgataaacagggcgctggcaaggaacgcaccgacagacatgtgtaataggcgataaggaaatgaaggattaaatattatctgtaaccagttatcaggaataacaataccattttcgatgtgatatccctgaggtgtttgcatccagctgtttgaagagaggatccagaaggtagaaataatagttcctactgccaccatgcaagtggcaaaaaagtgcagttttctaccgaccttattccagccaaataacataatgccgaggaagccagcctcaagaaagaaggcagtaagcacttcataagtcaataacgggcctgtaatgctgccggcaaattgtgagaacccactccagtttgtgccgaactgataggccatgaccaaaccagaaacaacccccattccaaagttaacggcaaaaatttttatccagaagtggtatagcttcagataactttcctcttttgtttttagccataaaccttctaggattgcaagaaaactggccaggccaatggttaaagccggaaagataatatgaaatgatacagtgaaagcgaattggatcctggcaagatgaaaagcgtctaatccgaacatagcgcctccatcagcattaatatatgtgcgatgatatttttcattatttattttaccttattgttagtttgttttttaataaaaacaaacctcaatattgaggttttataatatctatcaatagacattataaaattatctttttaatgagcaggtgacttccattaatacattaacccacgttctcctttcgttatttataattttcaatcttcatttaactcaataacaccaatatatattaagtcatataacgccatgcatttttgttacattaatatttatacactcccttaatttacaagtgttttttcaattcgtttttttattttcatagtgacatgtatttttatctcattgtatctcagagtcaaataaattaagtttatcgaatgatagatggtatctatgataaagataagtcaaaatcattttggttgacttcacaaatatcttgttctaatgttcctaaggaacagaaaagagtgtttatatttaaaaccttctcagaagtaaatttaatattttttattcatttttttgtaaagcaaagttaatatttacttatctttttatatatgacttatcttttttattttgtaatatctattcgttgatatacctatctcgattcaaatattcacctgcatatttttataaaaaagattattaataaatgttaggaatgtagatatgagtaaaaataaatcaaccgtgccgggtgtacatccttaccatggccccgcgggcggatggggagcattaaaagcaacggcaatcgctgtccgtactcagatggacgcttttgttgcgccaaagaccttgctaaatactaaccaacccgacggttttgattgccccgggtgtgcctggcctgataaagaacacaactctacattccagttttgtgaaaatggagcaaaagctgttacgtgggaagccaccaaaaaacgtgtcactcctgagtttctggctgaaaataccgtgagcactttactggaaaaatcagattatgaactggaaggatatgggcgtttaactcatccactggcttatgatgctgccacagatacactggttcctgtttcgtgggaagctgcatgccgtcgtattggtgaaattttaagagaaataccatcaccttctgaggtcgaattttacacttcaggacgagcttcaaatgaagcagcctatctatttcagctctttgccagagaatacggcacaaataattttccggattgctccaatatgtgccatgaacccaccagtgtgggtctgcctcaatccattggcattggtaaaggcactgtttcattagatgactttgataaaactcagcttattatttctatcggtcataaccccgggactaaccacccacgaatgatgggaacactgcacgaagttgctcgccgtggtgtgcctatagtggtgtttaatccactgcgtgaacgcgcattagagcgtttcaccgatccgcaaaatatgattgaaatggcgacctatagctcaacgaatatcgcctcttcttactatcaggtaaaagcgggaggtgatgcagcagcgctgaaaggcatcatgaaagtcttattggaatgggatgaaaaacgcgggaatattctcgatcatgagtttattgcaacacataccatgggatttgatgccgtcaaagaagagctacgcggtacttcctggcaagatattgagaatgaaagtggcatttctcaagccgatattgaaaatgttgcgctgttgtacgctaattcggatgcgaccatcgtcacttatggtatgggaataactcagcataataaaggaaccgcgaatgtccggttaattgccgatttgctactcatgaaaggcaatatcggcaaatccggggctggaatatgtccactgcgcggccactctaatgttcagggtaaccgcaccgttggtattacagaaaaaccatcgccagaattcttacaaaaactggaagaagtcttcgggtttaagcccccttatgaacacggacacgatgcagttaaagcgatgcaagcgatggttgacgggcgcgtgaaggcactgctttgtcttggcggaaactttgccgtggcattacctgatcctgaattatcattttcagcaatgaaaaaactcgacttgagtgtacatatcggaactaagcttaatcgttctcatttactggtggcgaaagaaacctttattttaccttgtttaggtagaactgaattagatattagggagttagggcgtcaatccattactgtcgaagattccatgtcaatggttcatgcatcatcgggaaaattaacaccagcatcaccactgttaaaatcagagcctgttattgtggctgaaatggcagccgctactttactgaatagtaaaacaccatggttacgctataccgaaagctacgatcttatccgtgatttgattgagaaaactattcctggatttgataactataatcagcgcatccggactccggggggatttcgtatgccattgccaccaacagagcgcatttggcctacaccaactggcaaggcaatgttttctgtgtttaaaggtgtgaaagaaaacgcagatgtgctgggtgaagatgtattgcgtctaatgactattcgtagtcatgaccaatataatacaaccatttatgcattggatgatcgttatcgtggagtatttggacgacgtgatgtgctgtttatgaatgatgttgatctggaagcccgtgatttgaagcacggggataaaatcattattgaaacagtgagccaaaacagaaagttatttctcaaagatatcactgttatttcatacaatattgcgccgggaactgttgcagcttattatcctgaagcgaatattttaattccattagattatattgatgaagaaagtggtacaccttcttataaatcagtgccagtaagagttttttctcagcaggataaatcagcttaattactgaaagtctttttcaatgaaaatagtcgcacaataatacgtgcgactatttttctcgtgagcttaattctttattattaacagctaaggtaaaacatacccatattcctaaatatttatatattccacatagtcacacatattagcaaagcaggtttcaattaatactgaacgaggctcttctcggcggatcaatataccaagtgcagcattaataacagcatcctctattggaataatatcaatattatcacttaatttttccattttctcagtaataggaatgatagatgcacaaaagccggaattgactgactgaataagatgaagtgtagaatcactttcaagaattattttaggttgaagattataacgctgaaatgcaagatcgatagattggcgaaagtaattcgcctgactgataagcgccagaggtaatgttgctaccatttcccaagtgactgttggtgtggcaggcgtaaattgtgttcggttaaataaaagcccgagttttgttttcttcagtgaataaatatcatgttgatgagtatccgccttttccagataacaaatgccaatatctaaacgattactatttagatcatcaataattttttcactgtggcccgaacttacttgaaagcgtatttcagtaaatgtttcagaaagatgttgtaacatcagcattggctcaatattagtcagaggaacaatgccaatacgaagctgacctaacaattgctggcgaaaattagcggcttctgcctgtagcccttcataggctgactgcatggttttagcccactttaatattttttcaccttcttctgtaaatccttcaaagcgcgagcttcgttttatcaaaataacatcaagctctttttccagatttcttagtcgcatagagagcgttggctgagtgacatgacacatttctgccgcttgtccaaagtgctgagttttatctaatgcgattaaataaaataactgtttaatatcgatgggattttcctcggcgatgagctggtaaacggctgtaagtaagagacttactaattatatgccgttttatctgctccaaaaaattatcaatatcattgatgtaatgctatctgcacttttatctataaactgtaggactatggttgatcctgtggtgactaaaatcaagcaattaaaactgctcacatttgacacaccataactggagaaattatcgacatagatgatatatcagggtaaattttgggatcggtaatggataataatacatatgattttgcttccggaattgccttagtataaattggggccaatcgcgttagcagagaaatttcacccgaaagtatcttgattgatttttcctgttaccgacaaacacccattgttcatcaacttcacatatgatttgaatttcatctccacgagattttccccaattcagggaaataaagtttggctaatgaagatattaatatgttaacttaggcaaaacggtagaaaatcaatataataggaactatgagaaaatttgcattattgacttacgccctggttctatttggtttcacacaacctgtgaaagctttgtccgaaagtgaagcggaagatcttgctgatctcacagcagtttacatctacctaaaatatgattgtggctatagccagatcccagatagagaaatcaggcgtacggttgtctattttgcccagcgtaataaatgggatctcgggaattatgatggtcagttaatggaggaactgaatcaacagggctacaacgatctgaagggaatcgacctgcctcatgaggtaaaatgccgctctcttgcacgccgctccctcagcctgcttgcttatgtaaaataattttattgtcactctctggcaaatatcacagtgcaactaattctgttgttggctattatgtgcgcctcataattatggggaccacaatgggggaataccaatagatgtcacagaaaaacacttggtatgagacattacataccaattttggtcagtatttcacggttgaaaatgtgctctatcacaataaaaccgagcatcaggatctcattatttttgaaaatgcgaaactgggtcgcattatggctcttgatggcgtagtacaaacaactgaacgcgatgagtttatttatcatgaaatgatggcccatgtaccactatttgctcatggaaatgccaaacgcgttttgattatcggtggtggggatggtggcatgctgcgtgaagtttgccggcatcaataactcgaaaacatcactatggtagaaattgatgccggagttgtcgaattctgccgccaatacctaccaaaccataatgcaggggcttacgatgatccccgtttcaaacttgttattgatgacggcgtcaactttgtcaatacaacctctgataaatttgatgtcatcatctccgattgtaccgacccagaagggcccggcgaaagtttattcacatctgagttttatgaaggctgtgctcgctgcctgaatgaaagaggcgtttttgtcgcccagaatggtgtttgtttcctgcaacaagacgaagccattacaagccacaaaaaactgaaccactattttgctgacagcagtttctatcaggccgctattcctacttattacggcgggatcatgacgttcgcatgggcaacacaaacctcagccctacgtcagacgcccctaaaaatcctgcaacagcgtttcgataatgcggcgataacctgtcgttattataccccagccatacatgcaggtagctttgccctgccacagtatttgctggattctctatctggaaaccaatagtcacccatgccgggaggtgaagtaaattgcgtaaactgaaattgcacggctttaacaatctcacaaaaagcttaagtttctgtatttacgatatttgttatgcaaaaacgaaagccgatcgcgacagttatatcgcgtacattgatgaacagtacaatgcaaaccgcttaactgaaattctcagtgaaacctgttcaatcattggtgcaaacattcttaatattgcccgtcaagactatgatcctcaaggggcaagcgtaaccattctgattagtgaagaacccgtagatcccaaactggtggataatacggaaaacccggggcctcttcctgattctgtcgtcgcccatctggataagagccatatctgtgtacatacctatccggaaagccatcctgatggcggcatatgcacattcagggcagatattgaagtctctacttgtggtgtaatttccccccttaaggcacttaattatctgatccatgaactggaatctgacattgtaacaatggattaccgtgttcgcggttttacccgggatattaacggagtaaaactgtatatcgatcacgagattagctccattcaaaattacgtgactgaagagatccagtctcaataccatatgatggatgtgaatatttttcaggaaaatctttttcataccaaaatgatgctgaaagaatttgatctgaatgaatatttattcaataccacagctgaagagttaaacgaaacagaaaagcaggaaattatccacctgcttaaaaaagagatacaggaaatctactacggtcgtaatttaccagagatttaaatatcctcctttcgtttcggtaaatttactggcagatattttatctgccagtcatattatttgttcaatgcccatgtcttttccgttatccagccaataaaatctcaatctgaaatatgaaaagttaattaaaatataaagggcttaattcataaaatagttatagcgaatatacaccaagctctgtacttgttgtaatttcaacaccataaattgatttaagataattgagggcttcattctgatccgcttgcagaaaaacacaaacagcatcagataatactttaatgtcataaccacgaacaaacgcaccataagctgtgtgacgaacgcaacaatcggtatgctggccagtcaatactacttctgtcacaccatgttgttcgaaaatagcgccaagatttgtaccatcaaaagcaccataaaaccgtttaggggagacgatttcacgctttgctccgatgggagccagagcatcaataacatcagcaccagatgtccccttcatggcatgcctaccccaaatagctatttcccggtcatcttcccaatgtgaatcattggcatacacaactaacctttagaggaca

SEQ ID NO: 115 - DNA, 38706 bp, Xenorhabdus sp.
  unsure (1)..(38706): unsure at all n locations
ctctaaagtattaccggggatccaccacactgccgattaaaattcagtctgaggacccacatggggaatcccctacttctgtaaagtttgtcggtaatgtcgatatccaacaaggaaataaaacactgactgccgacagagtcagattcgagcagactgaagctaaagacccggtgcggactctccatgctgccgggaatgtcagatatgatgatcctcagataattctgaaagggccacgcgcctgggctaacttaaccacaatagataccgatgtggaacaagggaagtaccagatggtaggtcgtcagggacgcggtagcgcaaataaaatgatgctgcgcggtgagaatcgctataccattttagataatggcgtgtttacttcctgtctgccgggtaacgatagctggagtgttatcggttcagaagtcattctggatcgtcaggaagaagtggctgagatttggaacgcccgtttcagggtcgcaaatgttcccgtattttatactccctacctgcaactaccgattggcgatagacgccgctctggttttttgatccctaatgccagtttttccaataaagatggtatccagttcattctgccttattactggaatattgctgccaactacgatgcgaccatcacaccacacttgatcagcaaacgcggtctgaagctcgataacgagttccgttacttaacgaaagctggttcaggcaccgtagcactggactggattaataatgatcgcgtatatgaagatgataaaattgagcggaatagggaacggagcagcaatagccgatggttattctacctgaaccacggtggagtgatgaatcaggtctggcgtttcagtgctgattataccaaagtcagtgatcccgactattttactgatttcagctctcagtacggcaccagcactgatggttatgccacgcaaaaattcagtatcggctatgcccagcagaactggaatgcaacgttaaccaccaaacaattccagatctttaccgctaaagtcaacggtgacacgaaagcataccgtgctacccctcagctagatctgaattactataaaaatgatctggggccatttgatttccgtacctatgcgcaatttgccaaatttaccagcgttggtaaggagcagccgaatgcaacccgctggcatgtagagccttccattaacctgccgctctccaatggctgggcaagtctcaacaatgaagttaagttgatggcaacccactaccaacaagatattcctgcggcgcaaaagacctctgatttggagaaatcagttaatcgcgttttgccacagtttaaatcagatgcacaaatggtatttgaacgtgccatgtactttaagcccggttttacgcagacattggaacctcgggttcagtacctttatgttccttataggaaccagaataatatttatgactacgattcctccctgcttcacaccaattataccggcttgttccgtgatcggttctacagtggtctggatcgtatttcatcagccaaccagttcacgagtggtatcaccacccgtatttatgatgaagatttagttgaacgttttagtttctctataggtcaaatttattactttgaggcaccacgcgttaaggatgtgaattctgacgggcagacacagagtcctattgatgccagtaataacagaagaacgggttctacaacctgggccagtgatgttgaatggaacatcaactcatcctggggcttcaaaggtggggtgcagtatgatacccgtctgagccaggtttcgatggggaattcagtcgtggaataccgccgtgatgctgaccgcctgatacaactgaattatcgctttgttaatcgtgactatattcgggctaccctgaaaaaccctcctgcataccagcagggtatttctcaggttggtgtgataggaagctggccgttgactgatcgctgggcggtcgtcggcgcgtattactacgataccaaagagaaacaacccgccagtaaaatgctcggtatgcagtatagtacctgctgttgggctgtgaatgtcggttacgagcgtaagatagtcagctggaaggacaaccagagtgaatatgataataaatggtcactcaatattgaactccgtggcttaagtaacaatcatagtttgggtagccagaagatgcttcagcaaagtattttgccttatcagcgttccttctgataccaataaacaaaatgtaaacacaataaccccgcggtaaggcgggattgatatgatgggaaacatatgaagaactggagaacgctcattctcgggttgatgtttgcaatgaacactgccatagcagcaccacaggaaatcaataaggtcgctgccattgttaataatgatgttgtgctggaaagtgacgtcaacaacctcttagagtccgttaagaataacgcaagactgtctggtcagcagattccggatgaaaaaacattgcgccaccaaattcttgagcgtctgattatggatgacatcgtcctgcaaatggcaaagcagatgcagcttactattcctgatgcggatgtggactcaaccattgaaaacattgcggcacagaaccatatgagccttgctcagatgaagcaaagtctggctgctgagggtatgagtttcgatacctatcgtaatcaaatccgcaaagaaatgctgattgctgaagtgcgtaacaacgaagtccgtcgtcgcatttctattctgccacaagaagttgattctttagttaatcaactcagtagccataatgatcagaatactgaactgaatgttagtcagattttgatccctctgcctgagaacccaacccacgctcaggtcgagaaagcagaagttaccgtaaacaagattttgtctgatcttaaaaaaggcggggattttgggaaactggcaattgcttattccagcgatacacaagccttaaaaggcggcaacatgggctggaaccggttacaggaactgccatcattatttgctgaacagcttcagtcggctcagaaagggcaggttatcggcccaatccgttccggtgtcggcttccatatcctgaaagtgaatgatatccgtggcggtaatgcgcctgttgcagtcaccgaagtcaatgcccgccatattctgctaaaagcatcaccagtgatgactgatgatcaggcccgcgacaaattaagacagctccgggaagaaattttaagtggtaaaacgacattcgagcaagcagcaaaagagtattctgaagatccgggctctgccatgcgtggcggtgaactgggctggaatgtgccaagtgcttatgatcctgctttccgtgatgctctggttaaactgaaaaaaggcgaaatcagccagcctattcactccgctttcggatggcatctgattcagttgcttgatacccgcaaagtcgacaaaaccgatgcagcacagaaagatcgtgcctacaagctgctgtttacccgtaaatttaatgaagaagcgcaaacctggatgcaggaattacgcgcctctgcttatgtgaaaattttagatggcaacgatgcaaaataaacccatcattatcacccccggcgaaccagccggggttggcccggatttagtcattgccctcgcccaatctgagtggcccgtccaattagttgtctgtgctgatcctgaactcttgctctcccgtgcacggcaactgaacctgcccctgcaattgcaaccttactccccggaacatttatctggctcacaggccgccggaacactgagcattctccccgtctctctccatactccggctgtcgcgggtgaattaaaccgggagaatggtacttatgtaacagaaactctggctaaagcctgcgatggttgtttaagaggtgagttttcggcactggtaacaggccctgtacataaaggggttatcaatgatgccgggatcgccttcaccggccatactgagttttttgctgacaatagccagtgttcacgtgttgttatgatgctggcaacagaagaattacgggtcgctctggcaacaacccatttaccgattctggatgttcccaaagcgataacttttgattctctgcgggaagtggtcactattcttaatcatgacctgaaaaccaaatttggcatcccgtgccctcatatctatgtctgtggtcttaaccctcatgcaggtgagaacggccatatggggcgtgaagagatagatgtgattattccggcactggaaagcctcagagccgaaggtatctggctggaagggccattagcagctgatactctgtttcagccaaaatatctggataatgctgatgcggtgctttctatgtatcacgatcaggggctgcccgtgctaaaatatcagggttttggcagagcggtgaatatcactctggggctgccattcatccgaacctctgtcgatcatggcaccgcactggagctggcagggacaggtcaagctgatgtgggaagttttatcaccgcattgaatctcgcaattaaaatgatacaaaacagtaatgaataataaagtccaccaagggcaccatgcccgtaaacgcttcgggcaaaatttcttaaccgaccagtatgtcattgatagcatagttgatgctatgaacccacagcctgggcaggctatggtggaaatcgggccgggtctggcagcactgaccgaacccgttgcagcgcgtctggataaaatgacggtcgtcgaacttgaccgtgatttggccgctcgcttgcaggtccacccgaaactgaaagataagctgactattattcagcaggatgccatgaccgttgattttggtgagatcgccaaagaactggggcaacctctgcgtgtgttcggtaatctgccgtataacatctctacaccattaatgtttcatctgttcagcttcaccgatgctgtcgctgatatgaactttatgttgcagaaagaagtcgtcaatcgtcttgtagccgggccgggcagtaaagcctacgggcgtttgagtgtaatggcgcaatattattgccatgttatgccagtactggaagtaccgccgaccgcgtttaccccggcaccgaaagtcgattcagctatcgtgcgattaattcctcataaggccatgccttataagtcgatacctcatcctgtgcaggatatccgcatgctggcaaggatcacgacacaagcatttaatcaacgtcgcaaaactatccgcaatagcctaagtgacctattttctcctgaacaactctctgatttgggtgttgatccgggtacacgtgctgaaaatatttcagtcgagcaatactgtaaaatggcaaactggttatcgtctcaatctgaaactgtctgataacggacatacgttgcagtaaaaggaggcatttatgctcaacgaaccaagagttcatattcaagttcaaagcgcttacgtagaaagccagtcagaaccggaccggctacgttttgtgttttcttacacaatattaattcgtaatcttgggcattcccccgtgcaactcatcagccgttactggcgtataaccaacagtaacggccatcagacagaagttcatggcgaaggcgtggtgggagagcagccagtgatcccgcccggaacggaatatcgctacagtagcggggctgttctggaaacacctttgggaacaatggaaggccattatgagatgattgatcatcttggcaatccattccgggttactattccggtattccgactggctatcccaacactgataaattaactatggctacataccttatcggcgatattcacggctgctaccgcgagctggttgcactcttacaacaggttgattttgatcccgacagagatacattgtggctgacaggtgatttagtcgcccgcggccctgattctctggcggttctgcgctatgttaagcaactggggtccgccgtcaggctggttctgggtaatcatgacctgcatttactggctgtgtataacaaaatcagccgtaataaacctaaagaccagttggatgagttgcttactgctcctgatgtcgatgagctgattaattggctgagaaaacaaccggtattacagatcgatgatgaactgaaactggtcatggctcatgcaggactgactccacaatgggatctggaaacagccagaatatgtgccgacgaagtggaagcaatcctacgcagtgacagttatcccctgtttctcaatgcgatgtatggtgatatgcccaatagctggtcaccaaaattaagcggactgtcacgactgcgttatagcaccaacgtactgacacgaatgcgttactgtttcccgaatggtcaattggatatgatttgcaaatccaagcccgaaaatgctcccgcgccactaaaaccctggtttgaactcccgcgaaaaattcctgaagattattccattgcatttggtcactgggcagcactggaaggacgaggaacgcctgctgatatttatgctttggatacaggctgttgctggggtggcaatctgacgcttttacgttgggaagataaacagtatttcagtcagcctgcatttgctactcagtcagatgattcagattcgtaatttttaatggagggtcgtcagacactccatttctcgtatctgacagagaaaaataattactgccgtctttccagaatttcaaaacagtagccgtgtgaattgcgctcatcagcatcgtgatattcagtgaaaaccgaactccactcatcgggttcataatcaggaaaatgggtatccccgatcacttcggcgtcaatatgagtcagatacatgcgactggccagaggaataaattgttcataaattttaccgccgcctatcaccatgatttcttcgacatcacctgccgcagccagagcttcttcgatagaactgacccaggttacacgatcatcgctgcctggctgacggctgatgataatgttcaggcgtcccggtaaagggcgaccaatcgattcataggttactcttcccatcacaaccggctttccgagtgtattacgcttaaaccaggctaaatcacccggaatagtccacggcatagcattgtccagaccaataacgcgatccatcgccattgcagcaatcaagctgatattcattaagtcaccttacaggcaagtagtatgaaaattgcggacactatacggaaaggggtagtaacagtcgataagattagacatttattcagaatagataattagcctatgcatttggtagatttcaagctgtatgaccttgtttaatattttgtgtaatcgccattttcgtttaaacgttaccgtctagtactacagtcgtagcctgcattgtgtcatgatagctatcttctttcttcctcatcctaagggaggtgccctatggcctcacctgtcaggagcttctgctggctcattcccgtctgatcccactattttgctctgcaagttctcagcaacgttgtctggcgtatcttcgtgggttactcagcgatgttgaacgtaaaaacggctggcaactggctgaatggttgggtgaacactcaccggatggcattcaatattttctggaacgggctcactgggatgctgaagccgcccgcgatatcttacgtgattatgtcaccgcatatttgggggatgagcaagatatccttattatcgatgaaaccggttttatcaaaaaagggacgcattctgccggcgtgcagcgtcagtatagtggaacggcgggacggattgaaaatagtcagataggggttttcctgtgttacgccggcaacggcggtcataccttcattgaccgagctttatatctgcctaaacagtggacagaggatcgcctccgctgtgacgccgccggcatttctgactcggtcagttttgccacgaaaccccagctcgcccagaacatgctggcgcgggcattcaaggccaatatcccctgtcgctgggtcaccgctgatgcggtctatggacaggatcgtcgcttgcgatgctggctggaatctcagcaccaaccgtttgtcttagcgatccccaaaaatgagcgcctctggtggcaaacaccgcactacacccgagcagacaccattgcagccagtctgaccgctgacgactgggaaaaacagtcagccgggctgggaactaaaggcgaacgttggtatgactgggctcggatcccgctctggcgcttgcaagtgagtgaagaggaacggcgttatggccattatctgctgatccggcgtaaccgggatgagaagcaggaactggcctactatgttgtctatgccctttaaagagcaggccgatcttaagatgttgattcaggtggccggacatcgctgggaaatcgaaagcggttttgaggaaacaaaaggcgagtgcggtctggctcatgacgaagtccggcagtggcacagtgggtatttccccagcgccagcatcttctctttaccaccaaagcgataacgtagccgccagtatttagaaccgttagggtgaaccagcaaaaccatgccttcaccgtcagtcagcttataggcttttgcttcgggcttagccgaacgaactttcacatcactcagagccatgttgagtatcctttcaaaggttctgtgtgggtacaaacattatcgaaccgcgatatacccgcagttgtacccacatcagtaagttgatgtagattgaatcaggttgatttaggttgagtgaaaaagcgaggaaagccttgcgtatactggatttcaggcacaaaaaaagacgtccgttgacgtctattgatgttccgatggtgcgaaggccggactcgcaaatagatataattaattgaaattaaataaattactaaaaagacgttttcaaaatgccccattttgtgccccatatttatttttccatatgacaggttaaaaccaccgtctttagacggtgactttgactttaatgttttgacctacgcgcgtttacgaggtgcgtggttcgacgactttcagtcgtcagcaccgaagtgcgctaacccacctacttcagtaggtggtagttaagtttactccttttacttgtccatgtatttgattttaatatactttatgaactacttgatatattggtataagagtaaagttaaaaagccatgaggtttaaattagtttatcatctcactctcagggctttgtataaaaatttatcattttcacaaagtagatcacacgttgaagcgggttattcctgtggtttgtctcgaaccttacgttcaatcaatcgaccctgcttatcaaaataacggctaggccagatttctgaaggatggatgccaagatagttagcaattatccactctcctttaggccattgcctactgagtgcatttgctaatgttgatgaactaagtcctgcttcacgagaaacagccgctaaggttgtaccacgtttacgtaatgcagcaataatatcggcctgatgccagtcagttctaatgttgttattcattcctgctaccccttccattaattaatattgatggtggcgattcagacagggttagcagactggcactcataccagcgagacttacgtctcccccgcctgaaccaccattgaaaaggcgataacaggcacactggcaaaatttctgccagtgtctatgagtgacaaggctgctaaaccttgaccattggattgagccaatggcgggaatactttaactgattgtattattggactcaataaccgaacgactaagtttaacggctataaacttgctccacataaagatcagttttatgaacgcggtaattctttaatcaatcagctcatcgatttccttatttatacctgacaacatacgatctctggcgcgcgacagttcggacaaaacagaacatgcctgctttgcccttgacggatatctgtgcgccagagtgaacgcaagttgaggtattgcggggtatcggttgagtacacagtactgccgcctgtattaacaggtcatccccaccggctaaaagccagcctcgatatcgtcaagttctccttttgatactttttcaatcaataaaatacagtgtcagattcactgtgtggttaattaggccaaagcctgtcagggttgtgttgctcttttgctgcggcgtcactttcagcggtaaacctgcgaaaagtgacgccttgagttccgtaaacagtcagtaaaagctgtgcgagcgttggaatgctcgcgggcacagcaaaacaccgcaaggttaagtgtcaaatggtagtaatgagttaaatgtttaggtgtaaaaaatttatctgatgaataattcaaacagagatagtgagaagtatgaatcggatgtacgaaatccatcctgttatttattgaagataaaggaaaatatgctttgtgttgatatgaaagataagtgcatgatctaatgttcactacacttgattggcaatataaaaacaccttttgggtgtattttttcgtttaagaaaccttcatcgccagacggtggtttaggtgtctgacaatatctgcttccaaaggtgtgcagatgtaccacaattcttgctctccctttcaggctacgggagtttttgttgccattacagctatatggccatctatgatggcgagtaaaccaattcaaactagacgtttttttcagttatggcaacaagaaacgggtagtttgaacaataaaaactatatctattcttcacaccaaaccatgcgataaataaagagtcatccccctaatattgggaactattagtactttcttaactgattcgcaaaaaacaccgcatttagtaggcaaagatcggtaagggtgatgaagcatacaacatttagatgctagctgttcaaactaaaatcaaaaatactagcaaactcaaaggtggtacaaaaatatttaaatctgggctaataatgcatggatttatgttttttctaactaattacatcgttattggtgtatcattaccaaaaaattggtttaattttatcatgaggtggtagagtgattaacttaactaatgatatattcattgacgtcgtcagtgatgctctgtctggcaaacgagacagtcttgtcatgcgactacgcatggtgacaaaaaagctcaaaaaagagtcaccagaattagcaacaaaattagaaagcctacttatgcaaactagtggagcatatgctgtagaaagagctcaaccgattacccctagagcaacccccgtagatgcagatacaaggcaaaaattgttagttgaaacatatcctgtaattctagatgttgaacctgtttggccaacaagcacatcgttagctctaaatcgttttgtaatcgaatgggaaatgaaagagctcttgcacaaagagggcctacatccgtcccgctcccttttaatgggcgggcctcctggagtaggtaaaactttggctgcaaaatggttagccagcaaactaaatatgcccttattgactcttgatcttgctagtgtgatgagcagctatcttggtaagacaggaaataacataagatccgtacttaactacgcctcatcttttccatgtatattactacttgacgagttcgatgccattgccaaaaaaagagatgacgctacagatgtcggtgaacttaaaagacttgttaccgttcttttacaatctatcgatgaatggcccaacacatctattctcatagcagcaactaatcattctgaacttttggatactgctgcatggagaagatttgatagagttataaactttgaatatcctactaatgatttaattcaacgttatcttatatcgaaagaaattgcagaaagtttagcgcactatatttcatcaagattaggtgaaatatcttatgctgtgattgaaaaatccatcaatcaagcgaagcggaattctattatagagcagatacctttaagctcagctctaattgatgaattactgaacaacacagcattggaaaatgtcataaaaacgatgcttgatgagggtgtttcccaaagaaaaatatcgtcagacttaggaataccaagatcgcaaattagaaaaatcattaaaatagaggatgaaggtaatgaatgataagaatatgcttttgggttacggagaaacactgacgggtaatgtaaaaataaaaaaaggtggtggagggaaaaataaaccctatagctataatgaaaataagctagtaataatgaatgaattagcatcactaatcagtgaaattgaaaacgtaccagcctccgcactaccagatggtaaagcagtagcaaaattcgtgcttcatccagcttttctagctaaaagttattttccggtaggattatttaacaaattctctcttacaagtgtaggtagtaaatctgtcagaattaagcctcgtaaagacataaagaaaaaaggtagaaaagatgagtatacaacggcttgtatctacgtttcagggaaaactgaaaattttcaatcgtttttgcgtgcattaaacgatgatactttaaataaaagccaaaaagatgatttcatcacacttgaaagtgtttcaatgtttaacccctccgataaaattaagtctttaaaaggtgatgatgaaagaagtattgaagtagccttacataccccagatgaaaattcagctatagttgactcttttattatatttgctttacaacaaggtgcctccgttgataaagaaagatgcataaaagtcaaaggattgacctttatgcctattaaagccaataaaaaaacggcttatgaaatagcaaaattttcttttttaaggacgcttagagatcttccagagttaagagttagtgagccagtaattagacgttctgtgaattccccttctagttttaaattaccatcagaaggagcaatcaatccaaatttaaaggtagcaatatttgacggaggaataagtattgatgattttagtcagtgggtaactgagtacacctttaacaaagatggaaaaacaagtgcccaacttctctcacatggacaagatgtgacctctacgcttctctttggcgttatggattcaggtgctgtaaaactaaatgttccttactgtaatattgatcattacagagtcttagattcgaacataaataatgccgacattgacctttttgatgtgctaatcagaataaagagtgtgcttggcacacaacactacgattatattaatttaagcttggggccgaggctacctgttgatgatgatgatgttcatgtctggacttcaacacttgaggaagccctctcagcagggaatactttatgcacagttgctgttggaaatgatggccatttgccagcaggtcttaataggattcaaccacctgccgatttggtcaatggtttatctgtaggtgcagcaacatctctttcagaaaactgggaaaggtgccattatagctgtattggccccggtagaagtcctggattcgtgaaaccagatggtgttgcttttggcggaaattcagaagaacctttcaaggtattcagccccatgaataatggattggcaagtaccgcaggcactagctttgctgctccactagcattaagacaagcaatcgctttaagttcatctttacaatataatattacacctctaactgctaaagctcttttaattcatcatgctgaaaacagcactcatgaacgttcagaagttggctggggtagatttccgcataatatttcagatgttatttattgtgacgataatgaagtaaaagtcatttatcaaggtgtgctcaaaccttctcaacatatgcgagcattcattccttatccagatgaaccaactacaggttgtgtcaatcttcgagcaacattttgcttttctagcccagtggacgcagaacacccattaaattacactcgaagtggtttagaaattactatgaggaaggggatatctgatacgacaaaaggcttaacattcccgctttttaacttaaaaaatatttatgcagacgaaaatgaacaaagaaatgacggtcataagtgggaaacaacattaagaagtgagcacacattcaaacaagatgaacttactacaccatgctttgatattatttatcatggtcgcgactgtgggatgccaatcgatgtttctgaacttgacgacttaccttatgggaacctctaaaaactctcaatacaaaaaataagatcaattttgaactcaccaataactgaccttattgtgtatgactttttcttgcttgttcaggggaaaaaaacaaacgcatcactttttcatcacatctcgaaattaaaaagcatgaatacccgattttccgaaataaaccaaacgttgcaaatcatagcaggttgccttcatcgtcatcgcaaaattggctcgcagctggcctatcgtccgaataattttttcacccatctgagagagtgagccaaagatatgttctacgcgtgcccgagttttcgctattttcttatttcggcctttttggcagtgtgataagggcttattacgtgccgcttttctctgaatatgcacacgatagccctgctccttcagcacacgttcacgcttctggctggcataccctttatccgcataaatgtcccgacgggtatttgacctgtccaaaacagcttcaaaaaactggctatcatggacagccgcggttcctgtcgcgatgtggcggatcactttatattttgtatcgacattaagggtaagtttatagccaaaataacgcttaccgtgctttttcgtccaggttgcctcggtgtctttctggcatcgtttgtttactgtccagttatccggggttttgccctgacggatttgttcatttttccatataaaaggttaaaaccaccgactttagtcggtcagctttagctgcgatactgtgttgcacgagaggtgcaatatggattacagatatggcagccacacggtatttcagattgagtatcattttgtgtgggtaacaaaatacaggcgcaaagtgctaacaggtgaagttggtttacgggtgagagagttagttcgtcagacctgtgaagcgttcgaaatcaggatagtagaaggggtcgtgagcaaagaccatgtacatatactggtgagttgtcctccgagcttagcgccctcagaaatcatgaggcgaataaagggaaggacagcaagtaagttgtttgaagagtttgctcacttgaaaaagcgttactggggtcagcatttttggggcagaggctatttttgtgcgacggtaggtcagttaacggaagagatgataaaggcctatctggcgcatcattttgaaccgaacccgaatgatcacttcaggctggataattgacgcatcgtttagccgatgcgtatccggactttcagtccgttaatcactaacccaccgactttagtcggtggttgttgagtttcttttgaaagagtattgtcgttagcaatttctattaataattcttctgtcgtattttttggtgtcattttttaaatccttttatttttccatataaaaggttaaaaccaccgactttagtcggtcagctttagctgcgatactgtgttgcacgagaggtgcaatatggattacagatatggcagccacacggtatttcagattgagtatcattttgtgtgggtaacaaaatacaggcgcaaagtgctaacaggtgaagttggtttacgggtgagagagttagttcgtcagacctgtgaagcgttcgaaatcaggatagtagaaggggtcgtgagcaaagaccatgtacatatactggtgagttgtcctccgagcttagcgccctcagaaatcatgaggcgaataaagggaaggacagcaagtaagttgtttgaagagtttgctcacttgaaaaagcgttactggggtcagcatttttggggcagaggctatttttgtgcgacggtaggtcagttaacggaagagatgataaaggcctatctggcgcatcattttgaaccgaacccgaatgatcacttcaggctggataattgacgcatcgtttagccgatgcgtatccggactttcagtccgttaatcactaacccaccgactttagtcggtggttgttgagttttccatataaaaggttaaaaccaccgactttagtcggtcagctttagctgcgatactgtgttgcacgagaggtgcaatatggattacagatatggcagccacacggtatttcagattgagtatcattttgtgtgggtaacaaaatacaggcacaaagtgctaataggtgaagttggtttacgggtgagagagttagttcgtcagacctgtgaagcgttcgaaatcaggatagtagaaggggtcgtgagcaaagaccatgtacatatactggtgagttgtcctccgagcttagcgccctcagaaatcatgaggcgaataaagggaaggacagcaagtaagttgtttgaagagtttgctcacttgaaaaagcgttactggggtcagcatttttggggcagaggctatttttgtgcgacggtaggtcagttaacggaagagatgataaaggcctatctggcgcatcattttgaaccgaacccgaatgatcacttcaggctggataattgacgcatcgtttagccgatgcgtatccggactttcagtccgttaatcactaacccaccgactttagtcggtggttgttgagttatcccattcggagaaagaaatgaaaatcattcgccatatactgaatagccggttagtaggatatattataggggggataggtgccattttttttggagtcagtcacatcctaacgttagaagaagcggaaaaattcagtaattcaccacagaaaaaataacaattaaattttaaatagatactcaattatttacatgggagacatagtctccctatttgcagcgcctcggaagcaaaaatatttaatctataatcaacncgattgagttattgtatttttgattttaataaaccaatgaggttaaataccgaaaaatgaaaaaatccacaagaagagctattgcgaatatggttagtttatgtcttgcaatatttttcatcagtaaatcatcattatcattgatatacaatggtgatagtaatcactattataatgtagtgttaatcgttatggcattttttggatttgaatatgtatgcgataaattcattaagcttcttgagttttttgaaaaaacttaatgtatgttcaaccaaaaaatacctctcttaatatttatttttatctggacaaattcacctcctgcgctatataagcttcactttctgataccttttaaggattttcaatgaagaaaacattgttattgcaacaaatgcagctcttcttacagggaaggcagaaagtgaccttaaaagaactgatgcaagagtttcagttatcccgtagcagtactttacgttacatttcagctttagaagaattgggcgttcctttatattctgagcgggggagaaatggcgggtacgttgttgctccaacttaccggttagcaccagtcagatttagcgcggatgaaattcatgcaatgttatttgcaatttcaggtatgcatgttctgcaatccactccttttaatctacaatttcgtagtatttctgaaaaattaaagcaagtattgcctcaggatgaaaaaataaaagatgaaaaattacgcaaatgtctgggggtgcgaactgtcagacagatcaatccaattaaacatcttgatatgttactcaatcatatttttcaacagaaaaatctggaagtaatatactgcgataaaaaggtttttctttaccctattgcgatatggtttgagtcaggaaagtggtttttagctgtatttgattatgaagcacaagatttacgtgtgttacgctgccattcaattcagtcatttaacccaacagcagggcaatccgttgttcccgaaaatattcgtttaacagatttcaatctgtctaattttgaacaattaaggcagaaacaacagcaacattattttgaaataacaataaaaagatccggtattgaccattatcatagcaaatcattttcacatatctccctcaaattaaccgatgatggagcactaatttctggttattatcatcaggaagaattgggttatctgcttgactatataaatggattttcccaacatctgattgatataaaacctaaaacattaaaaagaatgtatattgatgaaattcagatgcgtttgaaacagttggaataagaagcgattatacgtgttacaaaaaatagataattaattatctgaatacttaatgtcattaatttaaaagcctcttattagaggattttagggaaatattatatttctttgccttcatagtaacctacatagcctttaccacaatgtgatgctaccggctttatgccttgcaaatgatactgaatttttccatctgtgaatacgctttcaaaaatgtgattcttacgcacttcatacacaacatatactgttccatttgtaccagtataagttctgcctgagctataacagtcgttataggtaaaatctttatttgctgctgatgcagttgcaattccgccagttaatgcaagaccagctaccaatgctccgcctactaataattttttaaacataataaaacctccaatttaacattataataactttttatttaaatttatcacttaccaaatattctttgataagatgcgataaatataaatcaccataagaggagtttactatttcaaaaattggaaacagtgcatgtttttatattaaatttgagattggggtgattaaaaaatagcaaataaaatttggaaataaaataaccaaatataattatccataataaaatcaaaaaaccccgttatattaacgaggtttattagcattctaaagtgctgtaacgatagggcttacctatgattttacaccttcatatttaccaacataaacgttcattccacaaacgtataattttttaaatcctttcaaatgccatttgaatccatcttcattgcgtacatcaaggaaaacaattccatcttttactaggtatttagtatatacgccatttttatactctataggagatgaatgacaattattccatggaatatctatgctgcttgccgatgcagttgaaattccgccagttaatgacatcaccgcggctaatgctccacccacgaagaatttcttcaacataaaaaccttcctttaatagtttttaaaattatgattgatagttctcgataaatgtaaattaccattaggtggttttaccatttcaaaatttatatatgatatattgtttttatatcaggagattatttagccttatgaaaggctgtgaatataatttcatgagagatatcattatgcaaaaaccccgattaaaataacggggttaaaaataatgctctgagaaaaatataaaataaatagttcgcagatataaatttattccatactaccttctgccttcatagtaggcggcgtaagctatgtttccgttgtataaacaagctctagtttgcccttgaaaataccatgtaatggttctgccattatgcatttgcgtaaatacgttagcaaaattattgtacggattaacaacatatctattaaaaatcgagccattttgtcctatttcctgatgtgggcatggcctaagaactccatcgtttgctgatgccgttcctattcctccggctagtactactgctaatgatccaatttttaataatttctttaacataaacattctcccataataatttcaattttaatatattgtttatcaagttgaatttaacaatgcacgataaatcctaaaccaccatcagatgccatagcaattttaaaatttataaactggtcatatatttctttctaggttggaaatgtaatttcaactatcataatttatgataataatgttattattaacaaattggaattaaataaattatatcctcagccagataaattgaacaacattcactcagttcattttttgttgttatttaaccattatttcattagcatattcatagaaaacctatcctaataaatattaattttagcattaagatatgagggatattataaaaacaatgggcactgtaataaattttattcattctccggagtcaatatcacctgttattaatatgcaaaagctaacacgtgtttatcaacatgatggagaaggccaagtccccgttctgaacaatatcacagcacaaatttatgcagggcagagttgcgctattgtcggtacgtcaggttcgggtaaaagcactttactgaatattctcggtttgctggataaacccacttccggagaatattttctttgtggcgttgatatgtcatcagcagacgctgatatgcgggccagaatgcgcaataaagaaatcggctttgtatttcagagttttcatttattagccggaatgacagcgacagaaaatgtcgcgttaccgctgctttatcggggcatttcagcttcgcaggctcataaaattgccagagaaaaattgggtttggttgggctttcacacagagaaagtcattacccggcagacttatctggcgggcaacggcagcgtgtcgcacttgccagagcattggtcggagagccttcattgctgctggctgatgaacctaccggtaatttggacccgcaaacagcagaagaaattttatcgttactttccactcttcacaccgacaatgcgatgactctggttgtaataacccatgatgcgatggtagcgaaccatatgcagcgcgaattacgtatgagcgatggtcagttgcatgagatcagaggaacgacaatgcatgcatgataaaagtcagcctagtcattatggcatgtcagtatttatgatgtggcgggaagcctggcgtaatttaatggctacgggaaaaagctctctgcttgctttgtctggaattgcgattggttgtgcatctgtcgtggcctttctgaatacagggcataacgcgacccttgcagcgttgaagatgttcagcgggttggatattaatgtgatcacaaccaatttctattcttacaatcatggcattgatagtgaagccattaagatagacgcgctgaaaacggctattccgagtttatcttccgcagcaccctggatctattactcctcacctgtgcgttataacgggaaaacagaacacttcaccctgataggttccacggctgcacttgaggaagttatgttattacaactgcggcatgggcgatttatctccgattatgatcgtcattctccttatctggtgatgggcaatgatgtcgccgtttctctcgtgggagaagacacatcccaaatacttggcaagcagattcagcttggtaattatctgtataccgtgattggtgtttttgaaacaaaagggcaaaaccctatttttcctttttctctggattccgttgtcgtgattccgctcgaaaccatgcgtaaaatatcacaacatgctcagttgaatgggctgattacccgttcagccacaacttcgacaacagaagcggatgcagaaaatttgtctgcgttttttaagaataagtttcccgaggttgaaattaacgttcgcgttgctcagcaattgttacaagggcaaacggagcagggtaaaacctttacttttatgttgatcgggttggctggtatctcactgctaacgggcggaattgcgatttctaatgtgatgttgatgaatgtttctgcccgacgaaaggaaatagggttacgcatggctttgggggcaagagcactggatatccgacgcctgtttttgtatgaagcggctgtattgacttttaccggcgcaatacttggtactttagtggggattatcgttgccttcctttttgtcctttactccggttggtcattttctctggctccgatatccatccctttaggaataggaagtgccgttatagcggggcttatctccggcttttatcccgctcataaagcctcacaaatggaacctgtacaggcattacgtgatgattaaaaattatttcatttatggtgttctgactctgtgtctctgtttttctcaagccggagtttctgaatctgatcacagtctggatcgtaaaaatacaggagaagtcatcggcctgtcgctgagtgatgcaatatcgctgggcttacggaataactatgccattcgcagtgtttatctggaccgtatcgctcagaagtttgatttacgtgtagcagaagaccggtttacgccgaaattgcaactgagcgggcgttatattacgggcaaaaatcaggcagagaatttcaacaaaaccagcctgtctcctaacgccacattacttacacctctggggacacgtttcacgctgtcatgggcgcgtgagcacaataagtcaggaataagcagccttcacaatgatggcgcaagtattactatgatacagcctcttttacgaggagccggaacagatgtgaataatgcaccggttttactggcaaaacttcgggaacaaactaaccgtctgaatttaaaatcgacaatttccgagtccattacacaaattattctggcctatcacgcgttactccgggcgcaggagcaacaggctttgtctgccgcttcccttaaacgtatgcagaaactggtagagacgaataaggaattgattgatgcaggccgaatggctcagacagatatcatacagacacaggccgatttggcgatgcaggaactctcagcaaaagaggctgaaaataatgttcatgcggcaaaactgacactcctgaagctactggctctgagcctcaaaacgcctatccatgcaacagatactctgaaagggacttatgtcaggctggatgttgagcaatcaattaaaaaggcacaagctcaacagccgggttatcttactcagctactttctgcaaaaaccgccgatattcagttattgcaggccagagataaccaactctgggatttatcactggttggcagaacctcccagtatcgttcctcttctgctgacacccgaaactgggaaaattatatcggtatccaactggatatcccaatcggggatatgacaaaacaacaaacggaagttcaggccagagttgatgttcagaagcaggcattacatctggaagaggccagaatcaatctggagcagagagtaacgaatgccatccgtgatactgaatcacgctggcaggaatatcagctagctataaaggccagttcactttcgcaacaaaaacttgaaatcgaaaaggaaaaattacaggcgggaagatccagcaactttcaggtactgagttttgaaactgacctgagaaatgcggaaaatgcccgcctgaatacgcttatccagtacctcaatgctcaggctgaactggatcaaattctaggtacaacactggaaagctgggagataacgattaatgaataaacactcagtttttaactactccatgcttaggcgttatcggtgggtcatcatgggagtgctggcgattatagtctgtttttggtctttattcacttcaggaggattgtcctcagaaaaatttcccgctcaagacgctgtacagtggattgctataaatccctctccgatagaaaaacgattggacttggtaggtaaactccagtccggacgccttgaaactatccccgcgccatttgaggggattatccaacaggttctggttaaagaagggcagaaggtttccccaaaccagaccttagtcacgcttgatacccgaaaaattgaaatagaaattcgacaggctcaggtggaaatgattaaagcctcatctgcggttggagaattacgggactgggaaaacagtcaggaagtcatccgggccagaaggaacgtcgagaacgctaaccacatggtaatggagcttaaaaataatttggcaaaaacacaggcgcttttttcacggggaattgtcccgagaatggaagttgaaaaccttgaacaacaacttcgtcggcaactgacggaacttgcttcagcgaaggatgatcttacatctacccgacaaaaaggcagtgccagtcatgtacaagtggcagaaatggaacttaaaaataccacaagccgctatcaggcgttacaggaacaatacgcacataaggaaataaaagcgccattttctggtgtcatccttaaggcacagcagggagaaaagggcaaatcattcgcaattcagacaggtgtgcgggtcacagaaggcatgcctttgctggaaattatggatacaactcagtttcaggtattagcgcaagttgaagaagcggatctcgtcaaactaaaagaagggctacctgttaaaatcagcggcgaagggttttctggctattctatgtatggaaaaattgaaactatcgctatgcaaagctcaggcaacgatcagcccggaacagcagtttattatgatgttgtgatcaaagtgacatcacccataaacacgaattatctcatcaggcccggtatgagcgctaaagtcagtatcgttatttatcacaatgagcagggagtagtgatacccgaaaaagcgctgtcacgtgacaatgatgggaatttgagcgtaagctggcgcccggatttaaaaaatcaggcaacttcccgccagataacagtcggtgaggctatgccggaagggttagaaattcatgggctggaaaaaggatttattgcattatcaccctgagaaataaagttcaagttcgcccagcctgttacataacggttttgtaaatagggggaaacttcaatctggttagttgcgatattttcggcacctaccgcatcaatagcctgttgcatcagagcaacggtaaagtttgaaacgccaatttcgcgtgtcagccccatttttttcgcttccagtaacgcactcatggtttcttcaagactaacggcattatttggcgacggccaatgaattaatgtcaggtcaacataatccgtgcctaatttagcgagactttctttgaggctcggtatcactttctctgcgcccatattatcagtccagattttagtcgtgatatagatatcctcacggactacaccactttctttaatagcctgacccactgctgcttcattttcataaatctgtgcggtatcaatcgcccgataccccaattcaatagcattttttactgatgcaataacaacatcatctttcagacgaaaagtacctaatccaaacgcgggaacagacataatcaacctcgtatagtatttgatatttgtgattacgggttaaattatcccttaaaaagagaattattcataaatttttctcaattaattttttaattagaaaaaatataattttttgaaatgcgtcgcaaaaaaaggatgaaaagcataaagcatcgtagaggtgcttgtattcgaaagagacaacgttcattattaaaataatcacacaaagtgatagttttaacatgttatcgaattaattaataaaattatcccattgccttgtagggggttgcatgttgtctcatttcctaaaacaggtccagaattatccggaaaaaatcgctattttcacacctgaaaaagaactcagttatcgaactcttaagctgcattcagcgacaatcgcaggctcgctgcgatctctcggaataacccatgaagtgcctgttgccatcttgttgcctcctggcatagaacaaattacgagccagattgctattctgatggctggtggaagctgtgtacctcttgatcccaatgtccctccggcacgcttaaacgatatgctggaagatctggctgtgaagtggacgattaccgattctccagagaaattttcccagttaaaaacgacattcgtttcattttctgatttacttgcagcgggagaggagctagctgataccgatattgcttgtctggccccaactcatcgaactcatgtactttttacctctggtacaaccggtaaacctaaaggggtacaggttgagagtaaaggcatcatgcgggtgattgtcgatgcgggatatataaatatcactccggaagaccgcatagcctgtacctgcaactcaacatttgatatatcattgtttgaagtatggggaacactgctcaacggtgcaacagctttcattcctcccaaaaaagatgtgctggacatagaatattttcagtctgaactgacgaatcaagaaatttctattgttttcgttgcggcaacacttttcaatctgatagcaaaaacataccctcaggcattccgtgaaattcgctatcttgtgataggggctgaagcgctcaatgctcatacggtgaaactggttctggaagccggcgcgccaccccagcatattattaatggatatggcccaacggaaagtaccatatttgcgctttcacacgatatcagactggaagatttggtagatggtagtgttcctatcgggagtcccataaaccatacctgtgcatttgttttagacgataatatgaaacctctggcacccggcaatttggggcaactctatctcggtggtgaggggctttcacgaggttactggaaccgcgctgagctgaatgctgaccgcttcgtgcatgtttctattcccggatatccccagccaatacggctttataagacgggcgatctcagctggcagcgtgacgatggtgtctttatgtactctggtcgtatggacagtcaggtaaaattacgtggtcatcgtatcgagctggaagaaatagaagttcgtcttctggaaagtaaagaagtccgtctgaccaaagtttgtgctgtgaaacacgaagataaagatcacgaaggtgaagacgattttcttgccgcttttgttgtaccgcgctcaccggaaacattcgatcaagaacggcttatacacgaactggaggaatatcttcctgcatatatgctgcctcgtattttcgtcatcgaagatattccgacgacaccgcacggaaaagcagaccatcgtaagttaatggctttgctggaaaaaccggcaccatcagaggagcgcccggcaggttttaatgataccgagtatgcagtatttcttatctggagcaaaatcctgaatcatagcgaaatctcccttgatgataatttctttcagataggaggaagttccttgcaagccgcgcgccttgtgattgaacttgctcgccaattcaactagcattttatggtacagaccctttacgaagtaccaaaccttcgacagcttgccaaaattatttcacaaggaaatacgattcctatactggatgatgaagttaaggaatggctatacgatgggcaacttccagcagatatcaaaccattgcctgaagcacctcaaaactgggcagagcttgccagtcccaccatttttctaacgggtgtgaccggttttcttggggcatttttcttacgtgaactgctcaccttcaagaagataaaagggaatataaaaaatataatttgtctcgttcgggcaaaagacgacgatacggcattccaacgtattgaaagtacgctctccaagtacgggttatgggaaccttcgttcgcagggcgcattaaagctatcgcgggtgacttatctcaatcaaaattagggttaaatgacaaactccaccatgaattggctaatacatgtgatgtcgtttttcatctggcagcgaatgttaactatattcatccttatcgcatccagcgagcctctaacattgagagcacactgaacattcttcgtttcgccacacaaggtaaagccaaagcggtgcattacgcttcaacgatagccgtatttggtccggtgggattattgaacgcaaggccccgagtttacgagaatgacagccttataccttatattgaaggtcttaaatacgatatcggctacgcacagagcaagtgggttgttgaacaactgatgttgcaggcacgggaattaggtatcccattatctgtttatcggcctggttttatcatgggggatagtgttcgcggtgtcggtaaccctaatgactttgttgcacgcctgataatgggatgtattgctatcggagcctgcccaaaattaccactacagtggaaagaatttgttcctgtcgactatgtcagtgctgcgcttttaactatcgctgcagatacaaagaacttgggacaggtgtatcaccttgttcctccggaaagagaacaatccgttagtgttgataagttctttcatcttctggaagagtgtcacggatctccgctgcaatcacttccttataatgagtgggtctccaaactcacttctgaccctcacttgcacgacaacgcgctgttacctttattgccaatgctttctgagcgtgtctatcagcagttaacacgctgggaggtcagcgaaaatatgccaatttacgactccagaaataccagcctggcattggctaatgcaggacattcagtgcatttcaccccgatgggaaaagagctactctcaaaatatcttacttattaccttcctaactaacattttctgacgaagcagttaattataaacggggctatataacacagccccgtttagcgttataccttgaaaatgcaaattatccttagccgtttagaaggccttgagtcgcatctggatagcgatttccaatagccacattttttgaaaatgtgctggagagttcatccaacacgccttgtggaatatttatatccgccgctttcacattttcttcaagatatttcctacgcttggtgcccggaatagggacaatgttttcgccttgagcaagaacccaagcaagtgcaagctgtgccggtgtgcatccaacttggtgagagagtgttttaacaatgttgaccagttcgagatttttgttgaagttctctctctggaagcgggggctggtacgacgataatcatcttcagaaagctgattgatatttgttaatgaaccgttaacccctcgacttgttacattgtttggctcccgaatgattccgaacttagttgccaggataatattgtcacggactttattgatggctttaccaatgagttcttcattgatataaggtccatacatatcagctgtatctaagaagttaatgcccaaatcaatagcgtggtgaatcgttgaaattgattccttatcatttgtaggaccataaaattcgctcatccccatacatccaagtccaatggatgaaactttaggacctttattacctaagatgcgagttttcataaaaattccttatttcaacaatgggtagtgaatgtttttcaaacaatttaattatggccaacaattgttatttgttaaatgaccttcaacccttaggcggctcatcatctgaaaattgaattttaggttggctcagcggtacgtaacagttctgcatagataccatctttttcgaccaactgttgatgggttccccattcttttaactgaccatccttgagcaccaatatttgatccgcatgacgaatagtggagaggcggtgcgcaatagagataactgtgcgttcggatgccatttgtgccaaagccagagaaattgccttttcggttgtgttgtcaagcgcactggttgcttcatcaagcagcaggattggcgggttacgcaggatcgttcgagccagcgcgaggcgctgcttttctccgcctgaaaatcgatagccacgttcaccaaccttagtctgataaccttcaggcagcgaaacgatcaaatcatggatttgtgcagtacgcgcggacgcaacaagatcctcatcactggcctctgggcaggcaaagcgtaagttttctgcgatgcttgtattcatgagaaatggctcttgcgtgactactccgagtacgctggcaagttgttcaaagctcatctctcgaaggtcaatgccatcaatggtaattcgaccttggctcggatcaacgagtcgggccaatagataaccgaaggtacttttacctgcacctgtaggtccgactatagccacatgactccctgccgggatatctattgacacattgcataagcttgacatgtcagtaccatcgtagctaaaactgacattttcaaatcggacgtgaccacgtgggccttcattactgagatctcgaatctgagcaggttctacaatgtcgggaggggtgtctaagtatttaaaaatacgtgtaaatagagcccgtgtcgtacgcagtttgaccgcattttccaacaaattttctaagggccacaacaattgttcctgtagtgcgatcaaggctacaagcgtaccgatagtcacaggcacaccttgtccaatcagtaagccacccaacagtaatgtcatcgctggcatcgcaccgagtaggagttcaatcaccgaccatgaccactcaccggcagtatgtgcacgcacttctaaatgtaaggttttggacgatgctttttcaaaacgctggatcagaaaaaaactgcgtgccaaagtacgcgacaggataatgcccggcgctgatagggtctcttgtacgatagcagacatatttgcatgaccatcttgttgttgatgcgtcaggcgttcacgcatgaggccgactttgtggctgagccagagtgatggaggcaagacggcaaaggaaaacagtgcgagtcgccagtccagtaacaacatcgcaatggcggtggttacggtaatggtggcactgcgaatgatttcggtcaccgtattgctaacgacagattgaagtccgccaatatcactggcgatacttgattgaatttcgcctgtccgagttcgagtaaaaaaggcaagagaaagtgtttgtagatgcccgtagagccgtacccgcagcccgtgcataatggcttgacctatctgggtagataagatcatttgtgccgcattaatcactgcgtttagtgcggtaatcacaatcaaacctaatgctaaccagacaagaagctgtatattttgttgcggtagtgcagtatcaataatttcgcgtaataaaaaaggtgcaagaacaccgataccagccccaatgacgatgagtaaaccaataaaaataatacgtcctcgccaaggtttaaatagggtcagaatgcgttgcaaagaaacatggcgtgcagaaagtttttcgtagtcgttaaaattatccataaacttcattatccaagttttcactcaattaatagtattttttccaaaaggcctgatgctttctaagaagtcgaattttggcattccgcgcagtcatcttctgaaagtgatattcagataaagaattatttgtttccagaaacaaaacgggcaatccggaagggttttaattccgcctgttcagttccatttataatctcttcttgtgccagtcgacatatcaatggtgcaagtgtaattgccgtatgcatactgatcatatataacccttgataatcagccacttttccaacgatcggcattccatcatctggcattggacgtataccaacggaagcctgttctaaacataagctatcacttcctataaaagactcctttatgagagttagggctttctgagcaatacacatagcactatgctccggttgatcacttatataatcttctgctgcaagcagccttgttcctgataccgggcgcacttctaaatcgggggttgaaataatatgacgtacaaaaggaatgttagcctgatgctgatattgcacaatgatagaaggggaggaagacaggtaagcggtttctcccagtgtttccatcagagaaatagtaccgacacccgctgttagcactacctgttcagcatggatggtttcctgtgacgttgtcacgccagtgatctgttttccattatggttaatggaggtgacttctgtttctggcagataagtcaccccgttgtttatggcttcctgcaaaagaaattgcgttgcgtgaatcgggtcaaccgcaccttcttccattgcaaacgctgcagtatcgggatagtaagaaagctgcggttctagcatcagaagctcatcttttgtcagagatgtaatcttaaaacccgatttattatgattatcaataaattgacgggttgcatattcagtttcttgccagctgatagcaccacaccaattcacacttaattttccgtttgtctgcttatccagttcatgccactcattcagtgcttgttgcctgagtttacggtcggcaccgggcttaccatgagaaacatttagccatgcgaatgactgtttagttacaccgttacccaacaggcctttatcaataaggataattttgcttttgtcgccactagataaatagtgattagacaaataccatgccagtgttgcaccgacaaaacctgcaccaacaataacaattttattttctttcattgttacggctcaccgatataattatgattgacgtggctgaacagcactcaatggcttgatactcattcctttaagcatacttaaccatgcaagaacgacaagtcccatctggatgataaataacaaatgaggtgggagttcggtgagtacaataccgcttaacatcggactaaatgcgccgccaagaaaccccagcgtctgagctgaaaaataactcgatttcatgccttccggcgcaatattatcgatcaacatatactcatccggcgcataaattagctcgcctagtgtgaagataacggctgcaatcccccaaaggtaaaggtttttgtccgcgaacataaataccgctatgcctataaagaaaaagacactacctaatgtcatcaggtttttcagattttccggacgaatacgcctacccaccgcatactgtaaagtcaccaccaccgcagcattaattggtaatacaacaccgataacggcttcagctaaggtgctatcagcaacggtcaggacatattgtgagatccagacgataaaagagccgaataccagtgagccaagaaaagttgaaagaataaaccataccagtgcacgatctcttagcatcactgccggatcccactttgtggctgaattttggttattttcggcagttctgactcgttgaacatagcgctggataaagacgataggaaaagcagcagaaaatgcggcaaaccaaaacggaaaattggcactgtacatcaaaagccatgtaccgattggtgggccgatagtccagcctatattaacaaaggtatagttcagcgaaaaaattttcgctttcattgacgccgacaaggtatcagcaaaataacctttcagtactgtcgcaaataccgtataggcacaatttattagagagagaaaagcgacaacttaaaaccacagataaatgcgataatagctaacagcatgtagttttttttatcaaatttatcggccagaattccaaacccaagactaaagagtatacctatagttatagtcaaagcaatgcttatcgaaaacccgacctgattaacaggcatctgatactgacgggacagatagatggccataaagggaattgttgctccacgccctatagtcaaaagcaaagaagaaatcagtaacacactggttgatatatttgatttggagaacattggcacaccctgaaaatattttttgttacgctactgttaataaatagctaagctacagtgttttttaactctaggaaatacttcagacggggcaaaagagtgaaaagggtaaaaacggcattttgcatcatatatgtgttcattagtaagtggaagatacgaaataacgtgtgccgacaattcagaatagataattatgctggtggtttttacagttgtttttgattgcacataaaaccgctatgtacacgttgtttggttttcgggttgaaaatgttataatcatagcgttttcttttacatttaacatgtccaaatctggcaaatttactctttcaattaatccactatgtaaaagactttccgaacaaatgatttttcttcgttataggtatgtctctaattagtcttctttgctttagaatcaatcggtaatatcaattttgcattttttacatcattagactccaaactcgtgaatgatactttttcgccgtataatccgggagaacacaatgagaacgttgatttacgccatttccattttttgcatgtcctcaactttggcactagcatgttcaacacattcaactttttattttgaaaacgaaaatgccaaagtgaaagcatcacacatttgccctaagggagaactcccattccattcccatcaacatccacgagtcatcgtttctgacagagatggcgagcttgatgtggtttatgaaagcggtagaactgacaaaattattttgaaaaaaggcattcctgtttatctggatacacaacaaggtttagaacctcataaagatattaatccaggggaacacctcctgaatattacggttgtcgaactgatgagcgcacaataaattcaatattttcataccgctccagaaatggaaaagcggggcggttttgagtcaatcagggcgatcttgctcaaacaaacacttgctataattattcccattacaaaaatgtgggagagacgttatgcgtcataatattagcgaggttgatattctgtttgtcgccggattcggtcctatcactcaggatttttcgaagagtaagaatttttatcaggatactcttggattacctttgaaaacgatggatggtaataacgattatttgttaattgagtccgttacgcttactggtgtaaagcattttgcgctttggccactctatcaggcagctttatcctgtttcggcactgaacaatggccacaagatttgtctatcccacaaagctggattgaattcgaagttgctgatctggatacggcgacaaatattttacttacgaaaggatggcaattacttgttaacaatcgacaggaaccttgggggcaacgtgtgacacggcttctcagcccagaagggatgctggtgggtgttacagttacaccgtggttgcatgactaacgtttaaatttgaacaataaaatgcaagaaagccgacaagaacaagctttcttgcgattgtaactagcccttaagttctcgcgcgcattgctggaggctctgaaatgatgtaaagcgaatattatgatgttcccgataggattcgctcggttcatatgtgcaatcaatattagagaaacgcgacatcgcctcaccaacacttttacatacacctccggcaactgcccccaaaatagcggatccaagtaaaaccggttcacatgcctgcgttgcaatgactgtcacatcacaggtatctgcaatgagctggcggactaaaggatgctgaccagcccctccgctgataacaatattgtcaattgtagcgcctgatttcgcttgtgcttcgattatttgtcttagcccgtaaccaataccacatataccggcaatataaagcgaaagcagattatcgaggctatcctccatccccaatccagctataacagcgcgagcatgaggatcagcaaaaggtgctctgtttcccagaaattcaggaacaacatgtatgccttttgccagttctacagcttgagaggctgattgtgttttttccagaaccctatcggctaaaaaaaccggcaaagatttttgtttttcttttgccatcgctttggctgctattgcggcagggtgaaaagacaatagttgatcaatggcggccccggctgcactttgtccaccttcgctgagccacatgcagggtaccattgcagaaaagtatggtccccagacaccaggtataaagaccggctccagagttgtcgtcatcgtacaggaagaggtgccgaatacataagccatattacgtgttgcatcaccattgataccaactgtcccgatgcctcctgcatgtgcatcaatcattcctgcggcaacaggtattcctgccaataatcccatctgttttgccgcactttctgtcaggccctgaccacaaggtgtacctggttcaataatgttctgtccaatacgataaaaattttcatctgccagttcagacaaaccaattttccggaaataatccgcatcccagcgcttttcatgtgcaaggtaagtccatttgcaggtgacagtacaagtagagcgggaaagggagctggtggatttccaggtcagaaaatctgccagatcaaaaaattgccatgcgttatcaaatgattcacggtgattttctttcagccagaggatttttggtgtttccatctccggagagattttaccgccgacatagtcgagaacagagtgacctaacgcattgatatgctctgcctgtactgttgcccggtgatccatccagacaataatattacgattcggatccttactctggctgacggaaattggctcctgatcttttcccagaacaaccagtgagcaggtagcatcaaaaccaatgccagcaacttgttgtgggacacagccagagtgcgacatagcttccctgatgcaatagcagacagcatcccagatttcacggctggactgctcgacaaaatgggtgttatcacgataaagcgtgatatcgcgtttggcagatgacagcatgttaccgttcatatcaaaaataccggcacgggcactgccagtgccgacatcaacaccaatgacgactttgccattatccggtctattttctagattaatgttcatggttatccttgctacgaggctagaggtctacactgtttggcagaataaccaaatcacggatagtgacatttctcgggcgagttagcataaatagcaccgcttctgccacttcaataggctgcatcaggctaccattttccagtgcctcttccattttcgctttaggccagtcatccaatagggcggtgactacaggtcccggaagtacggcaccaacacgcacgccatgttcagccatctgacgacgggtagagtgaacaaatgcctgaactgcaaatttagaagcggtgtaaataggttcccagaccaccggaaccacaccagaaatagaactcgtaaataatacatcgccagatttctgctcaataaaatggggtaacacagcacggacactacggaatgcggcattaatgttcaggttgagtaccttatcccaaacatcggggtctccttcagcaacaggcccaccgatataggcacctgcgttagcatggaaaatatcaagacgcccggcttttttcagtatttcatcaagtatgccgtcaacctgttctggcttcatcagatcaataaccagcgggatggcattttcaccgagttcagaaacgagttgcatcagacgttctttggcacgatcaataagaactactttaacaccagcctcaatcagtatccgtgcacactcaagaccgataccagatgctgcgccagtgatggcagcgactttattttccagcgagatagccataaaagaaaactccagcaatttttttgtaaggataagagggtgttactcaatcgatgtagcagtattgcgactttcctgctttagtgtcaatctgaggattggagattcaaagatgcacagaatagtggttctgattagctacatatcttaaaattcattgtgtaaagaagcactgccgatagtaaaagataaaggagaggtcatttatgttctctcctttatcttttgtattttctattggagaacaacaaattaatttctttaaaaaagatagatttcctaatttttaatagaaaaaataatactttcatcccttcatgctataataaataatgtgggagggatttaaagttacaccataaatattgaacttacccatttcatcatttaaaaagcattttttattatttaaattgatagggtaactgatcccacttcattcatatttaaatgaataaatcacaacaattttcccttctaataatagagctaatttcctctagataaaactaatgttttcaagaaaattaaaggagttaattattataaaaagaatgtcatttaggatattaatttttttattatcgatatttggtttttctgttttttctacacatgcagatccttctgcaagatcagcagacattactatttataacaatacaagtaaaactctcacaatatcatcaatggagttgcttcatggtcagtgggcacatgaaccaccatacaatattttctccaacagttctggctattttcgctcagaatctaatggggttcttactggtacagagggaatagtaaaatacagattacgagataatagttctatgtttactattcattgggatattccgtattgggaattcgtttcctatgaaattaattcatcttctcctttgtataagatatcccgtgaaggaggagatcatggaaataatgttcacgtaaaaattacaatagaagggggtgctaatttaaagcccctctaattcctatgaatgtagctattaatttaaatgatagtaanacaaaccgagctaactaaaaacacttaacggcatgagtcaagtctttcatc

SEQ ID NO: 116 - DNA, 33001 bp, Xenorhabdus sp.
aaatgcgttcccgctgctcgcgccccttccatcagtcagtgatttctgacatcgacgtaccaaagttttcgacatcatcaccgccttgcctgccagctcttcggcaaactggagatgaccgacggcgttagcgtggctggcaaactgggtaaacattttccccatgtaaccggcggtgtcgctggcactgcttttcagggcggcggcggtcgtgttggcaatcgtggtcatctggggcaagtcactgtgtgacagcccgttgaccgccttgctgatttccgaagcggactgcacaaactcaatggacgatttgccatactgggaactgaatgtcatggcatctttggccactttattcatgacgctgctgtcaatgccctgcaatgaagccgatttcagcgcttcgtccatttcaatggccgggtcaagaaagctcttaatcgaccagaacgaggcggccaaccctgcgccgccaatcgccagtttgccgaacgcatcctgcgaagactgggcaaacccggacaccgccgctttcgcaccagccagcggttgtgtgattttatcaatcaggcttaaggtaaaatttaattcctgactcatggttcacccctgaacgccagcgcaataccatttgccgtggcaatgcgcgtattttcccaataacgattatctaaccagatggcacgggctaaattttccgtattatctttttcatgcggtaaataatgacggcgtaatattaaggcctgttcaaataaactattctcaattgccttaacccgtgcatttagttttttatttcgatatccagtttcggcgcatattccgcattgactctttctacaatctgcatcgccgcgccggggatttgcaggagttcatccagtgcggctttcgaggctggctgcacaatgcggcgcaggtaagtgacaatcgggacaattttattgtccagcgtcatgtcattaatcatgctgttataagcaataatattcggttcaaagttaatttctttttccgcgataattaacgtaatgactttattttcttgactcatgagtgaattcctttctcttattaatttcgtccactaattgattatgccgggcggcgcaattgccatataacgccggataatccattaaaagattggctatattatttccggtcgtgccggttaatgtcggtaatcgtgtctgacattttttcagcaggttttcctgataaggttcgcccgatgctgtcgaccgtgtcgttgtacagccggacaaactcagggctaacgcacacagcagtaaaaacaggcttgaccacttcagtacggatttctcgtggggcggcattggctatcccctccagtttatcttccagttgccgggcggaggcgcgggaaatagcttgcaactcctgtcgcatggcctcttttgcgttggctgctgcccgtgtgatattcagctcgaggctgtcacggtaatagtgattgacacgccagcccgcaccgaacgctaacgccacgacaacaacataaagcatccgggcgttaagcatcatttcaccccgttatgttcgaatgaaaaatgattgccatcgggacgggaaaaacgcccaccccatgtgccgccgagggattcccaatattcccccagaggtaaatacacctcactgcgggtctggtattccccccggataaacagattgagatccaccgccagacgctgggtatgcagactgttggcaatgcctgtcccttgctgtgcattgcgttttgcctgctccggggtgcggtaggcttccccgaacgtgacgcgataaccgcgctcatcggcccataaaatcaactgggccaccttaacagcgaatagctgctgtttttcactgagtgtcatttctttagcttccctgtcagcaatgcgctcccgcgcttacgtaaccagacctcaattaactgatatccggcaatccctaatgcgctgccaatccccgtgaccgcaatcgggctgatgcccggccaccaaatcagcaatgcgcctgccatcactgacaccgccgaaccgagaataatacggccgataaacagccgtaaggtgatcggttcattgccggtcagcattttgcctaacgcaatcagtgcccccaatagcacgagcgtcacaaacgttttttcatgctcttccatgagttctgtccttaccctatcaggctttgtgtcaactcggcttccagatagggaataccattgatgcgcacaaaatccgggctggtcaccacaaacttcactttgtgggtcatgacgctgccgcctttcgggtcaacgtccagaatgtcgctgacaatcagcttgcagccgtaggcctccaccttgatttcttcgttcccggctttggcgtaccacatcaggtcaacaggctgaatgccccgccatgacccggcgctgcgcgctttcgcggtgacgatttccagatatttggtactgagttcaatctcaccctctgccgccacatccccggcgatatagccatccggtacgccctgcgtctgggcggcggcggtgttatcggtaatggacagattgaccttttcggcatgcaccagatccccgtccatattaaaatcaaccgactggcctgaaatacgttggctcatgcgcttttctccagactgctatccagcaacaggctcacagaaatgcctttcggacattcgtaagtgcggatagtgatataaatttccaccgtgtttttattgcgccatgtgatcacaacatcaccgtctttcggcgatttcacttcccccggaaacgtcacgccgttaatttcggtactgcgcgacatttcacgtaaggtgcgggcgaaataagcctgatgggtggcggtgctgcccggtgtactgttcagactgcggtcggcaattttggcaatcgcctgcaaacgcacacggcgagccactttatcgaccacacgcagattttcgatgctctgataatcgccgccttccacatccagcgtccggccatccgaccaatataggccgtcatagtcgggataccacatcggcacgctgaaacgcagtttttccagtgcctgcaaggtggctaaatcaatcgatttgccggtgccatctttcggaaaatcagacgcgcccaaatccagcaaaggcccggtttgcacccgtgccgggctgtcggccacggtgacagcgcgattgcataaacgcccggccagtacgcctgcctcattgccccacagacacggcaccaactgcacggaggacacggcctcacccttttgcagttccgccagacgggtgacgtaatcggcccacggctctttagactgggggccatcgaccgacaggatcgcccactgccagcgaccaaatttagcgatagtattggcgcgcagagtttgggcggccttaatcacgtctttggtcgcaccgctggtcagcacataaccttcaacactggcgatggtctgcgccgcaataatcgcgtccacaaacgcccgttcgtcggccagttccggcagaatatgcacgtaccctgaccagttctgcccggcgttggccattgctgcccgtacctgacgcttgagggcggtatcagtcgtccccaataccgcatcaaaatcggtttgggtattgacggcaatggtcttgccgacgttggttttgcctgttcccacgaacagcaatacccgttcaatctccttggtttcgccttgcagttggttaacctgattaacctgaacatgtggccacataatgtcatcctttattgaggcgcttaccctgcgccatatccaatcccttgtagctgacgagccagcgctttgctgaactcgtcatcattcatgcctaagaatgcacgggcagggatagtgatttcccactgacttttgatctcttcgccacttaatatgcggatcattgtccctgcctgaataaatttcatattggcggtgatttcttttaccggcggtttacgccagcgcttacccttcctgacctgataacccaaatcacgcagctttttagcctgcttaatggtcgccatccgctcacggtcaacggtctttttcacctgtcgccgactaatccgaacactcatcccattttgctgggcgtatccgacaactccggcagggacttgctgagggccattgcggtaatgtccaccttgcagataaacccgtaccgcatcaatttctggcatttcccggatatgtaataacttcggcatattcctgagcattttcttgcgccacggactttttctggcagcccagctttccccgtgctggtgaacgctggttgcgcacattgcgttttgccgcatcaatcagcgcatattttgcgatacgccataacagacgttgccgcttcttttctggtagatcaaggctgcttaatgcatcctgcaactgcttaagctggttccggtttaactggccgtggatcatgaccgtttcccgatgtgcgcgccggtttcatccacgctatgcaccgccccttgttccgcgaaccagacttcggtgctcgccagtgaccagcgtttaccatcaaacgggatcatgccgttggggtcttcccgtatcaccacaggctcggctaaagacaatgtgacaatgaccaccgccgtagcaccgtccacctccaccgtcagtgagggccgttcctgctcaacattggcctcattcacactgtcgccctgtccggtcagccaactatcaatcagcagcgggatattgcgtgggtcgcactctccgtaagggaaacgcccccatgcaatcaccgcctcatattgctggataaacatctggtattgtcccagccctaaatcccgttgtgccggaataaagcggatttcgtccatttcgctggtaaattcggtttcacaaatccgttttggcaggttttcccgcaaaaatgcggttaattgctgtaatttgctcatatcaaacgtaccgttgttcggctcttccctttcatactgcgtagtgtcaccgctgattcagccaacaggcgtttttgtacgtcggggctttcctgccccggattgggggcacggctgaccagtgaggtgtattcccccagtaaatcggcctttgctctggcatacacggctcttttatactggctgaccagtacgttgctaccgttcatcgagatacccggcacaaccgcagcagactgataacctttggcctgcaagcgtgatttcaggttggctaaatcaaggttgatttctgccacagtcgccaacagtgcattagcgagcatgtcgttatccaaatcggctggcagtttgcgattgacctgaaactcccgcaggttcaaatccggccagaagccgtcattggtcagcggtgcgtcccggtaatccacggtattgccattaaacatcgacgttcctccctgaagaaaaagtgggctgtccggtttccacagccataagcaattaattgctatgcctccaccgcgcccactccggcttgcggtagtcgttattgattaaggttaagcgtttcgtttgtcagtgcccgcaagcgggcagcaatgcgttgccgataggttttcacccccgatgccggattgcattgatgggcctttgccagccagctatcggcctgcgccagcacctccggactgtccacgctacttgccttaatgtcggcgttatccccttttaacaggcttaacgccgcgaatttgtagtatttcgctttgattttctcgtgaactttccatttctcggtgacattgtgaaatgtccgtgaaaaatagggttccacggagttcccggcttcggcttcccgttgtgcccaaagcaacacggtgtcggccacgaacgccggaaaaccgctgcgaaaattatcgggggtgagctgtccctgctcaatggcgatatccgcccagtccagtccctgactgaattccccgatatcaaataaccaaatcacgcagtaggcgaaaatcggattgcggtatacttcgccctcatccagatagcgctgtgctgtcggcagataattgggcagcagttcccgccgcttcatttcgaccttttctgctgtcagcgtgagctggcgtaaccgcttcacatcctgctcaatggcacgggcttgcaggtgcatactagcgccatcggcaatggcaaccgcttgttgccgtgccagcttctggcggagttctaccgctgcccggtggcgttgagcaggtgacagcattagtctgtacccagtttttcagccggttccgccaccgtgccaattgtcacagcctcttcatcataagccgcgtacaactctggcgtttccagtgcataacctttcgttgcgcaggtatttgttttcgaactgcttacggtcatcgacaaactccgccttacgctgacgggtattgcgctgggtcagaatttgcaggttcggcaacatcgtcaccaccatccgtttacccggcataaagggcggcaccatcgccggacggccagcaatcgagctgcccagcatctgtgccgcgattttttccgttggtctgtcggcggcctgataaagccggtactgttcagcggcaaccaaatccgcgccaaccaacaccgttaaacgtggatcatgacgaaactgctgcggaatgcaggtgttaatcaggtcagaggccattgcatccagtgatttaaaatcgccgtgctcatccagttttactggcgtggtaatgacctgagagccaccgttccactttttggcaatctgatgccagccttcgttaacatcctcgccgttcgggttctcatccgggtcagtggtatcagcggctcgctgaccgttaaagccaatacgcagcatatccagcgcaaacgattcattggtaaacgcctgcatacgctgtgcaaactcctgttcactgccggagttcgcccagatggataacaaatcccatttcagggctgccccagaatcggtttccaccaatttgtattcattgccatccacacccgtagctcggatgaagcggccatcttttttacgcccggtaaacagtcccggattaccgaccgacaccacctgcccggagaggtgatccacatcggcacaggtaatcatgttcagaaattcgaccgactccagcagtgcactgcgcagagcggtttcttttgggtcactcagggcgaaataacgtgaggtatccgcaaccccgtaggcttcagctaatcccacagagtagttctgcaaaaatgcccgtgcccgttgatttaattgcatagcgcttccctttgctctatcaagcgttacagataattaaagtttttgtttttgtcgccttttggattacgtgagggcagacgggtaacaatcccatccagcttgccgaacttcttcaggatattgggcagattgtcacgcaaacgggcgaattcttcggtatccaccacttctttgacggtttcgatatcgtcctgtacttcttccacttcttgctcagtagatgcctgtgccgcttccagcgctgccagtcggtcttccattttggctaacgtttcagcgatgacttgtaacggatcgtcgtctgtgggattctcaattggcgtctcttcctgctcttcaatattgaagagactgcgccatgtttttttattgcctttagtacccttcgccatctttattcccttttgtttaaattccctgacttcatcaattaccagtggcttataggcaccgaatcgatgaggttttttgtttttactaaactgtaggcgggtggtgcccacactggctggcgaatcagtgactgccaacccttccagataggttttgcctgtcccgcgaaaattaccgttaagggtaaattccacggaggtaaacaacagttggccgtcccggttggcctctaacaagcggtgattgggtcgcagttgcgcatagagacgcaaagctccgtcttccccgtgttcggccttgaccgcgagcacttcccccatcgccccgaaccagcgttcgtgttccggccagattcgggcggtatacagttgagggtcgtagagttcggcggcttccaagatccattgtggttcgattgcccgaccatcaacggtgtcgccctccatggcaatgcatatccagttcgtcattaactgagacatatcgcattcctttcgtttgcttccctcacagtattgcggatccaaaaaaatgctgcgacaggcgcaatgcgattgaattcggatatggcgtataaccgaattgaaccgaagttggttgggcgtaaggggaaaattagccctgcataatgaggactgagaaataaaggatagtcaggaaaaggaagaatggccaaatattcagatgaattaattaaagtggcaaagtcgctgtacctgcgccgctatactccggctgaaattgccgctgaactcaatctgcccaatcgacggattgtgtattactgggcggaaaaatggcactgggcggatatgctcagtcatgaaagtgtgattgaggcgattgaccgccgactggtgctgctcagtgagcgcaataataaaaccacgctggaattggacgaatatgatcgtcttgttgcccatcatgtgaaactgatagcacaagagaataagcacaaagaaaaactggctgacattaaagcgcgggcacaatcgggcaatgagggggattacgttgcgaccggagacggcgaaccgaagaaaaagaaacgctaccgtaaaaatgatatttcagcgctgacagaagaagatttccagacctttgttgatggcaatctgtttggctatcagaaacacctgcgcaacaacaaacataagccaatacgcaatatcttaaaatcgcgccaaatcggggcaacgtggtattttgcgttcgaggctttggaagatgcggtactaacgggtaacccgcaaatatttatgtccgcctccaaaccacaggcagaagtcttccgctcttatattgtcaattttgccgaacaatttttcggggtgacactgacgggtaacccaatacgcttaagtaatggggctgagctgcgtttcttatccaccaataagaacaccgcccaatcttataacggccatctctattgcgatgaatacttctggatacctgattttaagcacctgaatgaagtcgcttccgcaatggcgactattgataaatggcgtaccacttatttttcaacccccagtgcgaaaacgcattccgcataccccttctggacaggtgatgcatggcgcggcaatgatgctaaacgtaagaatgtggattttcctacttttaatgaataccgcaatggtgggcgcgattgcccggatagccagtggcgttatgtcatcacgatggaggatgccatcaaaggtgggtataaccttgccaatatcgatcgcctgcgcaacaagtacaatgcagacacctttaacatgctctatatgtgccagtttgtggacagtggtgcatccgtcttcaaatatcatcaactggaaaaatgcggcgtcgatatcaatctctgggaagatcacaacccggatgcctcgcgcccgtttggtgagcgtgaagtctggggcggttttgacccggcccgctccggcgatacctccacctttgtcattgtcgccccaccgctgatggcgggtgaacgctttcgggtattagccacgttctactggcagggcatgaactggaaacatcaggccaaactgattgaagcgctgttcaaacgttaccgttttacccatatcggcattgataccacagggattggtcacggggtttatgagatggtgcaggacttcgccccacggcaaacgcaggccatccactacagtcagcaaagtaaaaaccaactggtcatgaagatgatcgatgtggtcagcgaagaacgccttgagtgggacggggaacaaaaagaaattctggcttcattcttagctatccagcataccaccaccgccaaagggggcgcaatgacctttgtggctgaccgttcgcaggaaaccggacacgctgacgtgttctgggctattgcccatgccctgatgaatgaaccgcttaaccacgagaagaaacgcacctctaaatattcattttcaaaggccacacaatgagcaaaagaaagttcaggaagaacgccaaagcatcacacgtcccgcattcacagcggaaaatgagcattatcacactgggtaaacccgagccgatactcacttccatgaccgattaccagaaaatctggtatgacaatgattatgatcactacaccttgccgattgaccgtctggcgctggcgcaactgaccaacatgaacgggcagcatggcggcgttctctatgcccggcacaatatgattgcctcggattatctcggtggcggtctgacccatgaacaattccggtcggccatgatgaatttcctaattttcggcgatgtggccctgctgaaagtgcgtaacttctggggcgatattgtcagactggaagtcttgccgtccctgtatctgcgccgccgtaaagacggggattttgtgatattgcaggagggtgagcctttggtttacaccccggaagaagtgatttttatcaagcagtatgatccccagcaacaggtttacggcctgcccgattatatcggcggcattcatgcggccctgctcaactccgaagcgaccattttccgccgccgctactaccacaacggcgggcatacaggcggcatgatttacatcaatgacccgaatatctccgatgaagccgaaaaagaaattgagaacaagctggcccaaagcaaaggcatcggcaactttgaaaccatgtttgtgagtattcctaatggtgacccggacggcattaaatttattccggtcggggatatttccgccaatgatgaatttgccaatgtgaaaagcatcagttcacaggatgtgctgaccgcccaccgattcccggcggggctggcaggcattatcccgaccaatgtcggcggactgggcgacccggaaaaagcccgtgatgcttatcgcaaggatgaagtgatccccgtgcagaatatgtttatgaacgccatcaatagtagtgatattcccgaaacattattcgttcatttcaagaaagataacgacagttcgagtgcagaatgagcaggaaaatggtaaaatcgaggaaaatagacacattagggaaaagaaacatgcgtgtattaaaaataatctgccctgagtgcggcgctaagtcggttatccgtaaaaccaaccggatgcatcgccagatcgctgatatttattgttcgtgttcagatgtggaatgtgggcacacttttgttatgaatttgacgttttcacacactatcagccccagtgccaaaacaggcgatatcctgttgcagactgtgattaataacctcaatccgcaacagcgccaaatggcgttagatttgctgcaaaccagcgccgcataagttcagttttgagccactatttagtggcttttctattattatcatttcatttttggcttgttcgaccagttcccatatccagttcagcgccacttgcctgtctttatcattcaaattatccaaaccacccatccgagaaagtaactcaacacgttctaaaaaaaccaatcgttccaaatcgtcagacatcatttccctaccattcgttatattacatttgccatactgtatatatgaacagatgaaaactaatataattattatttgtattaatttcattaagaaatagttaattatgtgacttcctcaatgcttccagatatttctgctaataaccccttataatgcccttttggattacgcaaaatgtctttaacatcaatatttaaacccaaatttttgcttaatctactcaggatgttttttgttctttcaacgtgcggcggtttatccttgagcagatgccttagtgtttttttgacagtcattttcagccgtttcaaggcgtaatggatagcaggctgcgtgacacccaagcattaatatgattctgctatagataatgataataatcccggttttagtctccgggaaactaaagcaggccaacaatactggagcctactctatgactgggttgaaaaacttgatgatgctttcttcaaaaaactgcccaaaaccgatatcgctaatatcgtgatgtttattggtgaactgacagacatatggcggggatttatcccactacttttcagaactggctaaggttgttataaagcctttagcgtcataatcagacaataaatcaaataaaaacaaaaagataatagacttcatcgctataaatcaactaactgatttatatatataattattttataaaaaattaatttatgcttgtaattacttattggtaatgataataattatcaattcagtttaggtggatatctttagatattatgactaatttttgctcaaaaacagccaagggattactggaatgatttatatgtccaaagacttcgaagaattgctcaatactcttatcgatcaacagatcaaggcggcgggtcgtcagactgaatggtttgacatggatgccgacgcgcgtgccgactatatcaagcaggtaaatgaacggttgcaagaaatgcagcagagtaccctgagtgtattggccgcacagcattttcagatgcaggaaaatcctgtttctatcgaggatcatttgcagacactagagagaagccggcaggagttggacaaacgacctaacacgccggcgagagaggcctacaagctgcaactggagcgcgatatccggatatacagaacgcagcagtcggccataacacactttgacaacgctaggaaaaaggccttgaatattctcagtgatgctctccccttggatgcggagactctgagaaagaacgcagcagacaagcaggctcagttagataccgagatcatgtctcaggaagagtttctgaaaccgcttctggaacagcaactcactatacaggagaaggctgaccccgagttaaactcaaaagacgtgaagcgcattttagaaaagttaagctcaaaatacgtgaaacacttttccaatctgcaggcctacaagtatgtcaaaactcgctacaacgaatttctcaaggcaacccctacggaagaagttgaggccctcaacaagctgaccaaaataccccaaacctccgataatctgccggtaaatgtttcactgttaatgatggaggaacgtcctggatacatccgcatgagtgtcgctctggttgataccagccccgatggacgcttcaaggacttcttcatgagggacggcaggctggtcgtgccggagggcagggtattcaatttttcctttggtactccggcccgttccctggcttggcaacaacaataccggctcaagtatgagccatccttgcgctccccgacctatgcaccaattcgctcagtactggtcaaaatcaaattcgtcgagaagtttttcgctaactatctggtttcggaaaactccgagcgcgaaggcctcaaggagcattttctggataacgatcgcaaaatattattgagcaacgttgaccgcaaggtaccgaaccaaataggaattaaggtgtcgagcagatccgataagtttccattggctagcaccttgagtgacttaatcaaccagaatgctgatatcaccagcttccggactaccagcttggaggattttcgcaataacagttatgacccggatcgtgatgggcttttcactcatatccatgagctggaacgctcggttggttttgccgatcgccagtacttgctggaaatgccacagggcgaaacctacctgtccgcaacgccctttttgaagataagcgttgaaggcgacaagatcgacagtaagcacttgactcagacgcagactgccgaattgtatcaatacaacgccgcatttttcgagaagctggatctattgcgagactatggtgcggaagccagccatttgtttgaagacagcagagaacgcaacgtgttcgagcagcaactggtgcgtttgctcgaacgcaaccacatcacccccgcagcggtgttggagtcgaagaacttcaatgccaaaacgcgcgatatcaagggtaataacctgaacaagatgttgtgggaaaaggaatttgccacttcggtctgggaaaacatcgaaaatgacccactattgttcaaattggcgaataaactgaatactctcgtgttctcctccaagatggtggacaagatcctagaaaataactatgtgcaaagtgacatcgcccaatctaaggagttactggcacagcagtacgaacaatggcgcattcaggccatcgaagaagaaacccagcggatcaaccaacagcatccaaacaacccgaaaaaacaggatttcaatcataccgaggttgagcgttcggtgaacaaaaagctactcgccttgttgttagctggtcctgagagccttgagagccttgagagccttgagagcaacgaggtacaacaggatctgacggctgaaaagtcgcgagaggcgctgttgagcaataagggcagaagtctgcgcaaacaggccttgttccatgtcttacgcccggtagccgatagctattccaagcgtgcagtcccgataaatccccatgctgagctgatgccggaaaacggtgaaaacaaggtcataatcaataatcggctgaatcagccagacccgtatctgctcctcaatacccgccctgaagagcgggtatatcatgatggttcgtacctaatcaaggacgataagtaccgtagctacaaccaattccgacctgatcctgaaaataaagccacgcgctacatgaatgatctggacaccccgtttataggcggaatttcaggaactacccagactgtcagcaatgtcttaccggaattgtttgatggtacgttgagtgtaaaggaatactggaacttccagatggccaatgccgccttcatgatccataacggctatcactcgttctttgaaaccttctacgtcgctgcacgttacgaaccggaagggaagggcagtatcggcaaggacatgttacagatgttcgacaagtaccgcgatataggcaaagaaaaaacgttacaggatgaactgtatgttggagtgatagatcttatcaataagggcttaccagagtctgagaagttccatttaccacattttggccgctattttgatccggagaatagtatatcggagaaggtaagaacagtaacaccaggtaaatcagttcctaaaagggatatggttaatccaccactggaaaataatccagacaatgcgcagattgatatcaggctgctggcgatgcttaatcgtgcagaagattttcagcaggcgatggagcagctgtacagcaaaaatgcactgtccgcagaagaatggctgccagtactgggcagcctcagggaggatgagtcccggcccggaagttattctttatggtttactaatcgggtacggtctgagcttcctccccggatattcgcgacggatgaccaacgtattatggattttattcattcttatgataaagagctcgagactgtcagaaaaacgcacgagtataccaaagggaaactaacccagcgcacaggtatcctcgaagcagatgctgttcacggactgaataccgcctttatggttaagactctgatcccatggtttgctgatagaaatcgcaccaccgtgtccagtgataaggtgcctaatacgttagagaccgcactacaggtgcatacttatgttaacttggcgcagatggctcatggtgcgctggaggacggcgctaaactcgccagtttgtacagagcggtggccagtgaaggccggggagtgaccagcagcctgttttcatcgctgtcccatgccagcacgggtatcggagtggggttaaatatcgccagtgtgatactggacagcctagaactggcgcatgcacagaatgaaccccagaaggctgtttatggtactcagctggcgtttgacagtgctggcctggtgacaactggtgtgggtattggcgctgggatcttaggtgctccgattgttgctggttttgcctcttcgttggctgtgccactggctggtttgggtatcggttttacggctctggccgaagcgttcggcagggtagccactgatgcacgggcggtaggcaattattttgccgatctggaagccgcttatcagcggggtggataccggcaggcggaaaaagtggcacaagatggcagtcgttatacggtgatggaaccaatccccggcgcagtaatccgtcagctcgatttgcgccatggtaatctgacttttgacagccagtatctctatcgcaacgacccaacttactcatggggttcaggccggagtaattactttggctggtggcccggcaggccagctaatactgataaaaaacaggcaattaatatccgtgaaggcatcggctacaaacaggcgcagatcgacttccatttctctcccagaagccgagacatattgatcttgcccgttaccatgaagtcctacattaattacgaatatatgatcctgcccttcgtcactgctcgcaacgaccggggatttgacgttctgcgacgactggaagaagacggacgattcgactttgatttttatgcttttccctcagaacgcgtggtacgccgtataaagccagaatttgttgaaacaccggttgacattattctggacgatgaagaccgggatattgtcatcccgcagttaccgaaagatattcacgggatcttgtcctactggttgactggcggaaagggcaaataccgtatcagcttgcaggagggtgtctctctgtccttacaggggaatgacaccgctacccattgggtactggatgcccgtcatatccattctgatgataaccccagtttcaacaaagaagataacagacaactgcatattggtaatataaagataaccctgcctgaaacgtcggttaatatttccctgataaataatgcaggggtattttctgtcaagcaggacgaaaagaatcagcagtggcagataaaagagattgaaacgaatgctgagcgatttaacagccttcaggctttgcatgatcatctcaggcagttaagcaattctgatcatcacaacaggccatatgtagtggtggaaaactaccgacactcaccacaggaaagccgtcctgtcggccgtgcattctatgaaaccggtcgtgatcgtatgatttacactaacgtccctgacgcagcagattttctcaacaatgtagagctggcgagcgttaagggcgataaggcgtggttttaccgggataccacgctctggcaagtggatattgttagtggcgaagttctgcggcagtatctgcctataatgtttccggaaagtgatcaggggaaaatcagcagtcacgtgatgcaaagcaatgaccagctttggtttgtagtggaacagcagcgggatgaaaaccttatctcgtatacttatcaggtggaagaagaagcactgaaactggtggcagttgacgggaatacaaccatgctggcgactctggatgaagtcagtaaaaaaatctcgttgcctgttcttctcggttccaatgacggtgagtttaatggtctgctggcaccacaggcagcgactcagaggttaaccgtcgagctctgcgtgccggagcgtcaggtaaaaagcagcccggcggaggtgatcagcctttctgggaaagtcgcgggtgtggacagacattactggttacagactgatggaaaacagctgcaaaatgtggtcagaatgaatcggataaatccggatcaggaggatgccgacatcttagctgagctgaaaaagaaaaatccggacttgctgaccctaacggaggatttcacccgcgttttcaccacggccggtgataaaccgggttattatttttacagccatcagagacatagtctttattttcagcaggataatggcctatccaacaccccggccagcaaggtgtcagttgatgatatcagagtatccatcgtgaacaagcagttggttgcactctccagcagtgggaagttgtggctggcagacgatcagggcagtatccgtctgatcggggtgacggtagactggctgctgcaacctcaccagccgggtctgacggccgcactgagacagctggcacgggatactccagataagttcagtaccttactgctactggggttgcaggacagagacggaaaacccgtcagtgcctggtatgacagtaaggcagatttggtggtgcagggcagagttgggctcaatacagaacacactctggtctatcttggtttagcggaagcggaagatggcaggcaggcatggatttttgacactgacaaccatcagttatatcgccagcctctgtcgacggagactgaccttaagttgagtgaaaagcgggtgctttctggggaacctgccgcggcgaaaccctggctccggaccagccatcaatactctagtgtggttcgtcagggcaatacactccggctggaaaccccggatggagcggtcttactgctgtcagctgatgccaagatgacagaccgtccggtgctgattgcctggcatgtgcaggatcgctcggacagtcaaattgcctctgccattgaggcactcagtaatggggctgaattatcgcaagccgttagactgttttctgagcatggttatcctgcgtggtatctgccgaaagaaaagaaaacgcttcgttccgccggtatacttaactcggatcatgttctgcattatctggggcaggtcgccgggcaggaggccagttatgtccatgaccagactaccggagatttgtggcaaatcagtgaaggagaatccggctccgcccgagtagtggggaattaccgttttgttaaccgaacaccggagaggctggtattgcaggtagggcaagttcctccgggaacaacaatccacctgccgcagctagcggacatcgataggctggctattaccggacgttcagaaaaattgtattactggttttctaaccccgaagtgttggctcattaccaacatatcacgatagatgatcggggtcaggattcaatcatccggttttctgataccggcatagccaacctgtcacggcagcgcagtgaccaagatctcgtgctgcttcatcaggcagcagaagacaccagtatatgtattgtcaatattgaacaggcggcgcagcgcgatatgaggtttgaaatcacgctgaagagaatgaagataattaacttactaagaagaatggccaacttgatggaattaaactctgatgtcagctgtttcgcgctggtatcagaggaaggtgaactcaggataaaaccagctgagtgtacagagacgttagagtcgttttaatctattctgacgaattcagtattgtaacgccttaccgcagttatgatagaactggagttggtgaaaaagtctccagagcgcagtgtttagcaactgggtaaatctgtatctgcccaatgccgtcgctaatattgcatctccaccagcaaattcatacattgctggtggagtgtaaaggcaggtaacgcatcacgtacataagcaatgtcgaaatctttaccattactgatccaagttaagaacaaattgtcataatcgatgaagtgacctaattcgttttgaatgtatttgagggtgtcgctatcgccttcattcaaatctttgagcgattgctcatcaaattcgttttggattaagaactgaatttgcttatcagacaaaaaattatgaaaaatgaagcctaagatataatttttgtagtcgtttgcttcgattttagaacgcatttggttagtcgttgggggagagagagccatgactccgccgccaagatatcactgaatttgtcagccataaatctggcgggtgacaaagtcatccggtcggagatgtaccgccgtcgtcaggaatgggaaatccaacgtgacagtgcacagagagaaatcaaccagattgctgcacggcttgcgggcatgagcatccgtcggcaggtggccgtgatgctggtcaactcgttgcaaactcagcaccagcatacctgcgaacagctggaattgttacagcgtaaattcacctatcgggaattgtataactggatgcgtggtaagctgaacgctatctgctatcagttcttcgatattacccaatcattctgtctgatggctcaggaacggggatattgatacttcacacgccatgagaattagtgatcttgccgggtatctggtgcataaccgccgtcatgatggacaggcggaataccacattatccccagtgtatttgaagcagagatattgcaggggttacagaaaaaatctggctttgaagccttagaagaggccggaatgctggttaaagcggaaaaagatcgctttatcagcaaaaccatctcagtaaatggtactcagggacggtttgtggtgctgattttcagggatgaggattaaccccacgtaagagaaaaaacgttgggataacgggatattgggataagacagatttattttaagatatatcagttagttatagatatttcacttatcccgtattatcccgcactatcccgtaacatcaggtgattacaaataaagtgatatcgtggcaatagcagttatcccgaaaaagattttgctctggcaggcattaattctttgaatttaaagtaatttaaaactgtgaggttatgttacgggataggctgggataacatgggatagagtaactcaatgaaatatataataaatatgccatttaccccgttatcccgtgaaaattggtgcagttatataaagataatcgatagtaacggttattttttcagttctccgggttaccgggttaatgtattagcccggtaacccggagaagacaagcgcagcgcgtcagtgtctaagcaaggaatgttttctggctggcaatcaatttggcaccacaagcagtgctcataccttccagagcaatctgcttaccctgatattttaaagtttcacttccttctactatcggaaatttatcttcacattttgggcaaataactaaatcacccttgcctgcgacaggaacaccttgataaacataaccatcaatggcagtgataactttgccaccatgatcggttttatcgtttaatcggataacagctttatttggcatattgactccctccataataggataaaatatttttatactattgaataaatacttttaggtattcttttgtctgtttttccattaccataattaacgcgtcagcatcagaataatattgcttgaacaatttttcatttaaatgaggcaagaaaatatcctgatcgaattcatgccctaataaaaacatgctcagcgttaagaatgcagattgattggcattttctattccatactgattggatttttcaacaccaagttgtatgagctttttgatatcatcctgtttaatatatttgtatttttgtggaaataagtattttaatatatcattaatgttaatttcataggtattccattgaacatttaaacgttcaatattgatatcttgaaatttaaatatactggctttcagatgttcatctttctcaccatgcacttcattcaaatatcgagtgatctcatgataaagcagacttgttttttctaattgtccaagatgggcatgattatcaaggcttgtttttatccatgcatattgcgggtcagtctgaaatcctgtaccaaacaaaataagcatatcaatataaaactgaacagcccctcgttgatcaaaaccttcgtttttggctgcttctacggcattttccagcgctgatcttaagtcatttttacctaaatttacatcaagatagggataggattcattacaatggactaccaattcatcaatataagcattgaatgagtatttttttagcatattccattggtcttcattaagttctattgccatatttatgatatctccgatcataatagttaccactatagctgccggtaaaatatatttttcatcgtattgaaatcccagcaactatagtttttttaaatttattatttatatgaatcaaccttcccttcaaggtaatctctgtatgtcataatatctttatttttcttatgccattcattttctctgtaaatagaattaaagtgatcgtatacatattctccatcagagttacttctccttataaataactcatacttttttctttatgaataaatttaaccaagaaaaaatcttgaagtggttttagtgactcttcattaaattcactatatatatattcataatttattttatctttcattaaatttaaaaaatccatcatacctatttttttcaattcagaaagatcactaaactcttttgagttatcgatttcatcctgtaatactgttgttatgctcaacattttcaatgtgtctagattatcaataggagtgaactttttattaataatgaaaaagtcactaactttaatatattgaggtgttttcaaccactcacttgcatcaaaccaaacttttttattagggtattctgatgaattttcatcatatgatggtactagcacggccatttggtatttttgcatatagtagctcccaaagaaaactagtgctatcaaaaaaagcattatgaagaaaagttttatgttagatattttcatgtttttaaatcaaagtattttaatttttcaacctatctaatacatttgtttttatcataatcgccaacaccatagctgatggaaaaatatatcttcatcgaattaaaaaacccagcagctatagttgttagaaaaaattatcgtttatatgaatcaatctttcctgcaaggtaatctctgtatgtcagagtatctttatttttcttatgccactcgttttccctataaatagaatcgtagcgatcgtatacatattcatcttcatattttcttctcatcactaatagctcatattttttatctttataagaaaattttaccaaaaagaaatccaatattggttttaatgactctttatcaaattttgtatatatatattcatagctaattttattttgcattaaatgcaagaattttatagtttccatattttgcaattcgtacagttcaggaaacttccttgaattatcaatttcatcctgtaatgtcattgttatgctcaaggttttcaatgtatctaaattttcaataggtgtgaattttttattaattagataggtgtcatggactttaatatactgtgataaatttagccattcactggcgtcgaaccaaatttttttgctaggaaattcagacgaattttcatcatatgaagtaaccctgacatacatctgatatttttgcatatacatatgataaccccctaaagacaatgaaattaaaactattataatagatattcttgtgatgattttcttttttagtaaactcataaagtccactctattggtttataatcttgtagatcattttttaatccttctggtgtatttcctgtccccggcaatcgccaagaaccatttggttcaataggaccaccaccatgatcttcgttatattctcttgtcttaacaccctcaactcgctttttcatcatatcataattattaggtttttcaggtggtttggtatttttattccctttagccagttcatatttatacgctctattatcagcctcatacttatcgattattgaattatattttttttcctcttcagcaccataaacgcctacatatgtagagcgtttctcaaacgctttgacttcaacatcccaggtattcgccatttgttgagctgggcttttatcctgtccagcatccggtatccctgtaaaatcgcctggatatccattatcaactgaaatacccgcccgacaagcataagtagttattttagcatcgaaatcaaatatcgattcatatacctttttaatttcgtctgatccaaaaagcccttcctcaacatcctctccttgataatgaaaagtggcataattaataatgccatgactgaatatcaccatctccttaataagtcttttcttttctttcctctgatttagaaaatcgataagtccttgtttattttttacataaataatacgcccacctaatttattagtatagtcattaatcctatcaatatccttttgcgtatatccctgttgaaacaccaccataatacgttgcacagcatgatcttgacttgatttaggaaaaagctgcaactgatgtaatccagaattaataaaacggtactgatttcccggtgactctttaaaaaatgactcgaattgaactgttctcttagttgaacccaaacttacttcccaaggtgctgttctcgcacccaccacagtaatataatcatacccactgatatacggtttttcggtggttggctcacccgtatttgtgagcaggctgatttttctttcttcgagttcctttaatgaaccaaaactgccacgccttctttcgtaacttttagccagtttaccaaccagtacggtcacttcttcgggctggcgggtcatgatacggtcggtttcgcctttgccattcgttttaccaaatcctctggcgggaatggaaataaaagcatacggcacgttactgacgttaacctgattctcaatcggtaataattttagctgatgactgaatttttgattgcatttcactcccggatcacccacttttcccgcacaattgggcacactggttggatgtgtaactttacttttttgttgctgctcaatacctttggaggctttgtttttcaaatctgagaagacggaagcaatactgtttttgtccatagtcattattttcctttcacaacgtgatgattgttatcaagctgataactccactcttcaatatcttttgtgaactcaatcaattgttccagcgtaaaaatatgcggaatttggtgcagaacacggggatcgtaaaaacgcaataatgcagttttgcctgtttttaaccggatatttaactgtgattcaagatggcgggtcagtttgtccaatgatcgtgttgagtacagccaggaaacggctggagcggcgttctccagccgtaagaatttttcttcccatgcctgagactggttcatatcgaacaaccatggcccggcaaacgcaatttccgcatccgggaattgtcggaacaacggattattcgcaccttcaagataagtcaatttatcgtcaaagcaccgctcatactgtaagccgtctaccagtgcatataatttcatttccgggtaagtttcccggtatttttcccatttttcttttaatgtggctgtcattattctcccctcatgaccatcactgaccccgttgatgccgcttccattaagcaggacaggcaaattttttccggtggtggggtaaccattttttctacctgagccatattaataggtgacagcttatccagcctatccggtagcttaccgccccagcctgagccattgcccggtgcgccactaccaaagttaacgacagcgctgctggtgatcccgcctgagtcgattttcagaaaatgcccggcggcctgaatagttagttcagcccccgcatcaatcacaactttagcgccggcactcaggtgaatttcattgccactttgggttaatagcgcatcttcggccttgatatggagcttttgcccggtggatagcgaaatatcattgtttgcctgtacgcggtattcattatcgatacgtaaatgcgcgtcatttttaatatggtgtgtccggttatggctaatattgctggtttcgtcattcagaatgtgcgtgttcatatctttttgtgcatgaataaacacttcctcactgccctccgcatcctcaaagcgcagttcattaaagccctcccctttatgggttttggttttaaacgtggtgcgggttttttgggccggtaaatccagcggtgggcggttcaggccgttgtaaacgcagccggtgactatcgggcggtcaatatcaccattgagataagacacaatcacttcctgcccgatacggggtatcgccataaaaccaaaaccgttaccgttccagccctgcgcgacacgcacccagcaggaggcgctgtcatcggctttatcgtaacggttccagtgaaaatgcacttttatcgcaccgtctttgttgacgaagatttcttccccttccggcccgaccacagttgcactttcatccccgtctgcctgtggtttgtaatggaatgggggccgccagtcggcataaccatcgataaagctgaagtcgttgctcagcgtcgtgccttcaccgccattgtctcccagtgcctgtggacagcggccatgatgactgatgccgacaatctgccagcgggtattgagcggcgcgtggggatgattttcaatttcgaagatttttcccggcatcagtttgatacagttactgttgccactcccactttgggtctggtttttcagcatttcgtgccggtatttcacaaacggtttaccttcggcttcctgctgaaagcggccatagctctcgtaaatggtatacggtgtcagtgtgcccattgcctgatattccgggctgctttccagttggtacacctgagaaagcggcctgtccggattataatcgcggtgaatactgcgcttcggcgccatgccgacaccaagacgaacctgataaatcacatcctgcccgtgcgccgtatccggttgtggttggtattgcagaggcaggttggccgtcatgcccaaatgactgtcgctgaaaaacagcgtttcgtcctcaaaccagaaactgatcccttcttctgcggccagccgacaaaaaaacgcataatcggattcccgtttctgggtagtgtattcccggctctggtgcggatcttccagttgggaatcagcctgaacatggtgttttttcagcaacaaatccataatatccggtacacgctggcgatgataaatatggctgtcctgattgagcgtcaaacgccagagggacgggcgtaccgtgaaggtataccgggttttgttgccatcggtgccacaccagtcggcatgggaaatgatgccggtgattttgcgttgctccgtttcaccgtggaagacttgtaataccgcttcctgcatcaatagcgcggttaaatcgatttctgtcttcggtttgaaaggattgtcgggcagggactgaaccagcgtcaggttcagggtaaaaaggtcagaaagcccttcccgcagggtaaaatccgctacggcaaaggtattttcgggtaaacttcctatttggcaaaaaaaacgtaatccacttttttgcatgacttctcctgatttttctgtttccgttaatcgcgttacatttcactgcgcaaaccaatccgctgccggaattcccatagcacggcctgctcaccctgccggtaaatttttaacatgatgaaattattccgcacgacaaagcacgtcagcaggtggtcaatcatccggcagaactggtacatcacaccgtcattttcataacacgctgtatcaaggctaatatgcagtgtgttgccattgacggggaggccttgccgggtgaagtcaagacgctcgcctgactgggcatcaacccggataatgccgttgatatgctgctgcatccggcgactgaggatgcgatcatgcccggcataacaatcatacaaccggagaaaatctttcagggcatcggcatggaacaacaagaacggcggacagtttaagaggttaatcagcgaccagtctgattttcccatcaccatcggcggaaaatcaggggaaaccggcgtgatattgcgggcgtgtaaatgggcgggcacggatccctgtgtgagcgtgatatcaccgacaatcagttgcatggcctgctcatggtagccgataacgtgtgcacagacagtctggagggcgaggttatccgctgcgttcccgtccatcccgtaaaaatgtagccggttgtgaaggcgccccagcaaatcatcggttatcagcgcctgaaaatagacgttaccgggttcaccggcctccagcagccagtcacttttggcgtgaaactggtcaattggcacgaaatggcagggcttgccacgtggagcgctgctctgagtgactttctcgccgggttgtttcgccgtctggatactgtccacacggaaaagtcgctctgtttcagccaatggctgcggataacacgatgcccccggtaacaatgaaatcgactgagtgaccatcggcaccagatgcaccgccgggacacaccccaactggaaggcatcgcccagcgcctcgatgggcagctccccgaacaggcggataaccagctcaccggtgccatccgggtttaacggcaactcgcgtgactcattgatatttaaggtcataaaactaaatgcatgaggcaggcagtagtattcggtcatctgttgtaatcgtgaaacaggcaggtcgtcagtgggcaacagggggtgctgtaaattttccgaccagcccagaaagtcactgtgcctgagccttgtttcaccctctgccgtgcgccaatagatctcatcaatgtgcatatccagccacaggcttaactgggcggcgcggttggtatcagtgcccataaagaaagacagctttccgcctgaccagcccgacacagggttgcccgtctgatgcaacgtcagcacaatatcactgtattcgcgggtcttttggatctgcttaccctgcaccaccacaggttcaatatgcaaatcacggcaggtgttaaaacgggaaatgttgttccccgaccacagcagtcaccggtgaattttgcgggatatcggcaattccctgatgaacgccctgatggggggtaaattggatgatcgtggtcgggggcacggggcgtaaggtgtgaggccagatacgccccagcatttcatgggtgatttgtgggatgctgtcctcaacggtactgcgtaagtttgaagacaacagtgcaaaaccttccagcagacgctggatatcaggatcattgggatgttccagaaactcggctaactgcgggttttcggcggcggctaacttcatcttttcgcgcaggtaggtcaactcttgttggtacaaagactccttctgatttttcacgttgctttttccttgcacggagactcaaatgaatcatctatcggcatttaattgaaaatgtttataaatgataaagaaatcaggattaaatcggctattatagggaatattacgttaattaaattaataaattttgacttatgtctgacaggacaacatttttttaaaacagactaaataaccctttgcccctatcccgcaaaaccgctaatatcttttcctacaaaaacgatccatcgcctgtcaggatcgccttcgggtggcgaaataaaactcccgtagcctgaaagggagagcaagcattgcggtacatctgcgcacttttggaagcagatattgtcaggacacctaacccctcgtctggcaatgaaggtctcttaaactaaaagtacgcccaaaaggtgttttatattgccaccaaagtgtattgaacgtggattcatacactgacttttcaaagcaacataaatcgtatttgcctttatctttaatggacaacaggatgggttttgtacgtccagacatcccgttcatctttcgcactatccttgtttgacatattcaacggaccactttttacccctaaacaattaacgcattgctcctgtttgacaccgaacctcgcggcgtcgcggcgttttgccgtacctgtgcgcatttcaatgtccacacgactttagctgaccgtttgctgaatttaaggcgtcactttttgccggttcaccgctgaaagtgacgccgcagccaaataacatcacaaccttgacaggctcacgcctgtttcaccactcagtgaatctgacactgcatttttagattgaaaaaggagaacttgacgatatcgaggctggctttttgccggtggggatgacctgcacacgcaggcggcagtaccgtgtactcaaccgataccccgcaatacctcaacctgcgttcactctggcgcacagatatcgatcaagggcaaagcaggtattttctgttttgccagaacggtcgagcgccagagattgtaggttgtcaggtatcagcaaggggaagacaatgagccgattgattaaagaattaaagttttttgcgcgtcagagtggtggcagccataagacctgtcatgatcgtattcggattgcaggacgtttgggcgcgttgttgttaagcctgaatattcaggtgaaaagtctcaataatttgaaaaccaaacatgtagagcagtacgttgatgcccgtttatctcaggggattgccaaacgaacagtacaaaatgaaatggctgcgctgcgtaatatcttccgcatggcaggccgggaaaagctggaaacttcaccacgtttaagtaatcaggcattgggattaagcggcaccagccgtgccggaacgaaacaggcgatccctgatactacgtttcaggccgtttatcaaaaagcacttgaacgcgatgttggatttgccgtcaccttgaaacttgcccgattgttgggattacgttctcaggaagcggtgcaatgcagtgcttcgttaaaaagctggctaaaacaattagaacagccagagccgaaactgcatattgtcttcggtacaaaaggcggccggccaagacaaacccgcgtactgggtattgcagcagtaaaagaggcggtagaacaggcgatggctattgcagagcaacgcggcggaaggttgattgataaaccggatctcagacaggccatgaattactggcggacacataccacaaagatgggtttaacaggccgctattctcctcatagtctgcgctatgcgtgggcacaggaggcgcttaatttttaccaacagaagggttttagccgtcaggaagcacgggcactggtatcaatggatttggggcacggtgatggtcgcgggcgttacgttgaacgggtttatagtcgttcaacttagccgttcagttattgagtaagttaaaacaatcagttaaagtattcccgccattagcaaactctagtggtcaaggtttagcagccttgtaaggattacccattggtagtaagtatttctaccagtgcgtctgcgctcaccctttcaatggtggttcaggcaggggaggcttcggcctcgccggatggtaatccccggtctgctaaccctgctttgaatcaccaccatcaatattaatgaatggaaggggtagcaggaatgaataacaacaatcttcaaaatgactggcatcaggccgacattattgctgcattacgtaaacggggtacaaccttagcggcggtttctcgtgaagcgggactcggttcatcaacactggcaaacgcattcagcagaccgtggccgaaaggtgaatggattatcgcaaattaccttggcatacatccctcagagatctggcccagccgttatttcgattctcatactggagaattattagaaaggaaagcccgctctcagccacaggaataacccacttcaatttgtgatcaatgtcgtaaaaatgaacattttttatcttaagccctgagcgtaaaatggtagtaaaatctgaccatttttaaccctcaaggctttttttctttaaaataattgaaaagcacacaattaatgatataaataataaaaatcagtaagatagtaaaataaaagtaagaaaaaaatattggggcattaaaaggggcataaaatcaaatatagataatataccctttatattcaattgattatatttatttcagattcctgatattgcacacaaaattcccgttccgggtgggcatggcgcaggctgaagaccatatcgcggataccgtgctctttcagaatattggtgataatggccgcaatgttcagttgctggaaaatacgcgaattctgacgcagcgtggtgcgccacaggtccgggcgaatactcatctggtaggtggtctggtgcaacccggtattgccctgttcaaagctggcaacgataccggtgatactccggctttcaaccccatccagtgtgattgtcagcgtggcagcgcggtcgagtaccgcaggaaagtcgatggcagggtcagcactcgccagtccgacctccagctggaacggctgggaaaaatgctcattcagggtaaaatcagtgacgacaaaggtttctggtgccagaccgcccgccgtcagggtaaattgcagaccgctgggggcaccatcactgagaaactgactggctttttgcagggctttggtggcggcgctgtgacccccggcggctttctttgccagccccggttcgtgcccaacgaagctcccggttgtctgctgagccagccgggtggcttgttgcccctgctcaaacagggtctttccctgctgaagttttgcgatgtgctttttcactgacataggtgtctccctgagatgatgatggattacgtgataattgtcggctatcacgtccgggcacaacattgaaattcgtccggcgttgtctgtgacaaacgggaagatgaaaacatccatcggctgtttttatatcgggcaccggaaataatctgaaaagacgcacagaccggactatttcgtttaatgcatgaaaaataatcaggagaggaaatgataaataaggcctgaatgaaaaccaaatgaaatcaagcgaaataaaaaacccgccgggcaatgaccgaagaaaaagttaaaattattgcgcccttcaggtaatgcgctttgtttttatcaatagtgaatgcattggggtgggaatt

SEQ ID NO: 117 - DNA, 37380 bp, Xenorhabdus sp.
tgtgctctaaagttattcatttcgttggtagggacagcacttccccaccgcaaattgtttttcaaatgaaaatttaccctacattttctacctgtttttgttcccggataaattttattacccaataaatcagtgacacaatcagcaggaaagctccaccaaccatgagtgaaaaacgcgtatccgggttaatcgccatcccaatcaatacacaagacaagaaaatcagtgtcaggtaattgatataagggaaaagtatcgatttaaacgggtgctgtttcagggcttcctgatgatgctgacggaaacgtaactggctcaccagaatcacaaaccacggtaccatccccggcaggacactggcgctatagacatacacaaaaacagactgtggatttgggatcaaataattcaggctggaaccggcaatcagacaaccaatagtgattgcaacacatctgacaggtacaccatttttcgatagcttacgcaatgaagccggcaactgacgattttcagccagcgcgtacaacatcctgcctccgctgtacatgccgctattacatccggaaagggccgcagtcagtaccacaaagttaatcactgccgctgcagaggcaataccaactttagcaaaagtcatgacgaacgggctgccatgactgcctatctcagtccatggaaacagggtgacaacaatgaaaatcgccccgacatagaaaatcagaatacgccacagaatattgttgattgcttttttcagggtaacctgtgggttcttggcttcaccagcggtaataccaaccaactcgacgccctgataggatgcaaccacaatacacaatgcaaacaaaaatcctttccaaccaccggcaaagaaaccaccatgagtcgtcagattatcaagaccgatggcttgccagtcatttcctaatccaaaaaatatcagcccaataccgactaaaatcatcacaataatcgtggtgactttaatcattgcaaaccagaactcaagctccccatacagccgcacagcagccagattagccagtgccaccagactaaccgccaccaaagccgctacccattgtggtaaatcagggaaccagaattcagcatagactcccacagcggtaatttctgaaatcccgacagaaacccacatgaaccagtaaccccaggcggtcaggcatccccagtagggactgaggtatttatgaccaaaagcagcaaatgaaccggtaacaggctcaagaaatagcatttcgcccattgaccgcataatgaaaaagacaaaaagaccggcaataatgtaagccagtaaaactgaagggccagcccatttcagggtactggcggagcccatgaacagcccgacgccgattgtgccacctagcgcaatcagctcaatatgtcgcgcttcaagtcctctttgcagcccctgctcgggcagatcttgtttcgaatcactcataaaactccctatccatttttatggtgtctatatttatttgcaaacagaaaaaatacaggaattaataatcaacggttgtgaagataagttgtaaaaaggcagggatcaaaacacgttttgcctatcagtgaaataaaaaattgtaaaatcgagtcaacgaagatagttaaatgaagtggactaaggtaagacagcccactgcaccatccctaacattaagacgagcacagtgggttaacagcaattaaaatatcacctacagcttaccgctgtagtaataccccaaaaacctcaacagtttgatttgccggcggatacggctaggctgcgacaacagacgataaagccattccagacctaagttctgccagacttttggcgcacgcttcacatgcccagtgaaaacatcatacgttcctccgacccccatatacagtgagccagaatgcacttttcggcagtcacgcataaaaatttcctgccttggcgagcccattgcaaccgtaacaatctttgcaccactggcacggatacgttcaaataccgcattgcgctcatcagcggtaaaataaccatcctgactgcctacgatattgacgttccactgtttacgaagtttatttactgtctgcgtcagaatttccggtttgcctcccaccaaaaagaccggagtaccttcacgtcctgcgcgctccatcagggcttcccataaatccgcgcccgcaatgcgtgacacctgcgcatccggatatttacgccgaatggcacgcacaatactgatgccatctgcataaagatattccgcttcatccagcagcgtgctcagtgccttgtctttctcagcagtaagcactttctctgcgttgatagccatcagtgttcctgtcttgacctgtccatcctgaaaaagatgatcgaggaaatgtgacattccctgaaatccccacagctccagaccacggatacgatatttacgaatatcattcagcgccatttttgctccttacatccacccgagcaggtgtttctggtgatacagacatattggtgatgacaaacttccgaacaagccctgcactatcgaacagccagtacagcaattttgctactatcaggcacagaccaaagacaacaccaaaaaacacaacacgagaaacaaaagaatccataccttcacgggcaaggactatcatgttaaaaatcgcgccaaagcagaatgcctgtaaaatagctgctttataacggtttgcttcctgtttcccggcttcataaatccagtcaaaccacttgataatcaggccaacaacaactgccccaagcggtataaaaaacacgccccccataacaaccagcgagcctatcagcgtaggggaaatcgctaaaccagagtggttattcaacacatcccaggtaaaataattagctgtgttccagaccagattcggcctgtccggccagacccagcccggaataaaaacatagaaatcccggataatcggggccaatccctgaaagtcaattttgctgtagttatccagtagcaaagccagattttcccacggagaaaaagtatcacgggtcaaatacaggaaagtataaaacgcttctgctccgctcacatcaaggctataacgcttcagggccagccagaacataccgacgatcccaataacaccggccataagcagcatccacaatgtaatccagccccggacaataccgatgaacagaaacagtgcaaacgcaataatgatattggctcgtgtccctccgacaatcacataagtcagaatgccgaacccaacggttcccactaagaataacagccaacgcgttttggtcggtttcaggaaaaataccaccagcatggcggggataaagaagtagaaaaagcgtttaagcgctaccccggaaaccttactggaaaagatctggctgtacgactgtagcttaaataacagaaaaccattttgcaggaagaaagagccaacagaaaaaatggctatacccgccaacaaaaaccacgccagattagtctccacccggttcatggtgaacaatggcttacgcggaacaaaaccactcgttgcgctctccttctccgatacccggtacctgagacgtactttataactgacataataaatggcatagaaacaagttgatgccaatattgcatacagcagtgaattcgccggtacgacctgaacatcaaactgaaaaaccagtatgcatgtcagtgggaaaccaaaataaaaagtcagcagataaagcagtgagaaaaaaatattaaaattaaaacgaacgcgctgaaattcttgatacgtcagtgtcagaataaaaatcaacgagattgcataaataacaaacagcccaccaaattgcaccaacgtcattgcagctctccagaagcttccagcagggcaattttccaccctttgacaaagttaggatcaaaaaaagcgattgccttcttatcgagagacagcatctgacgctgcgcttcctgcacccaatgcttatacagttcatcaccatcaaacagaaccggtatttgctgttcggctaagtcctgccagaatggattctggcggctcagaacaaaagggaccccctgttgaatcagcaggcaaagcgttcctattccttgctgacgctgaaaaataaaatagcccaaatcacattgacgcagtaatgataaataatcatcaaatgtcattttttctttcagtattcggatattttcagcccggaataacgataatgcggcctgttctacattctggatataagcctgattattatcgggataacccattggcaggataagccgggcttctaaaccaaactgacgatgaattttgtgtagtgcctcaatatgccgattagattgatcacctgaatttcccagtaaaatggtgatcccttcaggtgaaaataatttgtctttcactgtcagcgaaggcgtcatgcgtgttgggaaatagagcagtgaagccggtactcgcggatgcgatttcgagaaatagttaagatccccccgtgtcgcaaatactctcccaacccgcttctgagccagacggcgcaatagatagaacacacgaaatttaagctggcgggaatcctcatacaaatcagccccccacacatgccaccagaattgatgacttttgatttttccggctaataaagccagccacaagcctgcattgaactgcccatgaaaaaagaagcgcttagcccggtcttcctgtgccattacgatgactgcctgcgataatactgctttgttttcataagttgtgatagttaaagcaggataattttcagttatccataaagggtcttgccatgaagcatctttagccaccaccataaaatacggcttggctgaaggcttagtttcctgtgccagtacgtcattaaaaaaacgcagtaacgtttgattgtgatgcgggatatccgatcccaaaacgtggattaaggttgtcatgctcgtctgcaataaataataaatacgctacaacaaaggctaaaataaacgacataggtcgccatataagattgtgctgcccccagcgccccatttatcgggatcagccagtgagaaaagccggtcagcaacagaaactggctgacttccgccaatatataaaagcgcagggcggcttttgctatcaccagatagccaaaaacataggcacaaactttcagaacatctcccaccagctgccatgcgaatagatcccgcattgcggtaaatttatctgaaaacaatagccagataacaaagtcacgtagtaaccagacggaaaaactggcaacagccaccgcgggtaatacaaacttcagagcctttacgatctcactggtgattttatttttactttccagtcgagaaagggtcggtagcaaataaacggtgaaagaagctgtgataaattgtaaataagcatcggaaatactgcttacaccctgccaaatccccacttcttcccagctataacgctcagccattaagtttcgcatcatgatgtaagcgactggcagtgtaatggaagtcagcaaggccatcagcgtaaacttccccaaatggctggcaatgacgcgatcccatgcaggtttcagtgctgacaatactatcgttttgcgttgcagtaacatcattcctgccggcaagaccaccaaagcggggactaaagccagaccagccaatgcaccttcataggcccccagccaataacacaggccataagccatcacccctgtcaggctgccgagtataatggccagtgcatttccctgagcatcgcggaaccctttcaaaatagccagaaaatagttggcataagcgattcccatttgaataaatgcgagcgcctgcacaacagttttgtaatggttgtgaccaaacaggctaatactaatagcgtcactgaataaaaggaaaactaccgcaagcagggtagaaaaccccagaataattgaggatgacgttcccaatatagccttgagcttttccggctcagagtggtgctccgcaacatatttggtcacaccattgaaaatcccggcaccagacagtactcccagaacagtaatgagctggcggaaatttcccgcctgccccacccctgccgggccaaaggagacggccagaagtttaacgaccagtaaccccacaccaattttgattagtgtggagccagccgtccagactgaggctttggcaagtgacatatcaggcaaaaaattccttgatgcgactgatgacaatctgttgttcttcatcagtgatattgtaaaacaccggtaaacgcactaggcgctcactttcacgggtagtgaagcggtcttcgccatgaaaacgaccacatttctcaccagccgggctggtatgcagtgcaacgtaatggaataccgtcaggatatccgcctctttcataaaacgattaaattcactacgttctgccacatctttcagtttgatataaaacatgtgggcattgtgttccagattttctggcacaacaggcaaagtcagcagccctttatcagccaatggtttcagcgcctgataatagttattccatagcgtcaggcggcgatgattgattttatccgcgacttccagttgtgcccacagaaatgccgcctgtaagtcagaaagcagatagctggaaccaatgtcacgccaggtatacttatctacctgcccccggaaaaactgagcacggttagtccctttttcacggataacttcggcacgggcaagcatggattgatcattgatcagcgttgctccaccttcgcctccggctgagtaatttttagtttcatgaaagctgaaacaaccaatatgaccaatcgtccccagcgcacgccctttataggttgacataacgccctgtgcagcatcttctacaacatacagattgtatttttctgccaatgccataatggtatccatttcacaggctaccccggcataatgcactggcacaatggcgcgggttttatctgtgatggctgcttcaattttggtttcatcaatgttcatcgtatccggattaatatccacgaaaacaatggtagctccacgcagaacaaaggcattggaagtcgaaacaaaggtgtagctcggcatgatgacttcatcacccggctggatattcaacagtattgccgccatttctaaggaagcagtacaagaaggcgttaacaacacttttgttttatgaaaagcatcagttttctgcaacgcatccggacaactaaagcgtttctccatccactcttcacaacgtttggtaaaaccaccatcaccacacaatttcccactggccatcgcctgttgcatatattccagttcagtgccgacaaccgggggtttgttaaatggaatcatttcatcctctgtataaccaatatgcagtgctttcaattgttgcaccactacgtgtataaaggcgcaaagccgtgatgttgctgatttgcgttgcaattctcaggcattgtatctcatggttatggcaccattgttgcgccgctgacattaatttttttccgatcccctgctgcaatttgcccggcattgccgccagcaaacctatccgtgcttcatgacttcctatctttctcatggtgacaaaaccagcaggattgccacactcatcattaacaagcaggcactcatggtcaaaggtgcccaaaaccgccttctcaacccatgtcgcataaaaacggccactatcattcacctgataccagggtgtacgaaagcgactggttgaaaatacgctggccgccgccgctttaagtaacggaatatcctgtgaggtcgcggttattaatgcctgagctctgcctgctttttctgtgctaatagataaccgtaaatctgcttcaccttccaccagggaaaagcccagcgctgataattgatcaatcagataaacctgctgagccggcacttttgcctgtactaaagcatatttatccagtttagccgcagtgactgatacagcagacggtgaagaggccgttatgatattcagacgggcagtggacagaccaaagaattggctgtcccatgccagaggttcaatatcagcgtgaatagacattgagtaaatccagcaaatattggccatagcctgttttagtcaattctgccgcagaagccctgacctgatcatcactcatccagccattacgccatgcgatctcttccagacaggcaattttgaagccctgccgtttttcgacagtctgcacaaacatactggcttcaatcaggctgtcatgggtaccagtgtccagccaggcaaaaccacgcccgagcaattcaacattcagctcgccacgttccagatacatctgattaatactggtaatttccagctctccacgaatggatggttttacccgcttagcgaaatccacaacgttgttgtcataaaagtaaagtccggtcaccgcccaattggattttggctgtacgggcttctcttcaatagaaagaacgcgatactgttcgtcaaattccacaacaccgaaccgctcaggatccataacctgatagccgaatacggtcgcgccatgactacgggccgcaacactttgtagcttcggactgaatgcctgaccaaagtaaatattgtcacccagcaccagacaacaagggttatcaccaataaactcttcaccaatcaggaatgcctgcgccagaccatccggcgaaggctgtactgcatagctcagatgaatgccaaaacgctcaccattacccagtaaacgtttaaaggcaggtaagtcttcctgagtggaaataatcaggatatcgcgtatccctgccagcattaagactgacaacggatagtagatcattggcttgtcataaataggcaataactgctttgagacgccgcgtgttattgggtacaggcgtgtgccggagccaccagccagtataattcctttcatgtcatcccccagatgggtttatattcgataaaccttaagttgcaactgataatatgaggcgaattcttatatctccccgcgtcgcggggagatatcacactcatcttaaagttgaatgggtttatttatttgatcaaactgtccatcatgttcagacaaaccaaggcgttctcccgcataagagccatcctgcaccctgcaccaccagttttcgtttgccagataccactgcactgttttacgaataccggattcaaacgtttcctgtggtttccagcctaattcacgctcaatttttgcagcatcaatggcataacgcatatcatgccccgggcgatctgtaacgtaggtaatcagctctcggtaatgcgccacaccggctggtttttccggcttaaactcttccagcaactcgcagatagtctcgaccacgtcaatattacggcgctcgttatggccgccaatattatacgtttcgcccggtatagcctgagtcactaccagatgcagcgcccgtgcgtgatcttccacatacagccagtcccggatctgttttccctcaccgtagacaggcaaaggtttacccgccagtgcattcaggatcaccagagggatcagtttttccgggaaatggtaaggcccatagttattcgagcagttcgtgatcactgttggtaaaccataagtgcgtcgccatgccctgaccagatgatcactggatgccttggatgctgaataagggctgctcggtgcataaggtgtcgtttctgtgaaaaagccctcttcgccatgcagatcaccatagacctcatccgttgaaatatggtgaaaacggaatgttgcttgtttttcctgatctaactgctgccagaatgcacgagccgcttctaatagggtgtaagtaccgatgatattggtttcaatgaatgccgcaggcccatcaatggagcgatcaacatggctttccgccgccagatgcatcaccgcatcaggctgatattgctgaaaaatacgttccaaagcatcacgatgacagatatccgcctgctcaaacgcataacgaggatgatcagcgaccggtgccagtgactcaagattgccggcataagtcagactatcaaccacaacgacactgtcttcagtatggttgattatatggcgcaccaccgcagaaccaataaaccctgctccaccagtaattagaatacgtttcaacgccagactcctttgctatctacaacccatttttgttttatctggctgccattgatagccttaaactggctatgatccaccagcatcaagacaacatcagcctcttccagtgcctgttgtaggctgaccagctccactacaccttccagtgaatgaggcagttcgtgaatattcggttcaacaaccaaagtagaaccagcgtgccactgcgcaatcattttggtgatatgaactgccggactttcacgtaaatcatcaatgtttgctttaaacgccagaccaaagcaggcaatcttaatttcactggctcgtttgtcgctttccgccagacaatccgcgactgcggctttcacctgatcaaccacccaaagtggtttgtcgtcgttaacaagacgggcggtacggatcaggcgagactgcgtaggattctgtgacacaataaaccacggatcgactgcaatacagtgcccaccgactcccggtcccggttgcaggatattgacccgaggatgccggtttgccagacggattaattcccagacattaatttcctgttcagcacagataagcgagagttcattggcaaaggcaatgttaacatcccggaagctgttctcagtcagcttacacatttctgccgttctggcgttggtgacaacacattcaccttcaaggaaaattttatacagctcacttgccctggaagaggattttggggtcattcctcccacaacacggtcgtttttgactagctccaccatgacctgacccggcaatacccgttcaggacaataagcgatatcaatatctgaattttcccctgcctgttgcggaaaggtaagatccggtcgggcttctgccagcctctcggccatttgttccgtcgcgccgactggcgaggttgattccagaataatcagatcgccttttttcaaaacaggtgcaatggattctgctgctgaatacacataagccatatcaggctcatgatcgcccttaaaaggcgtaggaaccgcaatcaaaaatgcatccgcgggctgaggtgaagttaccgctctcagataaccaccttcaacagctgtttttacaacttgatccaaatcaggctcaacaatgtgaatctttccacgattaatcgtctccactgcatgctggttaacatcaacaccaataaccgttttctggcaggaagcgaatgctgccgcagtaggtaaaccgatataaccaagaccgatcacagaaattgtttcaaaactcataatgtcacctgatttttcttcaatatttccagaattttctggcaagccttgccatccccgtaaggattatgggcccggctcatttgttgataagcggagttatccgtcaataaacgcgtgacttcatcaacaatagtttgggtttttgttcctaccaaccgcacagtacccgcatcagccgcttccggccgctctgtggtattacgcatgaccagaacgggcttaccaagagaaggagcttcctcctgaattccgcctgaatcagtcaggatcaaataggcatgatccatcagataaacaaagggcaggtaatcctgtggactgataagaataatattatcaataccatgcaaaatacgttttaccggttcgcatacattgggatttaggtgtacaggataaacaacctgcacatctgggtgcattctggcgatttgcgccagtgcttcacagatgcgctcaaaaccaccgccaaaattctctcggcgatggcctgttaccaaaatcatctttttagcaggatcaataaaagggtaaagctcggcaagctgcccccttaatatgtcatcatgcataatgcgatcacgcacccagagcaaagcatcaataacggtatttcccgtaacgaaaacagccttgtctgcaatagattcctgtaagagattactgcgggaattttctgtcggagcaaaatgatacgttgccagatgacctgcaattttacggttagcctcttccggccatggagaataaagatcgcctgttctcagccctgcctcaacatgccctaccggtattctctgataaaaagcggccaggctggtcgccattgtggtggtggtatcaccgtgtaccagcactacatctggcttgaattcatttaataccggctttatggattcaagtatccggcaggtaatatccgtcagatcctgccctttcttcataatattgagatcaaaatccggcttgatcccaaataagttcagtacctgatccaacatttccctatgctgtgcggtcacacaaacttttgcctcaaaatcactatcttcggctaaagcgtgtaccagcggcgccattttgatggcttccgggcgagtaccaaacacagtcaacactttcacagtggctctcttattttgttaatcattgctgggtggttccacaaaggaatataaaattatgtgcgtgaacgcctcgctaatgcgactccggcaccaatcaacagacctacacctccccacaaaaccatcataaatacacggcgagggctgtctctattaacgggctcttctggcgttctaagataacggtaggtctgaaaagtgttctgtaaagtggggccgacactgagtgtcgacagcatcgctatattttgatcataatcgatactgtaattagggcctgtagcctccagtgtttcaagctgagcctgtagtaatgggactcccagcataaacattttggattcaggtaattcaccgataggtgtgtttgtctggttacgctgaataccctgtttttcagcaacttttaatgattgctgcaatacgttcaattcacggttatacatggccttagcgacgagctcctgccgtttgaccagcgctttcattgactgagtccgtgttgcccatgcgccttttatttcgtcattcagatgagtactcgcacgctggttagcaaaagcaatgtactcccgcaaaagccggttagcatcagcagcggtttctgccgtcagtttgatactttcattttggacatttttttcaccgcgacgagtcacctgaatattgttgattaattcttccagtaacaccgcatcagctttgctcttaccatcatgacgctgtttgtaataattggagtgcagccagaattcacgacgagtatcataagcttcagcctgtatcatgaactctttgtaagccccatcgggaatggtcggcagttgggcttccggtgaagcattaatatgcgtatccagattgcgcaaaaactgctgttgtgagtaataacttcccaggttattagttgtcggtaaatccacaatagcggttgcgctccatttttgctgcatcagatacgatgcagccagagcgacagcagcgaaaattattgccagtgcgataatccatatctttccacgccacagagcacaacatagcgcacgaatatccagttcatgctctgtaaccgtttgatcctgattagatttcgtttctgagttttccactgcgcaaaacctctttgataagccgatgtttttttagtgatggcttgcaacccgacgcatccgacgtttacaccgtttaataaaacgggccacacgccatgctcttttgatgcaataaccatacaacataaatgcaagcaaaaataatgccaacattacccattgaggaacaaaatccagccgttcgccaataatgccaatcccggctaacaacgctgaagccatcgtgattaagacaaaggcctgacgggacgtgaaaccagcacgcatgattaagtgatgaatatgctggcgatccggtgagaatgggctcattcccttacgcagtcggcgatacataatcgcaaccatatccatcaacggaatggcaatgatccataaagccgtcacaggattgatagaacgatttaccccctgagtcgcttcagtcagtaaccagataatggtaaaaccaattaatgtactcccggcatctcccataaagactttaaaacgtttacccaacagccccagattaagaaaaatataaggcagtatcccggctataaatgcaaagcaccagaatgctaaagctgtatttccgctctcatacagcaggatacccagagccccgaaagaaacgcaggacaggccacctaacagaccatcaataccatccaccatattgaaggcgtttatagccgcccagaccgcaaacagagtgacgacatagctaaatggccccagcgtcatttcccacggaccaaaagtgttacccaagctttcaagtcttaggtcagcgaaatacatcatactgataccgactaaagcctgaattgttgcacgaatttttacactgatatcaaaccgatcatccagtgcaccaataaaaaccagtattcctgcacaaaataaatacagccacttatgtggtataaactcttttgttataacaaaagcaaaacagacactcacaaaaacagatataccccccaccaaaggaattaaaccatggtgacgtttacggtaattcggcttatcaacgagaccaaccttttttgctaccttccttgccatgaacaaaaaaatgaatgaaaatataaagatgcaaaaaacttcgacactcatgctgggtatattcacaataacaactctctgtaaaaataataatgatggccatctattattcattaacttatggatttaatagccagcccataagttccctgttcaagaagacatcctgctatgtataaatgaaaatcaaaaaaataatgcagattacaagtaatgattaatagttatttatagaacttctataaaatttccgtccaaaaaacactcatccaatcaagagaaaaacatgcaaaacatgtaccatttcaacggataatttagcacacctataaaaaacgccacagaagagtggcgtttttgtgaagaaatgatcgcttaattactttttgtttatggactatcaattgttatttgcagactacgaacgtttcataaagtcgaaaaattcttcgtttgtttttgtcatagccagtttattgataaggaattccattgcatcaatttcacccataggatgaataatcttacgcaatatccacatcttctgtagctcatcctgagtcgtgagcaactcttctttacgcgtaccagaacggttgtaatcaatcgcagggaaaacacgtttttctgcaatcttacgggacaggtgcaattccatattacctgtacctttaaattcttcgtaaatgacctcatccattttagaaccggtatcaaccagcgctgtagcgatgatggtcaggctaccaccttcttcaacattacgtgctgcaccaaagaaacgttttggacgatgcagagcattggcatccacaccaccggtcagcactttaccagaagccggaacaacggtgttatatgcacgggcaaggcgggttatggaatccaacaggataataacgtcttttttatgttcaaccagacgttttgctttttcgatgaccatttcagccacttgaacgtggcgggaagcaggctcatcaaaagtagaagcgataacttcaccttttaccaggcgctgcatttcggtcacttcttccggacgctcatcgatcagcaataccatcaatacgcagtctggatagttatgtgcaatgttcgccgcaatgttttgcagcaacatggtcttacccgcttttggtggtgcaacaatcagaccacgctgaccacgaccgataggtgcagccaaatccagaacccgggctgtcaggtcttctgtagaaccattaccacgctccatacgcaaacggttattagcatgaagtggggtgaggttttcaaacaggatcttgctgcgggcattttctggtttatcaaagttaacttcattaacttttaacagggcaaaataacgttcaccttctttcggtgggcggattttacctgaaatggtgtcaccagtacggaggttaaagcggcggatttgactaggagaaacgtagatatcatcggggcctgcaaggtaggagctgtctgctgagcggaggaaaccgaatccatcctgcaatatctccagcacaccatctccgaaaatatcctctccgctcttcgcatgctgtttgaggatagagaaaataatgtcttgcttgcgcatacgagccagattttccagccccatattttcgccgagagtaattaactctgataccggcgtattttttaattcggtaagattcataatggtgggttctttaactcggggtatatctcgaactatgaacgtgaatggtatggcagcgttatcggtgcctgtttatttgtacccaaaacaaatacaaccttttaacatataaatttatattacaaggtaatagtctgaagtactctaattgatttcaaaataaggctaacaaactgtgaatgcacggctgagatggtaataacaaaatgtgattaagttcagaactaaaaactatctcagtgaaaagctatctcagcgtaagtaccgtttcaacaaatactgttttagcaaaaattatctcagcaaaagaggttcagtaaaagaaggcttcaacatagacgctggaacgaaaacatcattgggatgttagcataaagacgtcttcagcatcaggctatatactgaatgactcactatatatgcttttagatactatatgcttttagatactgtactaaatacgatatgccatcagatatttcaaggtgtcagagataacagatttatcagacactacagattgtttagtatgtaacatgtccgttgtcaattattcatgcagatgatgaaaatttttctatccatgttccatataagcacgtggtcgctaacttaccatgcttcgtagcggacgtctagctgtcagtaagataaatcaccttatccgctaaacgtccttaattactgtgagcaaactctaagttagaggtatggctccaaaaattctttcagttgagtttttgacaaagctcccacttttactgcgactttctcaccgtctttaaacagaatcagtgttgggatgccacggataccaaattttggtgcggtttcggtgtgatcatcaacattcagtttagcaacagtcagcttacctgcatattctgccgcgatttcatccagaataggagcgaccattttacaaggaccacaccattctgcccaaaaatcaaccagaacaataccttctgattgcagtttatcttcattaaagtcactgtctgccagatgaataacgccagcactcacaatcttttcactcattaattggactccaaagtaaaatcttttaggttatcagtctacattaaccaacataaggtgtctttatttcagcggatacactttcttaaagcaatagttagctgatattctaccacactatgagcaaaacacatttgacagaaaagaagttttccgacttcgcattgcaccccaaggtcattgaaacccttgataaaaagggcttttcaaactgcacgccaatacaggcgctaacattgccttttactgtcgaaggccaggatgttgcggggcaagcacaaacaggaacgggtaagacgctggcatttctgacgtctacttttcattatttactcagccatcccgctgcggcggatcataaaaccaatcagccacgcgcgctgattatggctccgacccgcgaactggctgtccagatttattctgatgcagaagaactggctgaagccaccgggctgaaaatggggcttgcttatggcggagatggctatgataagcagctaaaagtactggaagccggtgttgatatcatcattggtactacaggccgcctgattgattatgctaagcagggatatattaatctcagcgctattcaggttgttgtactggatgaagcggatcggatgtatgaccttggttttatcaaggatatccgctggctattccgtcgtattccttctgcgactcagcgtatgactctgctgttttccgctacactctcttatcgggtacgtgagttagcttttgagcagatgaacaatcctgaatatgtggaagtcgaaccattacagaaaacagggcaccgtattaaagaagaactgttctatccttccaatgaagagaaaatgagtctgttacagaccctgctggaagaagagtggcccgaccgctgtattatttttgctaataccaaacatcgctgtgaagatatctgggcacatctggctgccgatggtcatcgtgtcggcctgctgaccggtgatgtcgcacagaaaaaacgcctacgtatactggaagagttcagtctggggaatgtggatattctggttgctaccgatgttgctgcacgcgggctgcatattccatcagtaacacatgtatttaactatgatttgccggatgactgtgaagactacgtccatcgcattggccgaaccggccgggcaggcgaaagtggtcattcaatcagtctggcctgtgaagagtatgcgctgaatctgccagctattgaagaatatattcagcaccagatccctgtaagtaaatataacagtgatgcattgctgaaagatttaccagtgcccagacgccgtaaccgttcgcgctcagggggacatccacgccgcactaatatgccacgccgtggaaacactgttcgtaatcgtaaacgcaatccgtaaacgttcaggctgattaacgtaattctggaataacaaaatgctgagttcttcttcgctctatgccgctatcgatttaggctcaaacagctttcatatgctggttgtccgtagagtatccgatagtattcaggtggttgcccgaatcaagcgtaaggtcaggctggccgctggattagataaaaataaccacttatcacaacaggcaatggaacgaggatggcaatgccttcgcctttttgcggaatatttgcaggatattcctgctccacagatccgcgttgtcgcaacagctacactgcgacttgctgaaaattccggtgagtttgtcgggaaagcctctgaaatcttaggttccccggtcaaagttatcagaggggaagaagaagcccggctgatttatcagggcgttgctcacaccacaggcggtccggaggagcgtctggtggtggatattggcgggggcagtacagagctggttaccggcacgggcgcaaatgccacacagttattcagccttgagatgggttgtgttacctggctcgaacgttatttcaatgatcgcagcctgacagaagaaaactttgctaaagcagaggcggcagctcaccagatccttgctccggtcaccacgacactgctgaaacagggctggcagatttgtgtcggagcatccggcaccgttcaggcacttcaggagattatgattgctcagggcatggatgaacttatcactctgcccaaactgcaacaactcaaatctaaagcgattgaatgcgggaagctggaagagctggaaataaatggcctgactctggagcgggcactggtttttccaagtggcctcgcaatcctgattgctatctttcaggcattagaaattgagagcatgattctggcaggaggcgcgttgcgggaaggtctggtctacggaatgctggaattacctgtcgagcaggatgtccgggccagaaccctacagaatattcaacagcgttttcagattgatgcagaacaggcactgcgcgtcagacaactggcagaatatttttttcagcaagttgctaaaacatgggaactggatgagcgatgccgggaactgttagtcagcgcctgtttgctgcacgaaatcggcctgtgtatcgatttccgtcaggggccggctcattctgcttatctgattagccatttggatctacccggttacacccctgctcaaaaacgcctgctagcgacattattacaaaatcagagcggagctatcgatttagcatcactgaatcagcaaaatgccttaccggcacagctggcactgcgattgtgtcgtttactacgtctcgccattattttcgccagccgacggcaggatgactctttatctgctctgcgcttacaggctgaaaatgaaacgcttaccatcacgcttccatatcagtggcaagcccagcatcctctcagggctgaaaccctgcatcaagaaagtacatggcaacattatgtccactggccactttttattgaagagcagaacaacacccatttgggataaacccggcaccttataaaaaaatgaatccctcaccccagatacatgcctgaaaatacagctggagcgaggagttacggcaggttttcctgacgagattcagttaccgcccgttttctgcccaagtccaaaacgggattttatatcggcaagacgcgactgcccccgtttcatgcgttcttctacactgaccactttcttgccttgcggccagtccagatcatcctgaggcagctctaacaaaaaccggctcggttccgggcgtatcagctccccgtactgacggcgctctttactcagggtgagaaaaagttcacgctgggcgcgggtaataccgacatacgccaaacgccgttcttcatcaatattatcttcatcaatgctactctgatgtggtaataatccttcttccatacccaccataaaaacataagggaattcgagccctttggaggcatgcagcgtcataagctgtacctgatccgactcctcactttcctctccgcgctccagcatatccctcagagtgaagcgggctacaacctgagaaagtgtcatcggttcattcagatcatccccttcgaacatctcactcatccaggtaaaaagctggttaacattcttcatcctcatttcagccgctttagggctgggggatgtttcatacaaccaactttcgtaatccataccatgcagcaaatcccttacggctaacaatggatcacgttctgcctgatgtgaaatttcattcatccagtgggtaaagcgctgtaaggctgccagtccacggccagaaagattttgctccagaccaagatcgaaactggcatggtacagacttttgttacgctgcttggcccattcgcctagcttctgaaccgtcaccgcacctatttctctacgcggtgtattgacaacccgtagaaaagcgctgtcatcatcaggattagtcagtacgcgcagataagaaagtaagtccttaatttccggccgggaaaaaaatgaagtcccaccagaaatacgatacggaatacggctttgcatcagcatcttttcaaaaatgcgggattgatgattaccgcgatacaggattgcgtaatctttataatcggttttattaataaagtgatgggcgatcagctcacctactacgcgttcagcttcgtgatcttcattattggcttcgatcacacgaagaggatcaccataacccaattcagaaaaaagttttttctcaaatacatgaggattatttgcaatcaggatatttgccgatttcagtattctccctgatgaacggtagttctgctccagcttgatcactttaagctgaggaaaatcttcttttaacaggatcaggttttgtggacgggcaccacgccaggaataaattgactgatcatcatcaccaactacagtaaaacgtgcccggttgccaaccaacaattttaccagctgatactggctggtgttagtgtcctgatattcatccaccagcaaataacgaatccggttctgccagcgctccctgacttcttcatcccgcattaacagcaacgttggtttagtgatcaaatcatcaaagtcgagcacattacaactgttcaaatgtaaatcataacgccgataacactcagcaaagtgatgttcctgttctgaacgagcccgtcttattacctgctccggtgacatcagatcatttttccagccagaaatacttgagatcagtttttgtagtagatctttgtcttcctccagcaaatccgccgtcaaatctttcagcagggccatttgatcctgatcgtcgaacaaagagaaattactcttcatgcccaacgccttgtattcacgcttcatgatttccagtcccagcgtatgaaaagtggaaatcatcaggcctctggtttccttacgtcctaatgtctgtgccacccgttctttcatttcgcgtgccgctttgttagtaaaggtcacagccgcaatatggcgggcttgataaccgcaggcacgtatcagatgggctattttattggtgataactctggtcttaccggagcctgcacctgccagaaccagacaaggtcctgtcacaaattcaaccgcttgttgttggctgggatttaatcgcatactgttttgaaagttatatcagaatgaaaaaagcaaggaacgaaattgtagcagaaagccgtgtaataaggcgtttttcttcaccagtcaggccactacgatgatttattcttgagtgaatctaatactcaacaatcaaaaattattattttatagatcttaaaattcctaatccgtaatagatttactacttttctatatgtaataaataacaatgtcataaaacctgtcaaataggatgcaatatgttacgcaaaaccggttttttctttgatgaaagctgcttctggcacaattccggcatacagcatgttgtcatgattcctgttggaggatggatacaacctccttctgggtcagggcatgctgaatcaccagaaaccaaacgtagaatgaaaaatttaatggatgtttctggtttaagccgttcattgcagctatcaggcgctgatcctcttgatgaagcgaccttaaagctcatccacccagccgagtatttacagcgttttaaatctatgagcgataatggaaccggtttgcttgggcatgaagcacctgtagggtctggcagctatgaaatagctaaactgtctgccgggctgacctgtgccgcagtagaggccgtcctgcatggtgaactcgataacgcctatagcctttcccgccctcccggacatcattgcctgccagatcaagcaatgggtttttgttatttagccaatattcccctcgctattgaacgagccaaaaagcagtttgggcttgggcgggttgcagtcgttgactgggatgttcatcacggcaacggaacacaacatatcttttgggaacgtgatgatgtcttaactatttccctgcatcaggatggttgctatcccgaaggttatagtggagaagacgatatcggtacaggtaaaggagaaggtttcaatatcaatattccattggtggccggagccggacacaacagctacatgtatgccatggatcaaatcgtcctgcccgcattataccgttaccagcctgagttgattattgtcgccagtggctatgatgccaatgccatggacccgctggctcgcatgcaattacacagtgacagcttccgggaaatgacgcgcaaaatacagcaggcagcagatgaattatgtgatggtaagctggttgttatccatgaaggtggttattcagaactctatgtgcctttctgtggtctggctgtgctggaagaattaagcggcgttcgcacggaagttcaggatcctttactggaaatggtccagagacaacagccaagagaacattttgacacattccagcgtcaggagattgatgctctgaaactgagatttcatttgtagcccgaccggggaaaatatacacaatggatttcaagatgcgtcgaggcggcaagggagttcatcctcaggagcatagataactatgtgactgaggtgagcgagcgcagccaacaaagaggcaacttgaaagacgaagtgtatagtatgcccgatacgatgtatcgggcatagcatcattatccgccaacagcaatgcgtttcatatcagtcatataaccacgcaaagtccggcctatagtttcaatcgggtggttacgaatcgcatcgttaacatcacgtaactgagcgttatcgataccattatcagcaacagctttacctaaatcccctgcctgtaaagatgacatgaattctttctgcaacagaggtactgccacataagaaaacaggtagttaccgtattcagccgtatcagagatgacgacgttcatttcgtagagacgtttacgagcaatggtattcgcaatcaatggcagttcatgcagtgattcataataagcagactcttcgatgatgcctgaatccaccattgtttcaaatgccagctcaaccccggctttaaccatagcaatcattaagacaccatgatcaaagtattcctgctcgctgatatgaccgctgtaatcagggtagttttcaaatggtgtctgaccggtttcagctctccagttcaacaaatccttatcgtcattcgcccaatccgccatcatgcctgaagagaactggccggaaataatatcatccatatgtttctggaataacggagtcaggatagatttcaactgttccgaaagcgcataagccctcagttttgccggattggaaagccggtccatcatcaacgtaataccaccctgtttcagggcttcagtgatagtttcccagccaaactggataagtttaccggcatagcccggctctgcgccatcagccaccagcttgtcataacacagcagagaacctgcctgtaacatgccacacagaatagtttgctcacccatcaagtcagattttacttctgctacaaatgaagattccagaacacctgcccgatgccctccagttgctgctgcccatgctttcgcaattgccatcccttcgccttttgcatcgttttccggatgtacagcaagcagcgtcggaacaccgaaaccacgcttatattcttcacgcacttccgttcccggacacttcggagcaaccatcacaacagtaatatctttgcgaacctgttcacccacttcgacaatattaaaaccgtgggaataccccagcgcagcgccttctttcatcaatggctgaacagcctgaacaacggcagagtgttgtttgtccggcgtcaggttaataaccaaatcagcctgtgggatcaactcttcataggtgccgactctgaaaccattttcagttgccttgcgccacgaagcccttttttcttcaatggcttctttacgcagggcataggcaatatccagaccggaatcacgcatattaagcccctgattcaggccttgtgcaccacacccgacaatcaccactttcttgccttttaaataccctgcctcgtcagcaaattcttctcttgccataaaacggcatttgcccagctgcgccaactgctggcgtaaattcaatgtatcaaaatagttagccatggtgactccgatataattaggtgtgatgttgtttgcattcagccaatatatgccatgaaagacattgcttaaattgatatattgacaagactatattgcagtttacgcaacatatcttttttgagacaattcgcagaaaaaactttcagcagaaggcactgaaacgatggatctacgtgatttaaaactgtttttacatcttgcagaaagttgtcattttggccgcacggctaaaacaatgcatgtcagcccttctacactttcacgccaaattcagcgtcttgaagatcaattggctcacccactgtttctgcgggataaccggacagtaaaactcaccactgcgggcgaacagctaaaacaatttgcccagcatacattattacaatatcagcagctgcttcattctctgaatcatcaaagcccgtcattaacgggagaattacgccttttctgttcagtgacagccgcttatagccaccttcctcaggttctggataagtttcgggctgaacaccctttggtggagatcaaactgacaacaggcgatgccgccgatgccgttgataaagttcaatcagaagaagcggatttgggtattgcaggtaaacctgagaaactgcctgataacgtcagttttaccaagattggcgaaatcccgctagttctaatcgccccggctttaccttgtactgtgagatcattagccacacaagaatatcctgactggaatgagatcccattcattctgccggaacacggcccctcccgtaagcgcattgaactttggttccgccgtcacaaaattaatcatccacaaatttatgcaacagtttcaggccatgaagccattgtatcgatggtggctttaggttgcggtatcgctctcattcctgcggttgtcgttgaaaacagccctgaaccggtacgcagccgtatatcgctgctagaaaatatttcactggttgaaccatttgaattaggcgtttgtgcactaggtaaacggctgaatgaaccgttgataaaagcattttggcggttgctatcgtctgatagttattcatcaagcattggatgatgataaggacagaagaaatttcatcattaaactaatagcgcctgttatggcgctatctctgtttcctacaggcctgagcatttctatctcaatagtaaattaaacgaaggattattcgtctcatcatgatattcgtagcccaactcacccagatgtcggtcaaaacgaagttcttcctctgaaagctcaaaagccgtcaatactcgcccataatccgtgccatgactacgataatgaaacaacgtgatattccagtgcgcccctaatgtctgtaaaaatttcagtaaagcgcccggagattcagggaaagcaaagctgaataatcgttcctgcaacggcttggatggcctgccgccaatcatatagcgaacatgcagtttcgccatttcatcatcggtcaaatcagcgacctgataacctgctgcttttaacccttcaataatttcaatacgttccgtatttccacggttcagtctgataccgacaaaaacgcaggccttatttggttcggcagaatccgaataacgataactgaattctgtcacaaagcggcttcccaacatctgacaaaatgtcaggaaactgcctttctgttcaggaatagtgactgccagcaaagcctcacgctgctctcccaattcacaacgctctgaaacataacgcaaaccgtggaagtttacattcgcaccagaaagaatatgcgcgagcctctctcccttgatctgatgctgctggacgtatttcttcaatcctgccagtgccaaagcaccagaaggttcagcaatggcccgcacgtcctcaaaaatatctttcacagcagcacaaatagcatcgctatcaactgtaatgacatcatcaacatatttctgacaaaggcggaatgtttcatccccaatacgcttgacggcgacaccttccgcaaataaaccaactctcggtaaatcaactgggtgcccagcttccagtgctgctttcaggcaggcggaatcctcagcttccactccaataattttcatttccggtacaagctgtttaatcagaacagcaacacctgcaattaacccgccgccgccaaccggaacaaaaatacgatcaaggtgaacatcctgctgtaacaattccattgccaaagttgcctgaccggcaatgactgccgggtgatcaaaaggaggaacaaaggtgtacctgtgctcctttgccatttcgatagctttggcttttgcttcatcgaaattcgcaccatgcaacagcacttctccgcccaggctgcgcacagcatcaactttaatatcggctgtcgctatcggcatcacaatcgtcgctctgatacccactttactggccgataatgcaacgccttgtgcgtgattgcctgctgatgccgtaataactcctctgactttttgttcttccgtcaggctggcaatcatcgcgtaggcaccacgcagtttgaagctgtgtaccaactgacgatcttctcgtttaaccaaaatggtgttattcaaacgagcagagatttttttcatttcctgtagtggcgtaacctgagctacgtcataaacgggcgcacttagggctgctttgagatattccgcccctttaggttcaggattaagaggataaactaccacaattaccctcccagtttagtcttatcacgcacagcccctttatcagcgctggtcgctagtgaagcataagcacgcagggcaaaagaaacctgacgctccctgaatttgggtgtccatgctttatcgccacgggataattctttctgtacccgctctgcaagctctttttcacagacatccaactgaatcttgcggtttggaatatcaatgtcgatgatatcgccatcatgtaccagaccaattaaaccgccattagcagcttcaggagagacatgaccgatcgacaatcccgatgtaccccccgagaaacggccatccgtaatcaaagcacaacttttacctaatcccattgatttcaggtaggtcgtcggataaagcatctcctgcataccggggccacctttcgggccttcataacgaatgacaaccacatcacctgctacaacttttcctcccagaatcgcatctacggcatcttcctgactttcataaactttagccgggccactgaaagtcagaatactttcatccactcccgctgttttcacaatgcagccatccacagcaatgttaccggaaagcaccgcaagccccccatcctgactgtaggcataggaaagttcacgaatacagccttctttccgatctgtatccaaagatggccaacgacagttctgagaaaaagcctgcgtagttctaatacctgccgggcctgctgcatacatgctttttatagcttcatcggcggtttgcataacatcatactgggccagcgtttgtggcaaatctaaccccagaatattcttcacatagcgatgtaaaagccctgctcgatccagttcaccaagaataccaatcacaccaccagcacgatgcacgtcttccatatgatatttttgggtgcttggtgccaccttacacaaatggggaacctgacgagacagacgatcaatatctgtcatggtaaaatcaacctctccctcctgcgctgcggccaataaatgcagcacagtatttgttgatccacccattgcaatatccagcgtcatagcattctcaaatgcagctttagtcgcaatattacgtggcaacgcactatcatcattttgctcgtagtaacgtttagtcagttcaacaatgcgcttacccgcgttgagaaacagagtcttgcgatcggcatgtgtagcaagtaatgaaccatttcccggctgagaaagccccaaggcttccgtcaggcagttcattgaattcgcggtaaacataccggaacaggaaccacaagtcgggcaggcagagcgttcaatctgatcactttgttcatcactgatattcggattagctccctgaatcatggcatcgaccagatccaacttgatgatttgatccgataagcgtgtttttcctgcttccatcgggccgccggaaacgaaaataaccggaatattcaggcgcagagatgccatcagcataccgggagtgattttatcgcagttcgaaatacacaccattgcatccgcacaatgtgcattcaccatatattctacagaatccgcaatcagctcacgggatggcaatgaatacagcattccaccgtgccccattgcgataccatcatcaacggcaatagtgttaaattcctttgcaacacctcctgaagcctcaatctgctctgccaccagcttgcccaaatcccgcaaatgaacatgcccgggtacgaattgagtaaatgaattcacaacagcaatgataggttttccaaaatcctcatcagtcatccccgtagcacgccataaagcgcgcgcccctgccatattacggccatgggttgttgtagcagaacgatatttaggcattatttttcactcccatatctgtctaatattgatagcatctaatcagcatctgaaaacaggcggggaacgagccgcctgttagttttttatttttttattaaggattcacagggtctaaccagccccatttatcttctgccgtgccatcaaataagccaaaaaatgcattttgaattttcttggtaactggtccgcaccggccactcccgacctgaataccatctacactacgaaccggagtgatttctgcggctgtgccagtcataaaaacttcatcagccagataaagcgattcgcgggaaagagtctgttcacgcacttccagaccgagatcctgtgccagtctgatgatagcgtcccgagtgatccccggtagggcagaagaagaaaatggcggcgtgaacaaaataccattttttacttcgaataaattttcacctgcaccttctgaaatataaccatgaacatccagagcaataccttcctgataaccatgacgccgtgcctcactccccaccagcaaagaagacaaataatttccgcccgcttttgccgctgtcgggatagtgttggctgctatacgattccacgaagaaaccattgcatcaattccctgctccagtgcttcttcaccgagataagctccccacgggaaagcagcaatgatgacatctgtttgataaccttcgggaggattaacgcccatacccacatcaccaataaaaactaatggacgaatgtaagcgctgactaatttatttttgcgaagtgttgcacgacaagcttccattaactcatcaatactctggctcactggcatacggtaaattttggctgaatcacgtaaacgctgcatatgctctcggtgacggaaaacaaccggccctttatgcgagttataacaacgaataccttcaaagactgatgttccgtaatgcaaggcatgggacataacgtgtacttttgcatcagcccaaggaaccatttcgccattgaaccaaatataatcagcttgctttgtcattattttgtttcctttccatcgcgcactatgcgcttatcaattgtgatttattatgttgtatctcaacaccggcaacatcaaccagctttaccaactgagcaaaaagtaaatttacagggcgctggctggcaacagtgagttcaatacatacactatcactatctactgtatgatccatattcaatgcgcatatctgaaaacccctatgacggataactctcagaattctttcaagaatttcagggcagaaccgagcctgaatagcaagtttatgttgcatcataataacttctccaacatatttgcattgcttgcgccgggtggaaccaatggccaaacattttcaaattcatcaatggatacgtgtaacaaataagggccttcactattgaacaaggcgtccaatgcagcatctatctgtgatttttcagtaatatgctggcccggaatatcaaacgcttttgctaaggtaataaagtcaggattatcagtcaggattgtttcgctataacggcggtcaaaaaataactcctgccactgttttaccattcccaaacgctggttatccaataaaaccatcttgattggcagtttcttgcgtttaatcgtccccagctcctgaacattcatcatgaaagaaccatcaccggatatacaaatcaccatatcgtccggacgaaccatctgcgctccaattgcagctggaataccaaaccccatcgttcccaatccactggaagtaataaaattttctggtctgtcaaacgtcatatgctgagctgtccacatctggtgctgcccaacatcggtggtgataacagtattaggtggcttgcgatcagatatcagtttcaatagggctggggcataaattttttcgccctgatagtcataacgccatgcgtgtatttcttttaactgcttaacttcttgttgccatgcttcgatcgataaaggctgctgtagataaggcagtaatgtttttaaattaccctttaatgaaatatgtgcctgacgtaacttatttaattcagccggatcgatatctatatggatgactttggcatggggggcgaaggtatctaatttccctgtcacacggtcgtcaaaacgcgctccaacggcaatcagtaaatcgcaggactgaacagctaagttagccgtctttgttccgtgcattcctaacatccccaaataacattcatgttgggcatctgcagcccctaatcctttaagggtagaaacgaccgggatccccgtctcttccaccagacggcgtaattcaggtactgcgccagctattccaacccctcctcctacatataaaacaggtttttgagaataaaccatcatattgcgggcttgtttcagggcgttctcaggaagaggagatggggtaacagcagggctcaaataaggtgtaaaatccccctgttttaactgaatatcttttggtaaatcaatcagaacaggaccggggcggccttccatagcgatggaaaacgcttccgccataatttgaggtaatttttccagcgattccaccagaaaactgtgtttagtacaggcaagagaaagccccaacatatcgatttcctgaaaagcatcggtaccgataacttcagaactgacctgaccggtaatggcaaccacaggcacagaatccaatagcgcatcagccagccctgtgattaagtttgttgctcctggtcccgatgtggcaatacagactcccggtttatcgcttgcccttgcataaccaatggctgccataaccgccccttgttcgtggcgacatagcaaatgttcaataccaccatcatacaaagcatcatacactggcataatggctccgccggggtaaccgaaaactttctccactccctgtgtccgtagtgcctgtacaacccattgcgccccattcatagccatcctcctatcggtatttactctgtcagcggcttcttgtgatgttgttttatgtttgtttataagtactaaaaaaaacccccgctctattttttagggcgggggtctttgtgaaatctggctgtattttatgtctacgccttccttcgtccaagtgcgcccccgcacggtagaataatcactaccacgctaataattaggctaatcacgagaacatatttcttcataaaagtgcgttcatactctttataggttcgacatatattttagaattatcactttctattattgttgacaatgattatttttatttttttacgagaaaaaaatattatttataattttcaattagataaataagaaacagataaattcactgaattttatctatttcatgatgagaaaaaaatcattatctaccgttttagtaaaataattaattaagtaaattataaaaatgtaacttaatgatcttcgaatcagatgtagatctttataaaaacagggattatcacaaaaacacttatcgtaataagtcaggaaaataatccatttatctaaataaaagtaataacaatccagaataaaactaactccattaattcaaaaaaaatagaaataaataatagaatcaacaaataacataaaatatctaaaattaaaaaatgtcagtttggtgataacaataattatattttcgaaaggcttcgcaaaataacaaaaggtgactttttattatttttcaacaagtcatgatgaatttttttggctaaggaaagcattatgactcttgcgattatctacacccgagccactattggtgtcgattccccgcttgtcacaatagaagcgcatatcagtaacggcctacccggtttaactctcgttggtttacccgaaactacggttaaggaggccagagatcgtgtcagaagtgccttgatcaatagtggttttacctacccggcaaaaaggatcactgttaatctggctccagcagatcttcccaaagaagggggaagatatgatttacctatcgccattgcaattctggcagcttcggaacagatcccgtcaactgaattaaatcattatgaatttttaggggagcttgcgctttcaggagagatacgcagggttatgggagcaattcccgccgcacttagtgccagaaattcaggcagacagttaattttatctacagaaaatcaggctgaactggctatcctatctcaaaatgaaacgttattagccaaccaattattgcaagtctgccacttcctgcgaggtgaaaaaaacatcttattttcccctgctccgatcactccacaaaccgagccacttgttctggatctacaggatattattggacaggaacaagcgaaacgggctctggagataacagccgcaggaggtcataatctcctgttacttggacctcccggtacaggtaaaaccatgcttgccagccggctatgtgatctactgccacctctaacgcatcaggaagcgttacacgttgctgcaatcaatagtctggctggtcagtcaattaaccctcaaaaatggcatatacgaccatttagagcgcctcaccatagctcatcaatggcagctcttgttggaggaggctcaatacctaaacccggcgaaatatccctcgcccataatggtgttttatttctggatgaattaccggaatttaaccgtactgttcttgatgcattacgtgagccattagaatctggcgagattgtgatatcacgagccaaagcaaaagtttgtttccctgcccgggttcaattgatcgccgccatgaacccaagcccgaccggatatcatcagggattacataatcgcagcagtccacagcaggtattacgctaccttgccaaactatcaggtccatttttagaccgttttgacctttctatagacgttcctctgcttcctccggggatcctgagtaagtcatcaacaaaaaatggggaaagtagccacgaagttaaaaaaagagtagagaatgccagaaatatacaaatagaacgcaatggatatgtaaacgcccatcttacccgtaagcaaacagaaaaggtttgcagactaaagatggaagatgccatctttctggaaaatactttactaaaattggggctatctgtacgtgcatggcaccgaatcttaaaggtttcacgtactattgcagacttaaaagaacaaaagaaaatagaaaagccagatattatggaagcactcagctaccgtagcatggatagattgcttattcagctacaaaatcaggttggataatgtggaaaaggggcatatttgcccctcttgatggatccttcatcccaatgatgatattaatcatcactatcagtgaaatcctcagcaggatctaactgtggttttccgccggaaagggtatggaaacgttttggacgtctgattttctccaaatacttaaaccatactttttccgctattgttacaggtgcgcgttcaccacggcaaactgctacaaacagtttttcttcttctgtttgtggttcacgtttaccaagatccaattcattgaacgcattgccatgacgttctagcaattgggcctctttgatggtgaaatcaccgtgacgggaaaatccgcgtggataatgtttattatcaaaaaaacgattagtcgtgatgaagctttcagccatctgacacactcctaactctactgtcatactaattatggcgcggagtattagggaggcttgacattctgtaaaacaaaatatttaaatcataacgacaaaaactattggagatgcatgtggacaccgaattactgaaaacctttttggaagtcagtaagactcgtcactttggtcgggcagctgaatcactctatctaacacaatccgccgttagcttccggatccgacaactggagaatcaacttggtgctaatttattcacacgacatcgcaataatattcgcctgactgctgcgggtgagcgtctggttccctatgcagaatcgttaatgaatacctggcaattagcgaaaaaagagatcagctatgtctcacaacatacagagctctctatcggcgctaccgcatctctgtgggaagcttatctaaccccttggttgaatatgttttattgcgataatcagggaataagaatcgaatcacgcgtctctacacgacagtctcttgttaaacagctacactctcgtgagttagatcttttaatcacaacagaaccaccaaaaatggatgaattccagagtcagctgatcgggagtattcagcttgttttattaactactcaaaataatattgaacaaggtatagaaaattacataaagctggaatggggagcagattttcaccaacaagagcaactgattctgaaaagtgatcaccctcctatcataaccactacctcagcgcatattgccagagagctattggaaagtgtcaatgctgcaacatttctacctgttcactggcttgaagagtattcaaaacttgttgtagcaccagataacgagcaaattaaacggccactatatgccgtgtggctacaaaatagcgaccaacatacacttatccaacaattattaaaaatacctgttgaaaaagctccagtgacaaattgatgacattcagtctagagtcttagatcgtataaaactctaagcaaaagagctatggagggattattaatgcaaaaaacaaaaagaaaaaacccagctaaaattagctgggctattaatctgaaaactataaattattacttagttattaactggcaggggcggagagactcgaactcccaacacccggttttggagaccggtgctctaccaattgaactacgcccctaaatcggtggcggtgcggacgggactcgaacccgcgacccccggcgtgacaggccggtattctaaccaactgaactaccgcaccaccgaatgctgtttcatgctgccttttgggccggcaacacgtctaaattgctgtctggcagtgtcctactctcacatggggagaccccacactaccatcggcgctacggcgtttcactgctgagttcggcatggggtcaggtgggaccaccgcgctattgccgccagacaaatcctgttttcaatcccgaacaagctgtgtcaccggctactttctgttttccggtcactcttcatctgaaacttttatcgtcttgctctcaatccccgcaaaacacctttggtgttgtcaggttaagccgcacggttcattagtactggttagctcaacgtctcgcaacgcttacacaccc

SEQ ID NO: 118 - DNA, 37191 bp, Xenorhabdus sp.
aaatcatgatttatttactgaaacatcgtctgtttaaaaacgttacctgtaattttcattaaggaaactttatttaaaaatagatggttatataaaaaatattgcctattttgatttattggatacaataaccacccgaagttaactttttgttaaatctcatattgcatgtgatccctctagcataaaaagcctacaagccatcctgcttctattacaattgtttacactccggtaaccttaccgtagaatgcccgcactgatgaaacgacaataaagcttttgttatctggggtcgctctaatgagacttatgaaatacaaaaaaactattgggttatcgtcactactcgcagccactttaatgctaagtggttgtgatatggtattgatgaatcccaaaggggcgatcggcgttgagcaaaaaacgctgatactgacagcgtttggcctgatgctgatcgttgttatcccggctatcgtaatggcaatcgtctttgctttacgttaccgggaagccaacaaatctgcaacctatcgtccaaactgggcacactcaaataaaattgagcttgttgtctggaccgtgcctatcctgattatcatcgtattggccacgattacatggaaaacgactcatgagctcgatccatataagccactggacagtgatgtgaagccggtaacgattgaagttatttccctcgactggaaatggctgtttatctatccggaacagggtattgcaaccgtaaatgaaattgtattccctaaagatgtgccaattaacttcaaaatcacctctgactctgtgatgaactctttcttcattccacagttaggtggtcagatttatgcaatggcaggtatgcagacaaaactgcacttgattgctaactcagcaggcaaatacgatggcttctcagccagttacagtggacatggcttctctggcatgaaattcaccgcaactgcaactgaagatcgtgctggttttgaagagtgggtacaaaaagttaaagcgtcacctaaaactctggacacagtgcaggcattcaatgcattggcaaaacctagccagaacaacccagttgaatacttctcaagcgtgaaaccacaactgttccaggaaactatcgccaagtttatgggtgatatgggccatggcggtatgtttggtatgtctcacggtaaaacaggccatgacaaagcagaacatggtgaagctgcgggtcataatatgaatatgagtcaaccggctcatgcaggtgttgaggaataaagacatgtggggaaaattaacacttgatgcgatcccattacatgaacccattattgtggttactttattggggatccttctcgggggactggcagtagttggttccataacttatttcggcaaatggaaatggctctggagcgaatggttgacaagtgtcgaccataaaaaaatcggtgtcatgtatatcgttgttgccatggtaatgatgctgcgtggttttgccgacgccatcatgatgcgtggacagcaagccctagcttccgctggtgaagcaggtttcctgcccccgcaccattatgatcagatctttactgcgcacggcgtaatcatgattttcttcatggcgatgcctttcgttgttggtctgatgaatatcgtggttcctctacaaatcggggcacgtgacgtcgcattcccattcctgaactccctgagcttctggttgtttgttgtgggtgtcgttctgatcaacctctctctgggggtcggtgaattcgcacaaactggctggctggcctacccgcctctgtccggtctggaatacaacccgggagttggtgttgattactggatatggagtcttcagctctccggtgtaggtacgttgctgactggtgttaacttcttcgtgaccatcctgcgtatgcgtgcgccaggtatgtccatgatgaaactgcctgttttcacttgggcttcactgtgtaccaacgtactgattattgcagcattccctattctgacagtgactatcgcactgttaaccctggatcgttatctgggcacccatttctttaccaacgatatgggcggcaacatgatgatgtacatcaacctgatctgggcatggggtcatcctgaagtttatattctggttctgcctgtctttggtatcttctctgaagttacggcaaccttctcgaaaaaacgtctgtttggttacacctctctggtatgggcgacaattgttattaccattctgtcgttcatcgtatggttgcaccacttctttaccatgggttccggcgcgaacgttaacgccttcttcggtattgccacgatgattatctccatcccgaccggggttaagatcttcaactggctgttcaccatgtaccgtggccgcatcgaattcaaaaccccaatgctgtggactgttggcttcctggttaccttctcaattggtggtatgacaggtgttctgttagctgttccgggtgcaaacttcgtactgcataacagtctgttcctgattgctcacttccataacgttatcatcggtggtgttgtattcggctgtttcgcgggtactacttactggttcccgaaagcattcggtttcaccctgaatgaaaaatggggcgtgcgtgcattctggttctggatcaccggcttcttcgttgcctttatgcctctgtatgctctgggcttcatgggtatgacccgtcgtctgagccaggatatcaacccagaattccatcctttgctggttgttgcagcaggtggtgttgtcctgattgctcttggtattctgtgtcaggttatccagttctacgtcagtatccgtgaccgtgaacagaaccgtgatctgactggtgacccatggggtgcccgtactctggaatggtcaacttcatccccacctccgttctataactttgcggaagttccacacatccagactcgtgatgcgtggtgggatatgaaagaaaaaggtactgaatataagcgtcctgctaaatatgaagaaattcatatgcctaaaaacacaggtgctggcgtggttatcagtgcattctgtctggtgctgggctttgcgtttatctggcatatctggtggatggctattgcaagtttcgcaggtattgtcatcagctgcatcgtgaaaagctttgacgaagacgttgattactacgttcctgtagctgaagtagaaaaaattgaagatcagcgttacgaagaactgagaaaggcaggtgcgaaataatgtcgactcaaacccttaataacacagccgcccatgacgctcatgggcaccacgatacaggagccaacaaagtatttggtttctggatctacctgatgagtgacttggttctgtttgcaagtctgtttgcaacctatgttgtacttgctaacggcacagcgggtggcccgtcaggtaaagaaatttttgaactgccatttgtgctggtagaaaccttcctgctgttgttcagtagtatcacttacggtttcgccatgctgggcatgaacaaaggtaaagctggtcaggtaaacctgtggctgttcgttaccttcctgttgggtctgggcttcgtttcaatggaagtttacgaattccataaactgatctcagaaggttttggtcctgaccgcagtgcattcctgtcatccttcttcgcactggttgcgactcacggtctgcacgttacctttggcctgatctggattattgtcctgatggttcaggttgcacgccgtggtctgactgacgtgaaccagacgcgtctgaactgcctgagcctgttctggcatttccttgacgttgtatggatctgtgtatttactgtcgtttatctgatgggagctatgtgatgagtcatccaaatacttctcataccggcgccagccacggtagcttcaaaacttatatgattggctttatcctgtcagtcatattgaccgtgatcccattctggatggtaatggatggtactgcttcacacagtacaatcctcgtcaccgtggttgtcatggctgttattcagatttttgtacatttcatctgcttcctgcatatgaatacatcatctgaagaacgctggaaccttgttgctttaatattcacattgttggttattgccatcgttgtcgttggctcactgtggattatgtacaacctgaatatcaatatgatggttgattaagagttgatttgaatgattaagcaatacctacaagtgaccaaaccaggaattattttcggaaatctaatttctgtgattggtggttttctactcgcttccaagggcgtaatagattaccccttgttctttgcaacaatggtcggagtatcgttggtagtagcgtcaggttgtgtatttaacaactatattgaccgcgatattgacaggatcatggaaagaacaaaagaaagggtccttgttaaagggcttatcaatccgaaaatcagcctgatttacgcctcagtgttaggtattgctggcatggtgctgctctatgtagcagccaatgccttagcaatgcagttagctctcatcgggtttgtcatttatgtaggggtttatagcctctacatgaaaaggaagtctatttatggcacgctggtaggtagcttgtcaggtgcagcacctcctgttattggttattgtgccgtaacagggcagtttgacatgggtgcgttgattctattgctgattttcagcttatggcaaatgccccactcttacgccattgctatttttcggttcaaagattatcaggccgccaatattccagttttgcctgttattaagggtatctctgtggcaaaaaaccacattactctctatattctggcatttatggttgctacgctgatgctgacaatcagtggctatacaggttataaatacctcatcgttgctgcagtagtaagtatctggtggctggggatggctttatcaggttataaaaccacaaatgatcgagcttgggctcgtaagttatttatattctctattgtggccatcatgtctttgagtattatgatgtctgtggattctgcggcatctccagaaatagctctaacttacatccggtagtattcaaatggcaggttttccctgccatttttctttccttttctcttgcaaacattgctttactcctgtctagctaaaatgtcatatcgaatttttgaaggtatgaggtacccatgaacgataataaaatgactccccttgaactcagagcaacatggggtttaggttccgttttttctctacgcatgttaggcatgttcatggtgttaccagtcctgacaacttacggtttagagttacggggcgcctctgaagctttaatcggcattgcaattggcatctacggtttaacacaggctatatttcaaatcccattcgggctactttcagataaaattggcagaaaacctttaatcatcattggactgcttatttttgtcttaggcagcattattgccgcctttagtgactccatctggggtgttattgtcggaagagctttgcaaggtacaggagcaatttctgcggcgattatggcattactatcggatctgacccgtgagcaaaaccgcacaaaagctatggcgtttattgggatcagttttggtatcacatttgcctttgccatcgtcgtcggtcctattgttactcaccagattggattaaatggtttatttggtacaatagcaatccttgccagttgcggtatcttaataacattattcgcagtaccatcgacacataaacacttattaaatcgggaatccggtattgttcgcggtagcttccggcttgtactttctgatccccagctgctaaaactcaattttggtatacttagcctgcatacattattgatgtcgagttttgttgccctaccccttgttatggaaaaagtcggttttcctccccagcaacactggaaagtttatttaattactacgcttatttccttcgttgctgttttaccattcattatttatgcagaaacaaaacgccgaatgaaacaggttttcctgctttgcatcggcatgttatttatcgctgagtttgtattgtggtctttaggctcacatctttggggaatatttgccggtattcagattttcttccttgcatttaatatcatggaagccattttaccttcattaattagtaaagaagcgccggcagggtataaaggtacagcgatggggatttattccaccagccagtttatcggcgtggcgttgggcggaagtcttggcggtatgctatacgaaatacaaggtgcatccttagtctttatggctggaatcattcttattctattctggtttattctcagccttaccatgcgtcagccaccttatgtcagtagcatcaggctagttttgcctgctcaattaagtgatcctgaagctctggaaaaggaaatacaatctcaggtgggtgtgaaagatgtcgtgattgtgccagaggaactcagcgcatatataaaggtagatactaagcagactaaccgtgaacaattagaacagattgtaattgcccattcataataaagttcagggtagccgatatctgtacagaattaagggaagcgacagtaataaataattacgggcttcccttaaatatttggctcagaccaaaaagaataatccgcttatattacggttaatctctgaagttagtaaactgaaaaggctgacccaactctgcaccgcgaactaatgtaatcacactttgcagatcatcacgggctttaccagtaactcgtacttgttcaccctgaatttgggcctgaactttcagctgactgtctttaatcagcttaacgattttcttcgctagcggtgtatcaataccctgtagcatggttgcttccacactgtaggttttaccactatgaaccatattttcaggaacattcagcaccgagccatcaattcctcgtttggcaaatttttcacgcagaatatcgataagttggttaacctgaaagtcagattcgctcgcgatcttaacggattcgttcttctcgtttaattcaaaactcgcattgacattgcggaaatcccagcgattggttaattctctctgcgcattttctactgcattgcgcacttcctgcatatcaacttctgaaacaatatcaaatgatggcattaccagtcacctccagctaatcaataatccggcatgataaccgctttccattattggcaaaagatctatacttctcaggctaagtgatctttctgatttccgcgaccttaggtaattggagatttaggcaagacttgcataattttaacgtttccgctgaaagtatctctcaaggaagaacaatgaaaataactgttctgggttgtggtgccataggaaaattatggcttgccgccttgtctgaacaacagcatcaggttcaggcatggctaaaagttccacaaccttcgttagctgttcgtattaatacattacaaaatagaacatttgaacagcaagtccttgccaataatgaaaagcatcttgctgaaagcgagctactgcttgtttgtctgaaagcctggcaggttcccgatgctattaataatctctcccctacactttcccccgattgcccgatactgttactgcataacggaatgggaacacaggaagaacttttaccgctgcctaatcctattttatccggagtgacaactcatggagcctatcaggagaatggtattgtttatcataaatcaccgggaataacccaaattggttctacaatacctgatgcgaataaattcagtgtattagcaaatattctgaacgatgctctgccagaggtaatctggagcaacgatatttatgctatcagctggctaaaacttgctgcaaactgcattatcaatccactcaccgtactttacgattgtaaaaatggcgggttactaaatcatattattaaagtccatgccttatgtgatgaggtttatcaagtgatgaaacatgatggtattcagatctcccagcaggcactgatagattacattatggatgtcatcacacagacatcagaaaactcttcatctatgcggcaggatatccgttcacagcggcgtacggaaatagactacattacgggttttctactaactcgagcccgtgtacatgggctgatactgacagaaaacgcacaaatttatcgttatatcaaacgacaggaggaagaatatgaacgcctcagctctcatttgtctcgctcacggtagtgaagaaaccgaagctgtcacaactattgatttactggtcagagccggtattaacgtcaccgtcgccagtacagcaacagatggagcgctgatattaacttgctcacgtggtgttaagattgttgcagatgtccctctggtagaagttgttgacgaagattttgatgccattatcctaccgggcggcataaaaggagcggaatgttttcgtgatagcgggctagtcgtggaaaaaattcgcacggcacaaagtcaggaaaaaatcatcgctgcaatttgtgcatcaccggctattgttctggaacatcaccaactttttccagttggtaatatgacgggatatcccagcatgaaagataaaatagcaccagagaaatggatagatcggcgggtctattttgatgagagagtcaatctactcaccagtcaggggcctgcgactgcttttgactttgctttaaaactgattgagcttttgaaagggaaagatactgccgcagaagttgcagctcagttagttttgccgccggggattaacaattaccaaaatctacagtaattgttctattaataaattattctgttaataataagctgctggtaacaatacataatgccagcagcttatctgttttcagattaagggcgataaaccttcacattctggaaaccctgttcacgcaggtaaagcgcctgtaaacggctcattactccacgctcacaatacagcagatagtttttctcttttggcaaatcaccaaactgagtactcagcttatagaaaggcagtgaatggatatcgataccttccattttcagtgggcggtcatcctgttcatccggtgagcggatatccagtaagacatcatcagaagaaaactcagtcaccatttctacttctacaacctgctcaccagcctgctcagctatctgacggatatccagattctgagcttcacttaccacatgatccagaatatcgaaattaaacttatcttcttctgcctcaattttggctttgactgctttcactgtcggacttttagagatcacaccacagaactcgggcatagtacgggcaaaatcttctgtgcctatctcgcgagccagcttaatgatgtgctctttatcatgagaaatcagagggcgaaggatcagggtatctgaagcattatcaatcagtctcaggttagtcagcgtctgactggatacctgtcccagcgcttctcctgtcacgattgcctgaacaccatagcgctctgcaattttggaggcggctctgaccatcattctcttaagcacaacccccatttgaccgtcatccactttttccagaatttctgcgacaaccggttcaaaatcgaccgcaacaaaacgtactttgtgagaactgccaaatcggttccacagataatgagcgacctgtttcaccccaatttcatgggcagagccaccaagattaaagaagcagtagtggacacggcagccacgacgcatcagcatatagctggaaacaccggaatcaaagccgcctgaaataagagaaagaacgtcttcctgtgttccgattggaaatccgccaatccccggatggcgagctttaaccagaaccagtgtatcctgattaatttccagattaactgtcacatctggatgggtcagcttcactttggcagattcaatatgctgattcaggccgccaccaatatatcgttcagcttcattggaagtaaaactgtgtttaccccgacgttttacacgaacacaaaacgtttttccgtgcaataaatgcccatatgtttcgtaggtttgttcaaagatatgatgcaagtcacgaaactctcgctcttctacttgcaggatatggtgaatacccggaatacgtgtcagtgcatcacaaatttctgcgccgaggttatcatttttagttcgaacttctatattatcccaatggcgaacaacagcagttccctctccgaatgttttcagtacattacggatattgctggcaaggattttaataaaacgtaagcggacactctggctcttgatcgtaatttctgggaataatttaatgataaacttcatagtaagatatagtagtcattcagtattgaactatcacaagcaggatcaatgatggttcttaaatagtcagttggatagggcgcagagtataacactatctcactatatctcctgtaaaaaaacagtttgtctgtaaaaaaacagtagtaacgaatgatttatttctttcagtgtagtagggtactctgcaattctgtaacggatttacttcactgtaactcgttaaataatcatactattaaatcattatgtctaaggcaaaccgaacatcagcaaccgagcaggcaccgacttttgaaacatccctgaaagagctggaagaaatcgtcattcggctggaatcaggggagcttcctttggaggatgcattaaatgaatttgaacgcggaattcaacttgcaagacaagggcaaaaaaccctccaacaagcggaacaacgagtacaaattctattaagtaatgatgcacaatcgccgcttgatgaattttcgcctgatgctgagtaactttatgtctgaacaatgtaaggctccttttgaagagcaattaagcaattgccagcaacatatcaatgagaagttgatggcaacattttcttcgctcccctttttaggcagcccgttagcaactgctatgcagcacggtgctgtattgggtggaaaacggctgcgtccatttctggtttacgcagtaggtaaaatgcttggactgcccaaagagagccttgatgcgccagccctcgctatagagtgcattcacgcttattctctgatccacgacgatttacccgcaatggacaacgatgatttacgccgaggtcagcctacctgccatataaaatttggtgaaaatcatgccattctggccggagatgctttgcagtcgttagcatttgagatcctggcaaaacacaacatgccaaatatcgcactatctgatcgccttgagatggttgctgaattagcaatatccagtggtattgctggtatgtgcggcgggcagtcactggatttgcaggctgaaggaaaacaaattgatctggcagctctggaaaaaattcaccaacacaagacgggtgcgctaattcgttgtgcagtcaggcttggcgcgtatggcgctggtgcacgtggccgggaagtattacctttactcgatcagtatgcccaagctattggcctcgcgtttcaggttcatgatgatattctggatgtcattggcaatacagaaattatcggcaaacgtcaggggaacgatcagcagcttggtaaaagtacctatcccgccttactgggattagagcaggctcagaaaaaagccaaagatctgcatgaagatgctattgccgctctcacagaactggaaaaacaattctataatactgtgactctaaaacagctggcgggcttcatcattgagagaaacagctaaaaactcaggccatgacaaccgctgattgatgagttatcagttaaataaattcaaaataaaatagaatatggccttctcgggagaacccccgcaattacatgctaataatatcagggttcttaatcttcaatttatatatccaagggatttcaagtggcatcacagcggcaagggaatgagacacggaagcatagataaccgtatgtttataaaaacggtgaccggggcgaatgagcttagccaacaaagaggcaacttgaaagacgaaggatataacgtgcatagcattttaacaggcatagcatgagcattgatatagcgaaatatccaacattggcattggcggaaacccctgaagagcttcgcctgctacctaaagacacgttgccaaagttatgcgatgaactgcgccaatttttgctaaacagtgtcagtcgctccagcggccacttcgcttccggccttggaactatcgaattaaccgtcgcactccattatgtttataagacccccttcgacaatttagtctgggatgtcggtcatcaggcttatccacataaaattctgaccgggcgccgtgaccgtatcaacactatccgccagaaaaatggcctccatcctttcccgtggcggaatgagagtgaatatgacactctttgtgtcggacactcatcaacctcaatcagcgccggtttaggtatggcaattgcggcaaaacatgaagataaaggccgcaaaacagtttgtgtgattggtgatggcgccattaccgcaggtatggcttttgaggccatgaaccatgcaggagatatcgatcccgatatgctcgtcattcttaatgacaatgaaatgtcgatatctgagaacgttggcgcactgaacaaccatctggcacagcttctttccggtaagttatatacgactctgcgcgaaagcggcaaaaaagtcttttccggtctgcctcctatcaaagaattgctgaaaaagactgaagaacacctcaagggtatggttgttcccgggactctattcgaagagcttgggtttaactatatcggccctgttgatggtcatgacgtactggcactaactcagacactgaaaaacatgcgtgaactgaaagggccacaatttctgcatatcatgaccaaaaaaggccgtggatatgctcctgcggaaaaagatcctatcagttggcacgccgttcctaaatttgatccatcaacaggttctctgccaaaaagctcagatacccgcccgacattctcgaaaatttttggtgaatggttatgcgaagaagctgccactgacaaaaaacttatggcgatcacgcccgctatgagagaaggctcaggcatggtgcgtttctcccgtgaatatccagagcaatactttgatgttgccattgctgaacaacatgctgtgacatttgcagcaggtctggccattgggggatataagcctgttgttgcgatttactcgactttcctgcaacgtgcttatgatcagctcatccatgatgtggctatccagaacttacctgtcctgtttgccatcgatcgtggtggaattgtcggtgctgacgggcagactcatcagggtgcctttgatctttcattcctgcgctgtattcccaatatggttattatggcaccaagtgatgaaaatgagtgccgacagatgttgcataccggctaccaatatcaagagggtccagtcgctgtccgttatcctcgcggcgcgggcacaggcgcagagcttcagccactggaaatattacccattggcaaaggcgttatccgccgtcagggagaaaaaattgccattctgaactttggtacgttactgccaaacgcattacaggctgctgaatccctgaatgcaaccgttgttgatatgcgttttgtcaaaccacttgataaagaactggttctggagatggcttcccgacatgatttgctggtaacgctggaagaaaatgccatcatgggcggtgcaggcagtggggttaatgaactactaatgcaaacagggaactcagtttcagtgttaaacctcgggttacctgattactttatacctcagggcacacaggcagaacttcattctgatttagggttagattccgctggcattttaaacgctatcgagaaacgccttaatcaataaattgtcataacggatgaatattttctattattcatccgttttacttcttagctatacacaatgaatttcaagatgcgtcgcggcggcaagggaactcatccacggaagcatagataactatgtgattggtgtgagcgagcgtagccaacaaagaggcaacttgaaagacgaagtgtatatttttatttaaaaaagcatcaattcttttgctcatgcaaccattgtgccgcacgtttggcaaagtaagtcaggatcccatcagcccctgcccgtttaaaacagagtaacgactccataattgctggttgttctttcagccaaccgttctgaatagcagccatatgcatcgcatattcaccggatacctgataagcaaatgtcggtacgccgaaagtatcttttactctgcggatcacatccagataaggcatcccgggttttaccatcacgctatcagccccttcctgtagatcctgtgcgatttcctgcaatgcttcatcactgtttgccggatccatctgataggtcatcttgttgccacctttcagattagcgctggagcctatcgcatcacggaagggtccgtaatagcaggaagcatatttggcagaataagccataatctgggtgtttacatacccgtcattctcaagttgttcgcgaatcgccccaatacgcccatccatcatatcgcttggtgcaacgatttcagcccctgcttctgcatgagataacgcctgtttgaccaaaatctctttggtaatatcgttgataacataaccatcctgatcaatgaccccatcctgcccatgtgttgtaaaaggatccagcgccacatcggtcagtaaccccaattcaggaactgcatctttcagtgcacggatagagcgttgaatcaaaccatccggattataagcttctttcgcgtccagtgattttttatcagattcaatgaccggaaacagagacaagacagggatacccaatcgggcaatctcttcggcttctttcagcagaagatcggttgtcaaacgatatactcccggcatggaaggcacttcctgacgctgattagtaccttccatcacgaacaccggatagattaagtcattaacagtgagttgattttcagcgactaaacggcgggaaaaatcatggcggcgtacacggcgcatacgacggccaggaaacgtacctggaaatgcatagctcattactgctctcctaatataaaacccagcaggattacactgggctaattttgccattacgaactattgtttttaatactactaagcttaaccccttaagtttgtagcaataatcacgactatctgatggctgattattttttcgggttaccgtctgtctcacgttcagagccattttcagtttcatgtaatgtgcgttttcccacataaaactgcgacaaaaatacccccagctcaaacaacaaatacatgggaacagccaacaaagtttgcgaaaaaacgtcaggtggtgtgagtaacattccgaccacaaatgctccgaccaaaatataaggacgttttctttttaatgactcaggagtcactaccccactccagcacagcaagataatcgctatcggcacttcaaatgaaacaccaaatgccatgaaaagcgccataacaaagctcagataattgctgatatcggtcgcaatcatgactccagtgggaacagttttagtaaaaaaaccaaatacaaggggaaataccacaaagtaggcaaaaaccatccccaggtagaataagacactactggaaaacagtaatggcacaatcaaacgccgttcatgcttatacagtgctggcgcaataaatgcccatacctgatataagatcatcggagccgaaacaaaaacggataccataatggtcaatttgattggtgtaaaaaaaggtgatgcgacatctgtcgcaatcatatttgctcccacagggagttggtccattaacggtgcagcaatgagccgataaatatcattagaaaaataaaccagcgccagaaaaacaactagcacagtaatcaggctattcaaaatccgcttacggagttcaatcaggtgactgataagaggttgagtatcgtccatcgacatgttttagcgttcactattggattttttatcagatacaggaggatgaaagtgtgtttcatcttcttccagctctttagcttcttcaggagtcagctgataagactctttcagcgattcagcagcttccctcaatttatccattgatgcctgtaattctggagagagggattgtaaatctgccttttcttccatttttttcaggctgtcctgaagctcctgtaattttaattcttttgcaagttcattctggacatttgtcgccagtgaacgtaatacccgaatccagccagctactgttctgacagcaacaggtaaacgctcaggccccagaacaatcagaccaagcaccagcactaatagcagttcactaaaaccaatgtcaaacacggtttatacctactctttttctttgtttttactctctgatttttcagattgatcaaccgtaggcttatcagtgagatttttagtttcaaaatcagcatcatggctatttttttctgcctgatctgatttttcatcatcactcatcgcttttttgaagccttttatcgattcacccaaatctgaacccaaagtacgtaatttattagtgccgaacaccaagacaacaatggcagcaataataagcaattgccaaatacctataccacccatacggatctacctcatgttcgtgggaaacattaattcttttattataatctacgaaccttatgttcgaaaataccgcaaccatgccagaacgtaatcatgtcaagaaaccgctatttcagcttaaaccagcccagtagccacgatactattcctgctccaattaaccctgatgccagatggaccagattagaaataaaaaacaaaccaccacagataaacagtgttgcaccaatcccaagtaagtaaaggggtttctgctgattatgccgttgttgttttaactgtagtgatatctgatcaatgctcgtttgcaaacgtttatgttgttgcagtgtgccataaaccaattcaggcagttccggcagtttttccgcccaataaggggctttttctttaaacgctcgcatgatagccggaataccaacctgatcatgcagccagtcttccagaaatggttttgctgttttccataaatcgagctgtgggtataattgccgtcccaaaccttcaacatacagtagtgtcttctgcaataaaacgagctgtggttgcactgccatattaaaacgacgggccgtattgaaaagattcaataacacatgaccaaatgaaatatctgccagtggtttttcaaaaataggctcacataccgttctgatggcaaactcaaaatcttctacattagtgtctgccggaacccagcctgaatccacatgcaactcagcaactttacgataatctcgattaaagaaagctataaagttttcagcaagatagcgcttatcgtctttattcagagaaccgacaataccgtaatcaatgccgatataagtagggtcttccgggcgttcacggctcacaaagatattgcccggatgcatatcggcatgaaaaaagctgtcgcggaatacctgggtaaaaaagatttgaacaccgcgttcagcaagtaatttcatattggtattctgtgcttctaatgcagcgacatcggatacaggaataccataaatacgctccatcaccagtacgttttcccggcaataatcaggataaacttccggcacgtaaagcatcggactcttttcaaaattacgccgcagttgaatagcatttgcagcttcccgcaacaggttcaattcatcaagcaacgttttttcatattcacgaaccacttcaagtgggcgaagacgacggccatcgggtaataaaggaaccagattagctaaacgatacattaaccggacatctgcctttatcacgggcagaatatcggggcggatcactttaatgacaatatttcttccgttctctttcaaacgcgcagtatgtacctgagcaatggaggcagaagccagaggttgctgctcaaaatcttcaaaccacgtttccagagcaccacccaatgcggtttcaatggattgacgcgcaacagcaccatcgaaagaaacaacgcgatcctgcaagagggaaagttgatcagcaatttcaggaggaaagagatcacggcgggtagacagcatctgaccaagcttaatccataccggcccaagctcctgtaatgccagacgtaagcgttctcctagtggtttatccttgtgtcggttaggcagccagaacaggaaatagcgcccaaaacgcaatggccatgtcagacggatctttgggatcagctcatccaatccataggtgaggaaaactttaatgataaaatagaggcgctttatttcactgggcgtcatattttttctccatcgctgccagacgtttttccatgtcagacagtttattggcgacagcatcaacttcttcgctgaaataagccaattccaaagcgccaggtgtcattttccactcttcagtcagtgattcactcaggtagtttttctgccttgagacagtattacaggcaaaccggatactatttttcactacccgattgagtccttctgccacaatatcgccaacataaggtgaaaggtaatgggccggatcccattccagcatatccagcagagccgaccactgctgaataacctgcatatctccctcaataataatttcaccgctgttgattaacgatgagaggcattggcgatcacgtaatttaagcagggctggtaatgtggttttcattgaacaatcagcagactctgaccactgactcaaaacatcgacctgtttttcactgaaaaccagtatcagcggtatttcaatttctttcagttcgatggaaagcactttgcccgctaatctcatacgggctgatttcaataccgtttctcgatacagcaggtgattcagcgttgtttccagaaaggcagttaaaaccggaaacagcaccgtagaattcacgctatggcttaatgagggagtttccatgtcagaatttaaaccctttatgcagtgcaacaattccaccggtcatattggagtaggaaaccagatcaaaaccagcagtttccatcataccttttaatgtttcctgatcagggtgcatacgaatagattcagtcagataacggtagctgtctgcatccttaacaaccgcctgaccaattcgtggcagaatatgaaacgaataggtgtcataaatcttactcagaggtgccagtatgggtttggagaattccagtaccagtaaacgcccgcccggtttgagaacccggaacattgagcgcaaggctttatctttatcggtgacattacgcaggccaaatgaaatggtaatgcagtcaaaatagttatccgggaatggcaattcttccgcattcgcctgaacatagctgacattaccgacaataccgttatcacgcaatttttcccggccaactttcagcatggaatcattaatatctgccagtacaacttcacctttctctccaacaagacgggagaatttcgctgtcagatcccctgttccaccagccagatcgagaactttatgaccacgacggacgccacttgcatcaatagtaaaacgcttccaaatacgatgaatgccaaatgacatcaaatcattcatcaaatcatattttgctgcaacggagtggaatacttccgccaccatatcttttttttcgtctttagctacggtacggaaaccaaaatgtgtggtttctttagattgatctggcattttctttgtccgcttttcattcaaaaaattatagcaagtttaccagcctttccgacaaaaccctatccggaaaaatctattgggtatgcccattgaccgggaacgattggaaggatttatacatttcgtctttcaagttgcctctttgttggctacgctcactcacccctgtcaccgtttttataaacataaggttatctatgctcccggagatgagttcccttgccgtcgcgacgcatcttgaaatccattgtgtatatcaataatctgtgaatcaatagggcgtttgatatccactcctaaatcgcgaaacccttctgcctggctaatgagattcccttttccttccgccagttttttcatcgcgagatgataacttgcctgtgctttactgaggctttgccctaacccctgcatgtcatccacaaataagcgcattttgtcatacattctggacgctttgtcggcaatcaaacgtgcattctggctttgatattcatagcgccagagattattgatcgtgcgcacagccactaatagtgttgacgggctgaccagcataatattatgtttcagcgcctcatcgagtatttcgggagcctgattaagcgcaaccagataagcagcctcaaccgggataaacatcaggacataatccaacgaccgtaatcccggtaactgctggtaatttttacgccctagcccccgaatatgccctcttatagagttaatatgttcctgtaatgcctgaacctgctctgtttcatcatcgctattgaaatagcgctcataggcgaccagtgacattttggcatcaataatgacatcttttctttgcggtagatgcacaataatgtcaggttgaaagcgttcgctgttgtcagttttaatattgacctgtgtatgaaactcatgcccctcacgtaaaccggatgcttcaagaacccgcgttagtatcatctcaccccagttaccctgtattttattatctcctttcagggccttggtcagattgatcgcttcttttgccatttgagcattaagctgctgaaggttacggatttcatgagctaacgtatggcgttcacgagcctcctgcccaaagctatcctgcacctgacgacgaaatccttccaactgttcacgaaaaggcattaacagatcattgagactttggcggctatactcatcagtacggcggcggttttgttcaaaaatacgattggcgagattttcaaattgagcattcagccgctgttcactattgatcaaaagacgctgtttttcttcagctgccagcttgctctcttcaaggcgggtactcaattcacgtaactctgcttcctgtatgctgttgatttcacgctgggcaagcagctcctgattgagttgttcacactccgtacgccagtaatgagactgctccagtctttcattgctgacagcaagctgaccgtgtaattctcgcaattccccttctttgtactgaatacgctggtgaacagaaaaccaaacgaagatcccaccgcacaataacccacttaaaccaccaattaacacgtataaccaatagatatccatctatacaccccactcacattacgccagcgtctgtgctcaatgactaaccttaatgtaagttaaatagaggctgtatagatgtccagattgtttacaggatttatttcagtttgcaaagcggctcgcaattaccccatccactctgcaagccagcgtataccgaaagcacccggagctaaaataccaaatgcccaaatcagcgcagaagcaaagttagccaactgaaaatgacgttgtggcatagcacaaatcccagcgactaagggaattgcggctcttaaagggccaaaaaaacgaccaataaaaacaccccatataccccaacgttcaaagaatcgatgtccgcgtactaaggtttgtggatggcgggaaagaggccacatctgaccgacactttccttgtaatgatagccaaatagataggaaacccagtcaccaaagaatgcgcctgctgctgctgctatccatattggccagaaatttaatccactttcaccaatcaatgcccccaaccctaacaggatgatcgttgcaggtaatagcagagaaataaatgccaaggattctccaaaagcaagcaggaaaataataggaattgcccatgcttcatgattttttacaaaattgataattacttcaatgacttcatgcaagctcacattcgtttttcctgtgttaatctttactcaatttcaggttagcagcaaatcaataaactgatgctaaccttgcttttctttacgctaacaaaatggatttactcaagaaaatagctctgcaattttttccgggctgccatatcaagcccaacgtctttttccaaccaaatatccacactgccataatgctgattgatactgttcagagctgtcattaaaaactcttctctgactgaaaatacataagacattttctcaatcaaactatcactcatgctttttgcatattcattcaataaatattcccgaaacggtgtcagagtaatattagttaccagatagtcttccattacggtatccagatctgcccccagagcaaacaataccaaagcagaaccaattcctgttctgtctttaccaacagcacaatgctgtacaattccgcctttttccggctgtaataataaactggctaatgtcttataagcagggttattaatcggtaacaattggtatagccgcaacataaaatctttagcgtcaaactgttccaacgcctcatggcttagcttatcgaaattagcatcaacctctttggaaagcggattagccggagcatgatgatagctcgcaccactccatacctggtctggcctatctataatttcactgctatcacgataatcgatgatctggaacaggttctgttcagccaagaaagtttgatcgttatcagtcagcatatccagagagcctgaacgaaataacagacctgatttaatcttagaaccattacttagtgttctgttacctaaatcgcggaagttaataccgccatttaatgggagtaatgaaggatgagatatcagtgttgtggttgtggtcataatcactcttttttattgaaattaatgcacgattgagacagtttgtggctgagacaaatcatctttaatacaaaatgttatgacattatcagatttcagaatgaaaggaagtaaagaaaacggaaaattcaggtgatcgggccagagaattccggcccataatttcaacaattacaacaaacggcgagccgcatcaacaacaatacttaaggcattgctttctgttttcttcaacaattcaacatcgggaatttcctgctgggtacggttaacaatcacacctgccaccataccggcacgcaatccctggcttgcacacattgttaatagagttgctgattccatttcaaagttcatgacgcccatttcctgccactctttcattgaaccctgaaaacgacggacaacgcggccagaataggtatcatagcgttcctgtcccggatagaaagtatcagaggaagcagtcacaccaacatgcgttgtagtacctgatgctttcgcggcagcgtacagtgcattagtacactcaaaatcagccactgccggaaactccattggagcaaaatgcaggctggcgccatctaaacgaacagccgcagtggttaccagcacatcaccgacactgatattttcctgaattgcgccggttgtaccaatacgcaggaatgtgcgcacacccaattgagccagttcttctactgcaattgacgttgatgggccaccaatacccgtcgagcagacaacaacgggtttgccgtcaatttcggcacgccatgttgtaaattcacgatgggaagccagatgaaccgggttatccatcaaccttgcaatcttctcaacacgatcaggatcgcctggaacaatagccagagttgcaccctgtaagtcgtttttgataatacctaagtgaaatacatcagacatattggctcctcaacgggaataattcaaaatccaaataaaatggagatacctaaatttagtgaatactctgacattttttaatgataaaagtcacatttaattaaattaaaaaagaaacgcatacattaaaatgtgacattaatcaccatttaatgtgtataagtaatactgtgagtataaaactgaaatagaaacaatagtcgaagagcagtcacaaaaaagcgccctttttgagcgccattggaacacttacatgatgaaattaaggagtaatattccacacaatccgattccccacgcaatagtggtcggaatggaccaaatgattatctgttttttcacatcctttatccccatcatcctattcacgacccaaaaaaaacagtcattaaaatagctgaaaaacagtgttcccaccattgcagcctgagcagcgaccagcatattaatatctggtatctgtttgataactggagcagaaatagatgctgcggtgatcatagcaacagtgcctgagccttgaataatgcgtattaacgtggcgatgataaaagggatcagaacaggcgtgataggcagactggcaacatattgcgccactattgtcccggttgaaccctcatttaacacagcgcctaaggctcctccggctcccgatactaataaaatgatccctaccgtctgcaaaccagtttctaagtgttctattacctcatgtttgctgacatttggcataagtttataaatcgccagcaacacacttatcgccagagcaataatcggtgatccaaggaaattaaaaacctgaaagtaaagatagtcatccttccctgcaaatagtgctgtctttaacaacagtccattaataacactggtaaaaatgagaacgataggtacaacgataggtaaaagggaaataaatagacccggtaaaggcttgctggctttttcttccatatattgctgatgaatttcttgcagatttccctcatcctccacaagcaggtattcagggtatttagtctccagccatttagcataacaagtgatgccaataacacatgggattgccagtatcattcccaccagcataaccttaccgacacttaccccaaatattccagccacaccaagcggtcccggcgttggcggaacaatatggtgagtcaccactaacccaccggccagggctacacccaacgttaatacattgcgtttacctttcttcgctaacgcttttactagcggaaaaaggatgataaaagccgaattaataaatataggaatactgacaatatagccggtgattgcgagtgcccactcttcgcgccttttacccagccatttaatcagactataggcaatttgctccgttgcaccagaggcttccaatatccgccccatcatacttcccagcccaatcacaataccaatgttacctaatgttgtaccaaaccctttagcaataacatcaacaacatggcccatactcaggccaccagatattcctgcaataaccgcagcaattaacatagcaacaagcacatgaatacgagtacgtaaaaccagaaaaatcagcgaaaataccgccactcccaatccaataactggaatataaaaatcaaccataaaaccccatttcaatctgtattattggcgagaaaggtgcatggtatgctggacaaagcccttgttacaagctgcgttaaagtgggcttattagaaattgatgtcttggtataggttaacaaagggatatttagatagtttgagaaaaagaaggacgctccttttgagcgccatcacaatagcctacataataagattaagaagtaatataccacacagtccgatcccccatgcaatggtggtaggaattgaccagacaatcatctgttgttttgcatctttaatacccatcatccggttaaccatccagaacaggctgtcattgaagtaaccgaaaaacagagtacctatagtcgcagcctgagctgctaataacatattaacatcaggcatctggctaagaataggaactgaaatagaagcagcagtaatcattgccactgtacctgaaccttgaataaaacgcactaaagttgaaataatgaatggaattaatattggtgtaattggcaaaccagcaatatattccgccaaaatagctcccgtcccactttcacgcaatactgcacccagtgcaccaccagcgcctgtaactaataggataatacctgctgtctgtaaccctgcttccaaatgttcaataacttcttgtttgctagcatttggtattaacatataaacagctatcaatacactaaccgctagagcaataattggtgaaccgagaaaatcaaaacactgaaaatataaataactctctttacctgtaaacgtttctgttcccaataataatttatttatagcctttataaggataagaacaataggtacaatgataggtaaaatagaaataaataaacttggtaacggcttattcgctttttcctccatgtaattctggtgaatttgctttagatttttttgttcatcattttgattaatagattggtattctggatatttaattgccaaccattttgcataaagagttatgcctatgacacacggaacagccaatatcatgcttatcaacatcattgcgccaatatctacaccaaagatccctgcaacacctagaggaccgggcgttgggggaacaatatgatgtgttactacaagccccccagctaaagcaacaaccagtgttaataaatttcgtttacctttcgtagcaaaagctttagctaatggataaaagaattacaaaagcagagtcaacaaaaataggaatactgacaatatatcctgttattgctaacgcccattcctcacgcttgtttcctaaccatttaataaagctataagcgatttgttctgacgctccggaaacttccaggactcgccccatcatgatccctaacccaatcacgatacctatattacccaatgttgaaccaaatcctttagatataacttcaacagtatcaatgacagttaagccccccgtaacacctgctattattgccgcaattaacatagcaagcaggacatgaatacgggtgcgtaagaccaaaaaaatcacggtaaatacagcaacccctaggccaatcattggaatgaaaaactccatgtaaaactccactttaatatgtattattggtagtaaatatacaaatacactctattaatgataaagtaccaatagaatgatctgacatgaaatttcaccagtataacttatcaagtgctcaatccaattttcctaggtgtaataaaaaataactgataacttataaaaaaagtcaccagttatttttttatttaaaaacactctttataaaccctctataaccaccttaaaatttattaatttttataatatttacacatccacaacgtgtagctccaaatctaactcctgtaattgattctgtactaaaataggtaatttggcatcacacactatatcatttaatcctgagagtggacaaacatgaaacattccgtatttaccatatttactactatctgaaattaatacttttcttcgggcaatatctaaagcggcctgtttaactaaaactttttcttcataaggagtagaaataccatgtttaatatcccacgagctagtactaataaatgctatatctacattcaaagtacgtaataccatagcagcactatttccgacactagagtaattacgtttatctacttgcccacctgtatgaaataaatttaattgaggttttttcatcaaatactgagaaattgaaaaatcattggtaacaatcgtcaaattaaatcgctctgccaatacttgagcaatttcgaaagttgttgttcctgcatcaagataaactacctgaccatcttccactaatgaagcagcatatttcccaattattttcttatggtgatgataaataaaaaccttctcattccatggcaattcttgtcgtaaagcatcattcaactgaatcgaaccagcaatattaataactttaccttcttcttccagaatacgaatatcccgcctgacagtcatatgagaaacattcaatagttcaactaaggtgctaatggcaactgttctatgttcatgcaagtgacgataaatataatccctgcgttctggaggaatcatcgcttctcctattacattatcatggctagacaatcataattgggcttttataaaccaccccagcccttcttctgtatgacctattgggttatattcacacccaatccacccctcatatcccatcttatctaatttactaaacaaccagaaaaaattaatttctccattatcgggttcactacgctctggaacagaagcaatctggatatgtttaaatttcccccataaacgttctatagttctcaataaatcaccttccataatttggcaatgataaagatctaattgtataaagacattcttacgattaattaattttaataaaacttcagcctgaccttgtgttgtcaaaaaataccctggcatgtcacgaacatttattggttcaatcaatacattgatatcatattcggctagaacatccgcagcatactggatatttttgatataacattcattctgttgttccagagtaaactgctcatccaatttcccagccatcgcatgaacctgtttacaatctagtgctaaagcatatgccagcgctttatgaaccccatcgacaaaaacttgctctcgtccgggtaaacatgcaatacctctttcaccggactcccaatctccggccggcatattgaacagtacttgtgttaattcatattgtttcaacagtgtggcaagcttttcctccggctcttcataagggaacaaatattcaacccctttaaaacctgcgtttgcagctcgtgcgaaacgctcagtaaatggaacatcgttaaacatcacactcaaatttgctgcaaatttagccatgactaatccttattattctataatgcaatagttccaatttcttacttagctataaattatgatagtgcaaaacatatcagataaattcataccatattttctgcctattcatcgttaaagagagtttatataatttattattaccataaaaaagatagcaaacctcaaataaatttacatttttttgtgattaacatcacatttaaaatgcaataaaaaacatatttaaatgggaaatacttcagaaatgaaaacaattgcacataattttttcaaaattaaagagaaatactacaagataaagttagattatctagaaaaggactgatgtttaacacgaagatagtatgataatgaataacaaacaaataaattgaacttttattctgatgagtaaagtttaattaaatagggagaaattgatttttataatttttcatgtcgttgggataagacattccttaaaataggaatatctaaacgtaaaatacagaaaaaaatcatttcgttatattaaagtaattatattttataaagaaaaaatactctcatagagaaaatataaaatttttcactcaatacatagattttgtgcgtactggaaaaaataggtatcaccaaaattacctgattttaaagcaaaccaacaatcgtcatgcaaactacgtacccaaggaactcctggagttatagatgcaccaatgctgaactggctaactcctaaactttgtacaacctgagcagaagtttctccacccgcaacaataaaaatgttaaatccttgctgtctcaattttttagcaagatcagcaaaaatcttttcaattgcagtgctagattctatagttccatatcgttgcttaattaaacttaatatttcaggtggttgtgtagcatacaacattggtgcccaaccaacattagattgttgaacagcccatttagctaatatatccgcatactcagaattattgatgcactgttcaacactaatctccatagcaggagctatttttttatattcaataacctgtttatttgtcattacagaacaacttcctgaaaggacaattgttcttttatcctcagttggaggaatatcaccaatcatcaaatcatctaaaagcttcccagtgtggtaacttgctaacgcagcgcctaaacccgaacctcctgttaccaacaccatatccgagacagcttgagcaatagataataaatcggccattatcatggtatctactatcacatagctaatacctttttgttgcaacaaattcagttgatgacgaatagcttgttttccctgccgaacacaattaagattaattaatcctgccgatttttttgattgttgttccatcaaccgtaatagattcgcatctttcatcggagtaatcgggtgatactgcattccactttcgtttaacaattgtccattaacaaataaatgtccatatactacagtccttccattaataggaagagctggacaaattacactaatcttagttttaagttcatccattaaagcatctattacagggccaatatttccttccgatgtggaatcaaaagttgagcagtatttgaaaaataattgttggcaaccgagctgatttctcaaccaccaacaagccttaagagatttatctatcgcctcatcgacagagcaggagcgagtttttaaactaataacaactgcgtctacatcatatgggatggaaggattttcatctggtcctcccaataattggataaccctccaaccattttgtaccatgaagctagcgatatcagttgctccagtgaaatcatcagcaatgacacccagcttaatagtcatgattttttctctggtaaagttatacccttaaatgtcttaataaccgcactatcatcccactgaccaaatccttcattactagcagctagaaacatttgatgcgctgttgcagccattggtaacggaaatttcatcaccttaccggcttcaagtacaattcccaaatccttaacaaaaatatccacagaagatttaggagaataatctccagctagaatatggggaatacgattttcaaacatccatgaatttcccgctgcatgggttacaatatcgtacattaaatccaatgaaattccggccttagcagcaagagccatactctctgccgccacagcaatatgcacacctgccaataattgatgaatcattttgaccattgaaccttggccaattttgttaccaacgtaatacaagcgctccgagataacatcaagaatctctttcgtttgctcaaacagctcaggagaaccagaggccataatagttaatttcccctgctccgctttaagtgccccacctgaaattggagcatcaagcatattaatgtgatactcctgtagacgtattgcaaaattttgcgcctgctctgcagaaatagtgctatgtacaacgatacaagtatcagctttaagctgtttgactagtgggttttctccaccaaataggatattttcgatttgcgtcccattgaccacaacgaataagagaacatcaagctctgatgcccactttactggactattagctacacctgttgctcctttttgttttaattgctcgcaggctttatcatttatatcaaaacaataggttgaaatacctgctcttattaaagactgcgcgatccccattcccatcgcacccagccctataacccctattttttgtattaaattattcatgaggttccctggtgtttttgattctttgttacctttctgatcttcacatagataatttcacaaaaaaacgatcgatgtcacattagagatctatctatcaaaagatgataattaactaattaattgaattaaataattttattttcataatattgaaaaaatcctttcacacaatgttgtgaattacataaataaaaatactcaataacaaaaaccaccacttatctaaaacaaaccggattaaaaatcctgtgctactttaataattaaatcttgaattatccttttctttataacgtttacactaattcatttctgtaaaaacacaaaaattagtgttttatatcgattgagctagggcgtgttgacgtttgctcgaagggaattgggtggcatgataatttggtctcttattttcgccaaaaaactcgttacccgaactatcatgccacgacctatgttatcagatcctgtgtgggataagctatttgtcttcatgcaacaaaatcggcttacctatcataaaaaaacgcatcgcctcatcatggaaggtattctttttcgaatgagaaccgggataccctggcgggaactacctgctgaatatgggaaatggaatacggtctttaagcgttttaatgtctggtcaaaaaaaggtgtttttaattcattattcaacgaattagctaagaattctgatactgaatggttgtttattgatggcagtattgtccgtgctcatcagcacagttcaggcgcagcttcaaaggaaaatgaagcgattggaaaaagccggggtggacgctcgactaaaatccatttggccgtagacagttacggcctgcctgttcattttgaattatccgagggacaaactcacgacatggtgcatgcggaaagtttggtggcgcaatcaccgcccgcggattttgtcgttgctgacaagggatacgatagtcaggcattgagaacttatattgaagaacaaggtgcaacagcggttattccctaccgaaaaaatagccgaaattcggataaaaagtgggataaggatttatatcgttatcgtcatttagtcgaaaatgcatttgccagaatcaaacattttcgtgcaatcgccacaagatacgataaattagcgagaaattacgccagcacattagcactggcatttatcattatctggttacccatgtgggtcgagtaagtgatgaaaacaaaacgtcaacacgccctagcaggcaatatattaatataacccaaattctggataagaaattgacgagaaacctgttcaaggagccgtgttttggtgtttcaaattacacctgattattaaccatcttggcgaaattctggccctcaaaatcacggcggggaatacggatgataggaaagtggttcgggaattagcaaaagaattaatctttagcgcaaaagggtgtcactttcatcacgaaaaagcggagtaatatgaaagcgagcgtgctggaagattgggataagatgatgttatcaaggcgttttattaacgaaacggttaatgggcaattaaaaaatatctgtcaaatagaacattctcgtcatcgaagtataaaagggtttctgttgactgttttaacggggttaattgcttattgtcataaaaagaagaaaccatcactgaaagttttctactcagaagaagaagatattccagtgacagcttaagcagaattggggttaactatattctctgatctgcattcgtcaacgcagaataatgtttgaattttatgaaaaagagggtttagtaccaaacctgtgacaagaccacggtttctaaatgagttttttatcgagtgagaatgcggataaccatattaataaactgaccataaggtggacgtagcagatctgtcagtgacggattgtatttgcgcaaaataggcatggccttggaaaaggttttaaacccttcataaccatgatattgccccataccgcttgggcctacgccaccaaagggtaagcctgtacatgcaaattggtatagcgtgtcattgatgcagatactacctgcgacgatatgcgataaagccgcttcaatgtacttgttatttcggctaaaacaataaaaggctaatgggcgttcatgacttgcaatatagtggattgcttcatcataagaacggtaggttttgactggtatcagggggccaaaaatttcttcttgcataatggcgctgctatcgtcagggttcagaactagcgtaggagcgaaaacacgctgtttaagtgcttgttcttgatcagttagaggcataagtggaatggtttgatgaccacgagtaatggcatcttcaagtaatttgataagacgctgatactggttgtcattgataatacttgtatagtctggaaagttatttggttggggatagcgtttcgatacttgttccttaatctctgcgataaacggctcaatgacgttttccgacaataaaatataatctggtgctatacaggtttgtcctgaattgaatagtttgcccgttataatgcgggcagccgcttttttcagatcggcatcgggagcaaccagtgccggagattttccgccaagctccagcgtaacaggggtaaggttttgtgcggcagctgccatgacttttttaccattcgccttagaacccgtgaacaacaggtgatcaaaggggagggcagaaaaatcggccgcaagatctgctccaccttgtgcgatactgacgcgattttcaggaaaaattttgctgagtagtttttctaaataggcattggtgtgcagtgtatgctctgaaggcttgataaaaacatgattacctgcggcaatcgcggctattaatggtatgagggtcaaattcaccggatagttccacggtgccatgataccaacaacgccaagtggtacatggcgtatttcagcctttgccggccataattgccatccagccttgtatctttgaggtttagcccactttttaagagagcgcaggcaaagatcaatttcattcaacacaattaccgcttctgccattatgctctcatgcctagaacggtggccgaaatcacaagaaatcgcttccgccatttcattcagactggctttaaaatttttgcggaggcatatcaaatcctctaggcgttgtttctcatcaggtcgattttgttcccatgcctgacgcaggacattaaattgagtgttgattagttttgtcattgatctcgccttatcactgagcggctaaaacaccattgagcgatataataagtgctgagtaccaaaaaggggcttaatggcgtttcaaagtaaaaacgaccataagcgagcaggctatcactgatagcaaaaaagatgccgccaatcgccgctgtattcgctgcatgttgtgctaaaggtatcggatttttaaatggatagacaatagctctattaaccgccactccagccatgaaagccaaaatcgtagcataaatagcaacaggaactctcataccgttaggcagattattcaacagcccgataaatattaataatgcgattattataaatatgataaagatcgccaatataatgaaaaccgtacgaataattataaattttgaatgaaaagagggagttttaatatcagaaatagaaatactgtcgcaacatagagcataaatgtaggcgcaatgagtgagtagaaaacaaaataggccagccaaaaaatagtcttgtggtaacattaaaaaaaagtcaccagctgcggcaaatgtaagcccgaaagcaatagcgttgcggtaacgtcttgaaacaggtgtgcggattagcagaatccaaaacactaacaatgctgtagttgtaggtttcgttaggtaatggagccaaatccatgatggatttacagatgtactaggtcaaatacctgttacggcgctgcatgaaagcagcgtataaagtaaacctattctgttaaaaacaccatgtcgaggagtgcaatgatttgataacatatgcctcatcccgttgtttctttcttatttacagtatcagaaaaactgttatctgcaactaacaattaattttggctatctcagatgacatatgaatatgctcaggatatctcataggatgtagataattccaccgtcacccaatgtttgaaagcatcaaaagcggcggattgcaaggcatcttcactacccgcgaaatgggccagaaattgtacgtaaccgcgtacaatagccttttcgtcgggagaaatcgtgccgccgactggctcccagtattcaaaaccgagattcagcagggcaaagtatttacggtggaaacggggattgcgggatttttttaaatcagcctacaacacatcgccgcatttgattttcgaatgcaggtattctctggccgctggagtagctggtcgtagggtgtcgtcggaaattttgataaaactatgctgtgacattctcgttcccttaaggtaatggcacaacagcgtaagtttaggttcggatgttggggccgatggtattattttagcgagttacaatccattatgctaccgactattttttgtttcgttcatcaacgaactgattaaatatgacctctatatctgggtaataccactgataaaccccataataaggatcgtgcctcagcaacctgtcttgctcatcttgagaataatctctaccatcaccaaatttatcaataaaattacgggtcatattatactctggacgaaagtacgtcgttggatacattctcgttccccctaacgcaccttttactggcatatcaagatgattagctaattcttgagcaagattactttttccagagttacagcccactatcctaacactttgaatattttctccttttttcttaagttcggttaataatgccgtgatcgtttcgcaaaaatcacgcaaattcattccaggattataattattcgaacacgctcccgaaaataatatgtctcccgacattgaggaagctgagtgccctacaatattgagcctgactctaaatttagggttgcttggtaaatctaaaaaataatgaaatcgcttctcctgatgaaagctcaatacaactgttttttgcatcaatacatcatgaggcattagcctaatattggtaattgtatgccgatactgtcccatatctccctcctacattaaattcaacttttaatatacgggccagatacaatctgcaaatgcaacgatacgccagaaataacactttatgacattaatttcagttcatgccagcctcctgctggtgttgacgttggggtgccttacgttcttcggggatttagccaaggtgtggcgtcctgagctttgtaaaccgagttctgggtacggatcaatccaccaacattaaatgtgtgaatattctcaacggtgatgtaatgatttcagcgccatcaaaccagaa

SEQ ID NO: 119 - DNA, 49018 bp, Xenorhabdus sp.
tcagggtgaagaactgaaaagcctttaatgtgcgtgatggttacgggcatccgctgtttaatcacttctggccttgaagttgccattattaccgggcgccaggccaaattgctggaagatcgtgcaaaaactcttggtattacacatctttaccaaggtcagaacgataaggttttggcgtatcaggaactgttggataaactagcgctacagcctgaacaggttgcctatatcggcgatgaccttatcgattggcctgtaatggcaaaagtcggcttatctgttgccgtagcagatgcccacccgctactgctacccaaagcagattatgtcactcggattgccggtggtcgcggtgcagtcagagaactttgtgatttggtgctttttgctcagaacaagctggaagatgccaaaggtttatccatataacacatgaactgaaaaaagaatgagcagaactcaatcctggctgatcgcaatactgactttaattgtgcttgcattgattggctggaatttatccaattcaaatgaagacgcctcctcacccgttttggatgagggttacccgacttatcaaacaaaagaagccactacatttgtttatgatccagaaggtaaactggtttacaaactagaggccgatgatgttaagaattatacggaaacaaagctgacttggtttaccaagccagtattaacaacgtttgatgctaacagtaaatccacaccaccaccggcaacatggacagtacgtgccaataaagcgaaacttacccatgataatatgctctacttatatggggatgttcaggtagatagcctgaatgacgcatcacaactgaaacgtattacaacagaaaacgcgaccgtcaatcttgtgacgcaggatgtggcatccgacgataaaattacattagaaggtgtcggtctgagatctgttgggatgaaaatgcgcggcaacctgcgagataaaactgctgaactgattgaaaaggtgaccactcaatatgagattccacatgaagaacctaatccgtaatacctttattgccagtacactggttgcagtcagtttgcctgcactggcactgaaagatgatacccaaaaacccattaccattgattcagccagacaatcactggatttaacggggaacattgccacatttacggataatgttattgtaaagcagggttcgattgatatccatgcagataaggtggttgtcacccgtcctgacggggattcaaaaaaaacggttattgaagcttatggtaacccggcaacattttatcaattgcaggatgatggtaaacctatcaaaggccatgcttcgaagatgcgctatgagatgaataatgagctgatcacactgacgggtaatgcttaccttgaacagctcgacagcaatatcaaaggcgataaaatcacctatttagtgccaacacaacaaatggaagcctttagtgataaaggtaagcatgttaccaccgtcctgttgccttctcagttacaggaaaaaggcctgggtgttaacaataccggtactaacagcactgaagttcataaaaagagtaaataacgacgtatggcaatattaaacgcagacaatctggcaaagtcttacaaaggacgtagggttgttgaggatgtcagcctgaaagtgaaatcaggtgaaattgtgggcctgctagggccaaatggtgcaggtaaaaccacaactttttatatgggcgttggtatcgggccccgcgaagcgggtactaataccattggccatgaagatatcagcctgctgcctctgcatgaacgtgcccgccggggcatcggctacttacctcaggaagcctccatcttccgtcggctgagcgtatacgataacttaatggctgtccttgaaatccgcaaagatatcaatcagcaacagcgtaaagagcgcgctgaagagctgatggaagagtttcatatcgcccatttgcgtaacagcctcggtcagtcattgtccggtggtgagcgccgccgtgtggaaatcgcccgggcactggcagcaaaccctaaatttatcctgttggatgagccttttgcgggtgttgacccaatctcagtccttgatattaaaaagatcattcaacatctacgggattatggtctgggcgtcctgattactgaccataatgtccgtgaaacgctggatgtttgtgagcgcgcttatattgtcagccaagggcatctgattgctcacggcacaccagaagacatccttaacaatgaacaggttaagcgtgtttatctgggtgaaggcttccgtctttaaggctcattgtcaggcagagttcagggaaactacacaatgaatttcaagatgcgtcgcggcggcaagagaatgacaaattcgtcgggaacgaatttgtccagccaaaggctggcctccggtgagaggcaggagcctctcagtaatctccgggagcatagctaaccgtatgttgataaaaacggtgaccggggtgagcgagcgcagccaacaaagaggcgacttgaaagacgaagtgtatatcagttcgaggggaatccattcaggagtactaaaggatcagttcaggaggaagtgaaaacgttatgaagcaaagtttgcaactcaaactcagtcaacaattgacgatgacgccacaacttcagcaggcaatccgtttgttgcaactttctacgctcgaacttcagcaggagattcaactggctttggaaacgaatcccctgcttgaacaggaagacacacttcaggaaattgatgctcaggattattcagataccgaaacaacggttatggataccctcgaagcgcttgaacaaaagaatatgcctgaagaattacccctcgataccagctgggatgaaatttacagcgccggtacatcttcaggaacgcgcagtgactacagtgcggatgatttccccgtctatcagggggaaaccacccagacactacaggactatctgacgtggcaggctgagctgacgccctttacggaaacagattcagcaatagccacatcaatcattgatgctattgacgagacaggctacctgaccgcctctgtcgaggatatccttattagcatcggcaatgatgaactgacaccggaagaaatcgaggccgtactcaaacgggtacaacattttgatcccatcggagtcgcagcacgtgacttacgtgaatgcctgctcatccaactttcactgttgccgatagaaactccctacctgaacgaagccagactggttaccagcaagtatcttgaactgctgggcaaccgggatttccgaaatttattgcgccagagtaaattaaaagagagtgctctgaaagaagctattgctatcatacagtcactggagcctcggcccgggttaatggtcaataccggtgaatccgaatacgtgatccccgatgtactcgtccagaaagaaaatgaacgctggcaggtcaggctgaatacagatagcattccccgcttgtgcattaatcagcactatgctgcactggggcaacaatctcagaatgagagtgacagcctgtttatccgcaataacctacaggaagctaagtggctgataaaaagtctcgagagccgcaatgagacgttattaaaggtcagtaactgcattgtggaatggcagcaggatttctttgagcatggcgcagagtacatgaaaccactggtactggcagatattgcctatcaggttgatatgcatgaatccaccatttcccgtgtgacaacccagaaatatttgcatagtccacggggaatttttgaattgaaatattttttctccagtcacgtgaacactgacagcggaggcgaagcttcttctacagcaatacgggcactggtgaaaaaattggtcacggcagaaaacccggccaaaccactgagtgacagtaagctgaccagcctacttgccgaacagggtattcaggtagctcgtcgaactgtcgcaaaatatagagagtcgttatccatcccgccttcaaatcagcgtaaaaagttggtttgaataacacagaccctatgaatttcaggttgtatcgaggcggctaaccaccaacaaagagacagcctgaaagacaacggagagagaaggaaaacactatgcaactcaatatcacaggtcacaatattgaaatcactgatgcactacgcaacattgtgaatacgaaatgcggcaaactggatcaatatttcgataagattaaccttattcaggtcatcctccgggtggaaaaagtgcagaaaatcgctgaagccacggtgcatgtcaatggaggtgagttgcatgcgagttcagagcatgaagacatgtatgcggcaattgatgcacttgttgataaactgactcgtcaattgaccaaacacaaaagtaaattgagacaacattaatagctttcagacaacagggctgtcataagattctcactgttccatttgtaaccaactaacggccttcaggctgctatatgcacctgaaggcttaatggtaataacagtgcctcagtaccggatgtgtgaactcaggcattcggtattaaagccctaagcgaataaagaaatgaacaacgaaacagatttaccactaagctcagtgctttcatccgaatgtacgcgtaataacataccctgttcgagtaagaagcgcgccttagagattatcagcgagctggcatcaaagcagctgaatttaccagagagtgccgtatttgaagccatcctttcccgtgagaaggtgggaacaaccggtattggcaacgggattgccattcctcacggcaaactggagaccgagagttcagataatgctgttggtgtattcttacatctggaacaaccgattacgtttgatgctattgataatcagcctgttgacttgctgtttgctttattggttccatctaatcagtgtcaggtacatttacattcactgtccttgatcgcaaagcgtctttcagataaaaatttctgtcgtcgcctgcgctcggcacaaagtgatgaagaattatacaaaattattactgaataaataacaattacaattacggttacaattgattgttgaaaagcaatatacccagaaggtataaacgacggcggttctcatgaaccgcaaaataaaggggagtcatttcatggtgctgatgatagtcagcggtcgttctggttctggtaagtccgtagccctgcgtgcgctggaagatatggggttctactgtgtggataacctgccggtagtactacttccagagctggctaatacactggctgaacgtgatatttcagcggcagtcagtattgatgtacgcaatatgccggaatccccagaaattttcgaagaagcactgacaaaattaccggacagcttttcaccacagcttctgtttcttgacgcagatcgtaacactctgatccgtcgctacagtgatacccgtcgcctgcatccactctcaagcaaaaacctgtcactggaaagtgccatcgacaaagagagcgatttgctggaacctctgcgttcccgggcagatctgatcattgatacctctgaaatgtcagttcatgagctggctgaaatgctcaggacgcgtttattgggcaagcgtgaacgtgaactgacaatggtgtttgagtcttttggcttcaaacacggtattccgattgatgcagattatgttttcgatgtacgtttcctgccaaacccacactgggacccaaaacttcgccctatgactgggttggatcgtccggttgctgcatttttggatcgtcataccgaagtacataactttatttaccagacccgcagttaccttgagctatggttacccatgctggaaaccaataatcgcagctacctgacagttgccattggctgtaccggtggtaaacatcgttcagtttacgtagcagaacaattagctgattacttccgttcccgtggtaagaacgttcagtcacgccatcgtacactggaaaaacgtaagtaaccttatgtaagtaaccttatgtaagtaaccttatatagagcaggccatgacagtcaaacagagacttgagattaaaaaccgactcggtatgcatgcgcggcctgccatgaagctgcacgatctcgtgcagcagtttcagtctcaggtcattctgcgcaacagcaacaatgttcaggccgaagctcacagcgtcatagccatgttgatgctcgattctgaacaaggtagctacattgaagttgaagcaacgggagttgatgaacaacaggctttgtcagcgattgtggcgttattcaattccggctttgacgaagaataaacttacacgattttgcctgtttgtagcacagaccctccatcacacttttctctattttctccttcctttctcattcagttcataacacctgactctctttatttttctcttaatactgctttctagtctgtaataacagaaacaaaagccatatttaaaaccaacaaaagataaaataaccttcatatattctaattataaatttatgagcaaagatatattgagaagttttgctaattaaataagctgaacattccgactatttacaaatagtcattaggtaacaataaatgttatccatcaataacttaaccctatgaaatcagtttagaaaaaacttatcattaacgagattttatacacgaagagttatacgtacagttcataaactggagatttacttcatgcgttttaataagactacattagctatctttcttggattgactttatgtcagggcgcagctcaggcagcacctgtgctttctttagataatacgcaggcagtacgtgttgctgttaacaacaatgcctgggtagaaatcaacaccaccattttcgaaaacaatatccaaacactgaaagaaaccctgaacaaagacaccaaaatatgtgccattctgaaaggtgatgcttatggttatggtctcggtctgctgatgccgtcaatcattaaaaccggagtaccttgtgttgggatcaccagtaatgaagaagcccgtatcgtgcgtgatagtggttttaccggccagctggtacgcgtccgcgcagcaatggcggatgaaattgaaagcacgctgagctatgacatggaagagatggttggcgatctggaaagcgctaaagctattgatgccgtagctaaaaaacatggtaaagagatccgtgttcacttagcgctgaacaccggtttgatgagccgtaatggactggaaatgaaaaccgaacagggcaaacaggaagcactgcaaattgctaagctgcctaacctgaaattggttggcatcatgagccaccatgctctcactgacctgaatgtgatccgcgaaagtatcaaaaacttcaacgaacaaactgcctggttaattaaagaagcaaacctgaaaagagacgaaatcactctgcacgcatccagctcttttgcttcactgagtttacctgaagcccagtttgatatggctcgcgttggcagcgcattgtacggcatcttgcaagacagccatccggagttcaaacctctgattcaggtaaaaacccgcgttgcttctgttaaaccataccctaaaggcaatggtgtaagctacgacaacactcacatcctgaagcgtgattctatccttgctaacctgccagtcggtttctctgatggtttcagcactgctctgtcaaacaaagcctatgttctgattaacgggcatcgtgcaccggttgtcggccgcgtttccatgaacaccgtgatgattgatgtaactgatctgcctgaagttaagagtggcgatgaagttgtgattttgggtaaacaaggtaacgaagaaattactcaggctgacattcaaaaatggagcggcatgcacattgttgaactgacctcaatctttggcgaaaccaacccgaagatcaccgtcacaggcctataatttataacctgtcataatatctggctgaaccttgtttcattagcagcaccaaacagttcgtgatcatgatctctttattttcatgacagaacagcctaatatcactttaatcacattgaaaataacacccccctccttgcgttgcggggtgttattttgtattgagcctaatttggagcgtggtatgaaaaaaccaaatatcattattaatgaattagatgcagaacgtttagattctctgttggaacaagccgcatttgccaataccagcatcgcagatgcactgaacgatgaactggacagagcggaaatcttaccgccagcagaaatcccagcagatattgttacgatgaacagtgaaattaaattcattgattttagcaataatgaagagcgtatccgtactctcgtttatccggcatcgctacaggacagcacaaaacagctatccgtcatggcacctttaggtgctgcacttttaggattgcgggtcaatgacgagatcacgtgggaattgccgaatggtgaaaaaacacggataaaagtactagaaatactttatcaaccagaagcagcgggtgaatatcaccgttaactcacagccagcccagtagaccagactggctgttgttgattgagtatcccttattgaccggcgatactcatttccggcaacagaaccgaaccacactgaatgttactgcgtatttcgatatcattgccgattgttaccatatttgcccacatatctttcagattgcctgcaatggttatctcactgacgggatactgaatttcgccattttcgacccaaaaaccggcagcgccacgagagtaatctcctgttattgcgctgacaccctgtcccatcagttctgtcaccaccagaccagtgcccatttcacgcaacagtccatcaaaacccagcccctgaccttcgatacgccagttatgaattccacctgcatgaccagtacttgtcagacccagtttacgggcagagtatgacgtcatcagccatgactgtaatacaccgtctttaataatttcacgaggcagtgtacgtacgccttcactgtcaaaaggtgttgaagccaaagctctcaataaatgaggctgctcctcaattgtcagccacgaaggcaggatttgtttacccagactgtccaacaaaaaggaggatttacgatagatgctactgccactaatcgctccgaccaaatgaccaaacagcccggtcgccacttctgcggaaaagatcactggtgctttcatcgtcgaaagcttacgtgcccctaaacgagacaatgtacgttgcgcgctctcctgaccaacccactctggtgactgcaattcatcaaagcgacggttcacggtataggcataatcgcgctccatattgccgtcttgctctgcaatcacacagctagatgtggaatagcggcttgagcagtaactctgcaacataccatgactattaccaaagacgcggatgccatagtgggcattaaagctaccaccttcggtattagtaatacgctgatcggcctgtagtgccgcctgttctgcacgggctgccagctcaatcgccttatcagcatccaaatcagcagggtggaacaaatccagatcaggcgcttcaaacgctaataactctttgtctgccgggccagcacaaggatcaggcgaagtataacgggcaatatcaatagccgcctgaacagtacgagcaatagcctccggactcaaatcggtagatgatgcgctgcctttgcgctgctgattataaacagtgatgcctaatgcgccatcactgttaaattctacattctcgacttcactgaaacgggtactgacgctgatccccgttgttttattgaccgcgacttccgcagcatcgcaacctgctttcgctaattccagagcatgggaaacagcctcttccagttgcttacgctgctccgcaatttgttgattggtaactatcattaattaaccataaccatttaaattaaaagggaatttatcaggaaaagtgctatattccggctttcagtattaatgccgagtggtaatcaggcaattttcccagttacaatagacaatattagaagatgttaacacccaccgggaaattggtcatgttccaaagtgcaccttatccggcctttttagaaggaaaacaattatggcaaagcagcctgaagattggctcgacaattatcctgctgaagaggaagaagaagagataatctgggtcagtaaaagtgaaatcaagcgggatgcggaagagcttaaaaagctgggagcagaactggttgaactgagcaaaagcgaactggagcgcatcccgttggatgaagatttgctggccgctattgagctggcacagagaatcaaacgtgaaggtcgccgtcgccagttacaattgataggcaaactattacgtgcccgcgatccagagccaattactatcgcattggataaactgaaaaaccggcataaccaacaggttgtgatcctgcacaaattggaagaactgcgggataaattactggaaagtgacaacgcgcttgaagaagttgtgacactctatccgcatacagatcgccagcaactacgaacgctggtgcgtaatgcaaaaaaagaaaaagcagcgagcaaaccaccaaaatcctaccgacagatttttcagtacctgaaagaattatctggaacagtatgatactcagatcgccatttcttaaagaaatggcggtaactttcttttctcttgtcccaccatcatattaaaattgcttaatttaacacttccggttaaatattacgaaaatgtaacaaaaatgagataaccttacttgcttttcattatctgaactcacataaaggatatttcacatgcctctcgttgttattccagatgattatcaatctgcaacaaaacagattcaggctttatatcaaaaccgtgattttgacgtcgtcagcctcggtgcaattgatcgcgacccgaaagccagtgagttactttctaaggctgacgcactgatattgatccgtgaaagaacaattattgatgagaagttcttatctaaaacccccaatttaaaactgatcagccagacaggtaaggtagcttacaatatcgatctggatttatgtaaacagaggggcattgctgtcgtagaaggagccggttctcctgttgccgcagcggagttaacctggttgttaattcaaagttccatccgcaaattcgtcgctttagtggagtcgatgaaaaaaggtcaatggcaaactgaactgggggataccgtggctgaaaaaacccttggtattctcgggtatggaaatattggtcaacgggttgccagatatgcacgggcatttgatatgaaggttcaagtgtggggttcagaacgctcacaggaaaaagcccgtcaggatggcctgattgttcctcagtcacgtgaagatttctttaaaacatcggatgttattaccctgcatcagcgtctggttaaagagacgacaggcaatgtcacattgactgatcttactcatatgaaaaacagtgcggtattagtcaatacagcaagatcagcgcttatagaagcaggcgctctagagaaagcgcttgatctgggtacgccgggctttgctgcattggatgtttttgatgttgaaccgatttggaatgccggccacgcattattaaaacgagataatgtcctgtgcagtccgcacataggttatgtcacaaaaagctgctatgacatctattttgacaacgcatttaagaatgttgaacgttatttctctggcgatgaaagtcacgttgtgaataaataaccgctggctctagctatatagaactatatagaaacaccgccacatttcagccaatgtagcggtgtaatatacacaatggatttcaagatgcatcgcggcggcaagggagttcatccccagaagcatagataactatgtgactgaggtgaacgagcgcagccaacaaagaggcaacttgaaagacgaagtgtataagaagggaaaagttaattcatcacatcaaacttgagttccccttccagctcttcttcggcttcctcaaacaaaagcaccagcgctgcaaaatgtggttttttctgcacatccagatggataaaggtaatatcaacaggcaactcaatttcacttgttaccacatcccagagcgcatccaaattagcaccaaaatggtcgctaagatcgaaacgctccctgaactgattatagaaagttgttaaatcagggatatggttaaaatcgaattccacttttttcatattctcattccagccttgtgaaatggttataatgatcaagcgtgagatagattagcccatcgttagaatagagtaaccggtcactaccccgacgcccacagttataattcacatctgcttcaaaccactggcgtccggcttcatctggcagtttatgctctcggttgctgaacctgtccccaccaattgcttttcccggtacggatgctcataaattacctttacggggttcccagcccaaacgacgggcttgtttcttcgtaatgtaataatcaggcaatttgtgatgctgtttcagatagctagcaacccgatgctgttcagtcagaacatcaatgtgcagactggttgtctcttccgctatcaccgtatttttcgatgttttcccgctaccagataaccccgtgtctttaaaaaagacaatagagataacagccagaagcagcaatacacctgccagtacgctctttttcataatgacctcttgcacttaatggatcaaatcacaccaaaaagtgtcaagctgttccgcctacggtcaggttatccagtttcaatgtaggctgcccaactcccacgggaacactttgaccctctttaccacagacaccaacacctttatcaagggctaagtcattaccaaccatggaaatctgctgcatcgcctcaataccagagccaatcagagttgcaccttttaccggtttggtgatcctaccgttttcaatcaaatacgcttctgatgttgagaagacaaacttacctgacgtgatatccacctgaccaccgccaaaattcggtgcatacagaccacgatcaacactggcaataatttcttctggtgtagagttacccgccagcatgtaagtgttagtcatacgtggcataggcaaatgggcataagattcacgacgaccgttccccgtcggagcaacccccatcaaacgcgcattcagtttgtcctgcatgtaaccttttaaaataccgttctcaatcagaacattgtattgccccggaaccccttcatcatcaatagataatgaaccccgacgcccttcaatcgtgccatcatcaaccacagtacataactcggaagcaactttctgcccaatctgaccagagaaaacagaggtgccacggcgattaaaatcaccttccagaccatgaccaacggcttcatgcagtaaaacgcccggccagcctgcgcccagtacaaccggcatcgctcccgccggagcagcaacagctgaaagattcactaatgccatacgaacagcttcacgggcaaattgttctgccagcgtctgcccgtcagtgtcttgcaagaaatattcatacccatagcgggcaccgccaccactggagccacgctcgcgtttgccgtcttcttcgaccagtacactgacagaaagacgtaccagcggacggatatcagcggccagagtgccatccgtcgcagcaaccagtacctgctcataaacaccactcaggctggcattaacttcctgtactctttggtcttccgcacgggcaattttatcaacatggtgcaacagagctattttctcttccctactcatgctttgcagcggatccactgccggatacaaaacgttatgtgtcactgctcccagtgtatgggcagtgccatttcctatttctctgacaatactgcgcgctgcctgtgcactttgctgcaaggcattcagagtgatctgatcagcataggcaaaaccggttttctcgccgctaacagcccgaacacctactccctgatcaatattataggatccatctttgatgatgcgatcttccaatacccacgtttcgtggtagctggactggaaatagagatcagcataatcaaggcggcgttctgccaactgccctaatacagaaaacaagtcgttatgattcaggccattgtcagtcagtaaatgttcactgacataagttaaactcatagtgtttactctttatctaaatttgtattcttttttatcaaagaagtcagttgcggacggaagcgattatgtttcaccactctgatttgttcacgcatgtgagtcaggctgtctcgccggatattgagctggagtgcacagacactcagaggatttttcttaatgatttccccccagccactcactgccattgaatgcccccacgttctgcgggtgccgtgcacaccgacctgtgcaggagccagtataatacattgattctcaattgcgcgggcacgcaaaagtggttcccagtgcgctttacctgtcagtctggtgaaagcggctggtacagaaatcagttcagcgccctgttcccgcagtgcctgaaacaggccgggaaaacgcagatcataacagatagccattcccagacggccgacaggtgtatcaacaaccgtaatgtgttcaccacgctgataaatggaagattcattataagaaccgtgttcatccttgatattgacatcaaacatgtggatcttgtcatagcgggcgcggatttcaccctgatcatcaaataataagctactgctggtaatacggctcggatcttcccgactgatcatcggcattgaaccaatcagtaaccagataccataatgctgtgcgagttcacgcacagcctgctgtaaggggcctgttccctgttcttctgcatgttcgcgataagcatcagcgtctgcaaacagtaaggcattctctggggtcagaaccagctttacagttttaggcaattgcttaatctgctgttcaatctgcgctaaattatgtttgatgtttgtaccactgcataattgtaagagtgcaacattgacattcctcatgaccctttattctccttaagctgacgtaagacttcatcaattttaggttgttccagactgccggttagtcgatagcgaatgactgagatcttgctccataacgggcctaacactttcgccgctgcaaaaacagcagcacctgccatagggttaatcgcaaaagcggttgccacacctactgtggctgatatttccggggtgatcaccaactccatattgagctgacgctgaataaagtttatctgaccttttgcatcgatatcagcttccagcccatcaatatggaagttatccgtatacataaccccattttttagctgtgcatcgccacgcatagaatcaaagttaaaatcatcactgaatgtgtcactgaaatccaactgtaatttacgcaataaagcatcaaaactgaccagcctcaacagttgtcctgctctgcctgcgcccagtttcgctattgtgcctttgcccagtgtccctgtcaggcggccattaagcgttttaatatcaggctgccacggcgtatccttccagttaagatcaaaatcaaacttaaatggggcaccggtaatgggaataatgaacccgagataagcagccatatcatctaaacttccccctgatatttgccccttagcccgagtatagtttccctcattactttcactccaatgaccggataatgtcaatttaccagcactattttctacccggccatcagtcagaaccagtgtgttgccttccggtttgaccgttcctgaaatttttccgattttcgatccggccagccagcattcattacatctcacatttaatgttggccaatgacgaaaatcatattttggcgtatccgctgcgcttgaagccagcgagttaccatcattggcagcgctgcccgggaacaccggattataatagagataattaaacgctccctgccatatcctatccgaataaacccacaaatcgccgtcaatttcttctccgatcgcgttaatatgcaaactatcagattgtttgctggcactcagtataagattatgccaacgctgcccgccgatattcaaagaaggtattgtaatttcaaataactcaggccaactgaaagcaacacccgttccggatttggtttccaatgttccaagcagtgccaaccatttatcaccctcaatatcaggtaaattcagttctagcattgatttttcaggtaacgcgggaatgccattcttatctgtgttcagaataccccgctgtaaacgggtataacctttctccaatgaccattggctattgaatttatatctgttccctaatgaaccggtaagcctaagctgattatcatccccttcagcctgaatattgagatcattccatttctgcaaagaggcggtttccagcccgtctaacgtgctgttgatatgtgacaaatcagcattgattgcaacctgatattttgcgccctgttgtgataattcatgttgcaaaccctcaccttttgagggaatggtaatattcacttttccctgccagtcaagccgccctgatagctggcggcgtatttctgccggcaattccggtagcgttgccacaggccagccagcattcaggtcaacattaacctgataatgttgacctgaatgctgcgttgtaaaccgtaatgacagaggattaccaagccagttagtggaaaggctatcactttgcaagtttccgttatcaaagcggaacttgccactgaggtgcttcattctactgttcagtggctgaataaagagttcagtatctttcagcatcacttcaccactggcatcagttgtgccatcttccagatgtatatccagatgaagattgccatcaacctttccgctaagctgtaaattatccagcgcacttccgacagtatcggataatgaactatggtgaaaatagtcgtgaatatctttgccgtctccggaaatatccgcatcaattaagagtttttctttattataatcagcgatcacagcagagatccgggaaccatcgactttacccagtttcgctttatctgcctgtatccataacccgttattacggaaattcaaatcagcattaagatcaaacagagctggccagtctggttggtacttaaatgttgcattgcgcaggggaacccacacctgaaattggccattgttatgcctgaatgggaagtcatgagggttaccctgaaaaatcagcgtagcattatcgactttccctttaattaacgctgtcgtcagataatctgtcagtgattttcccatcagggtttgaggaaaatagcgccatgcttcgcctgcatcctcgacgcggatccctgccagcatttcaagcttcgggggcttattcctaagttctgtataattaaaatcgccgtttatccataatgatttggcctgcaagtccagcccctggctccatattttcaaaccttcctgatcacttttccattcgatcttccctgcaccactggcaatatcaaatggtgcctgaaacatttgccggtaatcaatgagactgtttttcaactcaaatatgaagtttccttgctgcttatttcccgccaacgtgccactaaaatcattcactgaaggcaactctttccagcgagaccagctgacatcctgccatttgacagcaatatccgtgctatcggccagttcaggcgtaacatcaagggcaaagcggtgaattagcccttttggctgccgatgctgccagtcattgacgatctccggagtcacaggtgacatcagcggcaacatgccactcagccgttcaagctgaatattttcagcccgaatacgccagtgatctttgttctgatatttatttgccttcgcgatatataaggcggcaagacgacctgcaagccactgctgaccattagtgttcaggctttccagatttgggatatcgaacagccagccttctccctgacgacgcatttgcaaaagcagatcatggacggtgagctgatgtttcttttcccccacatgccagttgacatacccgcgcctgagttgtaaatgcccgttctcgattctcccgtttttcagggtaatccagttagccagactaaaacgggcattttccaggccggtgttgtcttttaaccatcggctgagccacaaccgcatatcaatatcatcagcctgtaaatagatagtgccgctatctaaaacatgattaatatctttcaggtcaaatttaatctgtacaacaccttcctgcccattaatcgaagacaggttaatatgcccctctgcacgatgccggttgtctttattcagccatgccagctgcggtaacaataatctgactttttctcccgatggagtaggaaaagtcaggctactgtcatgcaattcgaaataattaaaacgttcgagaaacagggaagatagcttatccggtttgggtaactgctgttcactttcgccatcaaacagtggcttatcataatccacctgaagctgataaaaagagaggtcacggaagtgccagcgccgctgtaataatgagcgccagacatccagagaaagcgtcacttttttggctttaatatccgtttcttcgtttgttgcatgaagatcccggacttccagttgtgggccaaatggctcccagcgaccactgatataacctatcttgacggaaacatcggtcaacgctgaaatctggcgcgccaattgctggcgataatcattaatatgaggcaggaaaaaacgtaacccgctgacaaacaaagccacaatgataatgattattgcggctgtcgctaataatatcccgagcagtcgcttcactcatttctccttgattgtcagcacgctatttactcaaaaaatggacgattacatcataacaacatcaaattgttcctgactatacagctgttcagcctgtacttttacggatttaccaacaaagatttctacctcagccagagcgtgagagtgttctcctttaagggcttcactcacagcatgggaagaatagaccagaaaacgatcggcattaatggcgcgatgaacacgtacaatttcccgtaaaatttcatagcataccgtttcaacagattttacggtgccgcgcccctgacaagtcgggcaattatcacataaaatgtgctcaaggctttcccgcgtacgtttgcgcgtcatttccaccagaccaagctgagaaaagccgttgatggtggttttcacgcggtctttacttagagcctgttccaaagaagcgagaacccgacgacggtgttccccgtcagccatgtcgataaaatcaataataatgatcccgcccagattgcgtagcctcaactgacgtgcaatcgcctgagtcgcttcaatattagtattaaagatagtctcttccagattcctatgcccaacaaaagcaccggtattaatatcaatggtcgtcatggcttcggtttgatcgataatcagatagccacccgactttaattctactttgcgctccagtgcgcgctgaatttccgtttccacgccacagagatcgaatatcggctgatttccctgataatgttccagcttggcattcatttcagggatatactcatcaataaactcctgcacttgcaggtaggtctggcgggagtcaacccggatgcgatcaagagaatcttcggcaaaatcacgtaaaatacgctgtgctaatgccagctcaccataaaccttcgttttcgtgatattccgttttttacgctcaataactttgctccacaggcgcttcaaaaatgcagcatcctgctcaatctcctcttttcttaccccttctgcggcagtgcggataataaacccgccatgttcatcgcaataattcatcacgatggatttcagcctatcgcgctcttctccgctttcaattcgctgagaaacaccaacatgggaggcacccggcataaaaaccagatagcgtgaaggcagagtgatatcggttgtcagtcgtgcccctttggtgccgaggggatctttgacgacctgaacgagcagatcctgaccctgactgaccagctcagcaatatccctgacattaaagtttttccgctcctcgcctgcgatacattccgtatgaggcacaatatctgaagcatgcaaaaaggcggctttctccagcccgatatcaacaaaagccgcctgcattccgggtaaaacccggctgatacggcctttataaatattaccgactattccccgtttagcttcccgttcaatatgaacttcctgcaaaataccgccatcgatataagcaacccgcgtttcggatggtgttacattgactaataactctgctgtcataagtgacccttcccatcagctaacgccaaaaatcgtgtgattaattcatacgtttcaaccagtggcaagccgacaacagcatggtaactgccattaatatttctgacaaaacaaccgcctttaccctgaataccgtaagcgccggctttatctattggttccccagttgcaatatattcctgtatttcacgttgggataaatggcgaaatatcacatctgtaatcactaactcacttaaggtatgctgactgttcgataaagcaacagccgtcatgacctgatgctgctgtcctgacagcgcctgtaacatttccgctgcatgttgcttattatggggtttttccagaatacgattattcagcacaacaattgtatcagcgcccagaacggggagatcatccggcgcaattgccacacccgcctttgatttttctctggccaatcgttcgacatactgctgcggagactcttcttcctgccatttctcttcaacctgtggtgtcaggatctgaaaattaaaatccagcagttccaccagctcacgccgccgtggtgagccagaagccaagtaaagagttttcatagtgagtcatcctttctgtcagttcatttaaaagcggttcatttatataaaagctgttcattaaaaagtagaacccgcctttaacgaactgaaaattgacggcggattttccgcattaataagaatagccagggccagagaataccattgaccacaccattccagaatacttcagaatggaaaatagtctgtaggatcagagcgtgagtcaggaaaacacagaggtttatcaatgttgagagtatcatcacaacaagtgattgttgccagagtgccatattgcgaatgagctgaaatttgaaagcaaccagaaaactcacgaggctaaaagccagtgcatgcgcaccaagaatactgccctgcaataaatcaatcaggatacccagaataaacccggtgccgacactgatacgatgaggaatagcaagcagccagtagataaggcataacactggcagagttggccggaatacatcgacttgttccggccacggcatactctgtaaaaccattgctatcaagaaagacaaccagacaacccagagaccacgtccgtgatactgactcatcagttattctccgtagctaatggtttattaactgatggggcgattgaaggtggttgtccggccacgggtttctttctgttatcctcttttttattatcctctccacctgaaccttctggcaaagagtgaggcttttcatcagccggatttggcaatacgtatggcaacaactgtttcatgcgctcatttgcggctcgatatacttcagaaggcggcaacggttcagaggggttattatccggtccccataccagcagcagataacgcaggcggcgtaactcggccaaaggacgggcgtgaataacagtatgagcccgctgattatctatcttgacagaagagaccactgccacaggataaccttcagggaatcttccccctagaccagaagtcaccagttcatcgccgacccggatatccgtgtcactcggtaatggttcaaggtgcagatcatcggcacagcctgtaccaccagcgatcacccggatatcattacgtaatacctgaacaggcagggcatgaatcggatcgcaaatcagtaacacccggcgacttagctggcttagtgaaacaacctgcccgacaaccccgcgatcactaacatccggctgcccttcataaacaccatcttatgcacctttatcaataacaatctgatcgcggtaaggatccagaccacgggcaatgacctgagtagccatcatgtgttcatcatgacgcaaaggtgaacccagtaatgaacgtaaccggatattctcctgttttaattggcccagcagtaataatttgctgtccttcaaccgcaattcattgcgcaaggagtaattttccagttcaagttgtttgcgggcagtcagagaatcagaaataccatctaaaaactggcggggaccattggcaagaaaataaaaaggactcactgccgtatccatatagctacggactttatggaaaaaatcaaacctgctgtctaccacaaccagaataatggcaatagcaacagcaaaaaagagtcgtaattgtagggagggccctctgctgaaaattggcttcataagttgcgcattattgagcggtttcgtgtcataaacaataaaagagtcataaacgatacacttttggataaacagcaaggaggcactgataaacacgcctcccagctcgcagagttactttcagtcttcgctgaataaatcgccaccgtgcatgtcgatcatttccagcgctttaccgccacctctggcaacacaggtcagtggatcttcagccacaatcacgggaatacctgtttcttccatcagcaagcgatcaagattgcgtaacaatgcgccaccaccggtcagcaccatgccacgttctgaaatatccgaagccagctctggcgggcactgttccagtgctaccataacggcactgacaataccggtcagcggctcttgcagggcttccagaatttcattggaattcagtgtgaaactacgtggtacaccttcagcaaggttacggccacgtacttcgatttcgcggacttcatccgttgggtacgcagaaccaatttcatgtttaatgcgttctgctgtcgcttcaccaatcaatgaaccgtagttgcggcggacataattgataaccgcttcatcaaagcgatccccgccgatacggacagaagaagaatagacaacgccattgagggagataactgcaacttctgttgtaccaccaccgatatcaacaaccattgaacccgttgcttctgaaacgggcaaacctgcaccgattgccgccgccattggctcttcaatcagaaagacttcgcgtgctcctgcactttgggctgattcacgaatagcccgacgctcaacctgcgtcgccccgactggtacacaaaccagtacgcgcgggctaggacgcataaaactgttgttatgaacctgtttaataaaatgctgcaacattttttccgtgacataaaaatcagcaatcacaccatccttcattggtcggatagctgcgatattccccggagtacgtcccaacatctgttttgcttccagccccacggctgcaacgctttttggtgaaccggccctgtcttgtcggatagcaacaacagagggttgatccaagacaattccctgacctttaacataaataagggtattggcagtacccaagtcaatggacaaatcattggaaaacatgccacgaaatttctttaacataacgaaaggataatcctgcaagctggggacggatgttgtccgtctactctaccaaccacatgaagcagcgacaaggcgcatcattaactacttttactacttcaatgaaagtggctacgttattcacatcagaaacacgatattctacgttacttttttctgacagagcagaaaaaaactgcataaaaatgggttaattccaccaataaccccgtcactgaaccctaaaatgtccaaatgccctaaaaaccaacattatagtgtatatagtgcatcccgcgatgttactgattcactttttctatgttgacctataatgatttcagcaagttcaacaaaaattaattttttctcaaatattttgatttcttttgccatctctagctaatatcacgccccaataagcccggcaaaaaagatgattcattaaatacccgctttatcttcagcactcaaaagaaaaattgtccttcatcgtcacttataaacctgtaatcggcggataaatctgttgattactgaaccaataagatataaaaacaaagtcattattaataagttaattatcaatattgaaatcattatcaggcatatttatctttcagcatgtaccccgaataaaaatcagcaatcactgttttgcgactattcatcacaatattgcagactgcctatttctgcatttttaattttatctatattgagaatgtcacaaaaaatgaaatcatgagaatcgtgatggtgtcatacccaaaatccatcagagggagaacctatgaaagcattactgctggaacagcgcgatacattatcagcttctattcagaatattgacacaacccaacttccacccggtgatgtcatcgtcgatattcactggtcaaccctcaattataaagatgcacttgcgatcaccggcaaagggaaaatcatccgcgagtttccgatgattccggggatcgacttttccggcgttgttcgtcactcagaagatccccgttttcatatcggacagcaggttttattaaccggctggggtgtgggtgaaaatcgttggggtggtctggcagaacaggccagagtctcaggtgaatggctgacaccattgcctccgggtttaagtaccagacaagcaatgattatcggcacagccggtttcaccgccatgttatgtattatggcgctggaacagggaggtataacccctgaaagcggcgaaatcgcagtcacaggtgccactggcggagtcggaagcacggcaattactttgctctctctgttgggatattctgtggtcgctatcagcagcaaaccggaaagtcaggaatatttactttctctgggagcaaaagaaattctgccggtttcagacttcagccaacccgctcgcccgctggaaaaacagcgctggtcaggtgttattgatactgtcggtggtacaattctggccaaactgctggctcaggtatcgcataacggcacagtagctgcctgcgggatggcgagtgatatcaatctgcctaccactgtcatgccatttatcctgcgtaatgtccgcttacagggtgttgagtcagcaatagtatcggccgccgatagaccaaagatctgggagcggttacaaaaactgttgccggaatctttttatcaacagaccgcaaacgaaatttcattagatcaggtgatcgaacacgctaataagttggtaaacaatcagtcaacaggcagaacagtagtaaagatccgctgaaactatgccgataagcgtaagtctaataaaatcaagcccgaaaagctgataagaccagtattttgctgctaaatgttacgatatgtttataatgtcgggctttatcgtcaaatttacaaatattgataatagaaaaagatgacaaattgctgtcatcgagttatcttgaacgattgttgacagattgccggagatacccgcacaatggcagacaagtttcgcattttactcttgaacggtcccaacctgaatctgttgggaacgcgagagccagagacctacggcaagttaacgcttgatgacatcgtcagcaaactgtcacaagaagctcaccagtcgggtattgaattattccatctgcaatccaatgcagaatctgaactgattgagagaattcatactgcgcgggggaatacagattttattctgattaatcctgcggcattcacgcacaccagcgtagcgttacgcgatgcacttctggcggtggatattccattcattgagatccacctctctaatgtgcatgcccgcgagccattccgccatcattcatatctttctgatattgcagttggcgtgatctgtggtttgggtgctgatggctatagttttgcattacaggcagcggtcaaccgcttgtcaaaatccaactaatttacataaatagagtacggaatcacactcatggatattcgtaagataaaaaaattgatcgagctggttgaagaatctggcatttctgaactggaaatttctgaaggtgaagaatcagttcgcatcagccgtactacggctgttcagggcatgccgatcactcagcaatacatctctgcgcctgttcaacagcctgcacccgttgcagcaccggcacctgctgctccggcagcaccagccgcagcagagatcagcggtcacaccgttcgttccccaatggttggtacgttctaccgttctccaagcccggatgcgaaaccttttatcgaaatcggtcagcatgttaatcagggcgataccctgtgcatcgttgaagccatgaaaatgatgaaccagatcgaagctgacaaaaccggcgtcgtgaaggcagttctggcacaagacggtcaacctgttgaatttgacgagccactggtcatcatcgaataagcgcatcacgcgggaaaaacccatgcttgagaaaatagtcatagctaaccgcggtgaaatcgcactgcgtatcctgagagcctgtaaggagctcgggatcaaaactgttgctgtgcactctgcggcagaccgtgatctgaaacacgtcctgctggcagatgaaacggtctgtattggccctgctgcatcagtaaaaagttacctgaatattccggctatcatttctgcggctgaaatcacctgtgcacaggcaatccatccgggttatggattcctgtctgaaaacgctgattttgctgaacaggtggagcgttccggtttcacctttatcggcccgaaagcagaaactatccgcctgatgggtgataaagtttctgccatcagcgccatgaaaaaagccggtgtaccttgcgttcctggttctgacggccctttgggtgatgatactgagaagaacaaatcgatcgcacagcgcatcggttatccggtgatcatcaaggcttccggcggcggcggcgggcgtggtatgcgcgttgtccgcagtgataaagagctggaacagtctattgccatgactcgtgctgaagctaaagctgctttcaataatgacatggtttacatggaaaaattccttgaaaaccctcgtcacgttgaaattcaggtactggctgatggtcagggcaatgctctttatcttgctgaacgtgactgctcgatgcagcgtcgtcaccagaaagttgtggaagaagctcctgcaccaggtatttctgcggaattacgccgcagcatcggtgaacgctgtgccaacgcttgtatggaaatcggctatcgtggagcgggtacgtttgaattcctgtatgagaacggtgaattctatttcattgagatgaatacccgtattcaggttgaacaccctgttaccgaaatgatcactggcgttgatctgatcaaggaacagctacgcattgcttctggcatgccactgtccatcaagcaggaagatattgtcatcaaaggccatgctatcgaatgccgtattaatgccgaagatgcaaaaacgttcttgccaagcccgggaaaaatcacccatttccactctccaggtgggttcggcgtgcgctgggaatcccacatttatgcaggatataccgtaccgccatattatgactccatgatcggtaagctgatcacttatggagaaacccgtgaagtggcgattgcgcgtatgaagaacgcactggcagaactgatcattgatggcatcaaaaccaatatcgatttgcagatgtccatcatgaatgatgaaaacttccagaaaggcggaaccaatatccactatctggagaagaaactgggcttacatgataagtaaggcttttttctaatagcaccattctgcataaaatcccatcttttcaagatgggattttttatgacatggtttttgtcgcacattttcttctgaataaatctggctgttaccgtacaattccttcctttatttttctgctttcccggagaatcaatggacaaaagatttgttcaatctcataaagaagcgcgttgggccgtattcctgacgttagcttatcttgtgggttggctactgagcgcctatctacccagtgatacaaccggattaaccggattaccgcgctggttcgaactggcttgtttagcattacctgcacttttcatcatcctgtgctggatgatggtgacatttatcttcaaagaagttcctctggaggatgaagatgcaaaatgaagtcattctgcctctggtaggatatctggcactggtttttctgctctcattctatgcctatcgccgccgccagacgggtgaattcctgaatgaatattttctcggcagccgctcaatgggtggttttgtactggcgatgaccattacagcgacatatatcagtgccagctcgttcattggtggtcccggtgcagcctacaaatatggtatcggctgggtgctgttatccctgatccaactgccggcaatctggctctccctcggcgtactggggaagaaatttgctatcctcgcccgccgttataatgccgtgacactcaatgacatgctatatgcgcgctatcagaaccgtattctggtctggtttgccagcgtgagcctgttagtcgcttttgtcggcgccatgacagtacagttcattggcggtgcccgcctgctggaagccgcagccggtattccttacggtacgggtctgctgatttttggcctttccatcgctctctacactgcatttggcggctttagagccagtgtccttaatgatgccttacaagggctggttatgctgttaggaacagtattactgcttgttggcacgatctataaagcgggtggactgtcagaagcggtctcgacactgcgtactatcgatcctaatctcgtctctccccacggtgctgacaatattcttaacggcccttttatggcctccttctgggtactggtctgctttggcgttatcgggctgccacataccgctgtgcgttgtatttcttaccgcgacagcaaagctgtccatcgtggtattatcatcggcactattgtcatggctatcctgatgtttgggatgcaccttgccggagcactgggtcgtgcgatcatccccgatctgacaattccagatcaagtgatcccaaccctgatgatcaccgtcctgccgcctatcgctgccgggatctttctggccgcgccgatggcagccattatgtcaacaattaacgcccaactgctgcaatcttcagccactatcgttaaagatctctatttaaatttgttcccgcagcagatcaaacaggagaagaaactcgcccgtatctccagtttttctaccctgtttctgggaatactactgctgctggctgcatggcaaccacctgaaatgctgatctggctgaaccttctggccttcggcggattacaggctgtgttcctctggccactggtattgggcctgtactgggagaaagccaatgcacatggcgcgctgacttccatgctgacaggagcaataagctataccctattagccagctttagcattaacctcctcggattccatcccattgtgccatcattgctgctgagcttattggcattcggaataggaaatctgtttactcccaaacagatacaacaaaccgccgcatcacagtgacggcgatatttttttagccttatttttaattatttttcatacatattgcgtttaaaagagaatttttatgccttggatacaactgagattaaacaccacgggacaacaagctgaatcactcggtgatgaactcgtagaaagtggcgcagtgtccgtgacctttcaggacagccacgatacgccaatttttgaacctctgccgggagaaacccgtttatggggagataccgatgtcattgggttgtatgatgcagaaaccgatatgaaagctgtcgtcagccaactggagcaggttcctcaactgggtaaaggttttctccacaaaattgaacagctggaagataaagactgggagcgcgagtggatggacaacttccacccaatgcgttttggtaaccgcctgtggatctgcccaagctggcgggaagtgcctgaaccggatgctgttaacgttatgctggatccgggacttgccttcggaaccggaacacacccaaccacctctctttgcctgcaatggctggatggccttgacctgcaaggtaaaaccgtcatcgacttcggctgtggatccggcattctggctatcgcagccctgaaactgggagccaaacatgctatcggcattgatatcgaccctcaggcaattcaggcgagccgggataatgcagagcgtaatggcgtttctgagttactgacactctatctgtctaaagatcaacctgacaatttagaatgtgatgttgctatcgccaacattctggctggcccgctgcgtgaactggctcctgttatcggttcgttaccaaaatctggtggattattaggcttgtccggtgtactggcaagtcaggctgaaggtgttgctgaagcctatagcaatgaatttattatcgatccaatcgccgaacaagaagaatggtgccgcattaccggggttaaaaaataatcaacaaactactattgaaaaacaggattatccactaaaatgatcctctgggggacaaattggtggtaatacatactatttgtcatgagaaatataggtaacaataaatttcgtcaaaaatacgtaacttaatgttattaaaggataaatagaaaaatttgaaaaaatcaactggaaaaattccgttaaaataccgtttcgctcaaagtttggcctttcatatcttgtgaaaaatgcgtaatatacgcgcccttagtcacagttggccactctttcttcgcctatgcgtatcggacaataccagttgaaaaactgtcttattgcagcccctatggctggcataacggatcgcccgtttcgatcactatgctacaccatgggtgcaggtatgacagtctcagagatgctttcttccaatcctcaggtctggaagacggataaatcccggctacgtatggttcatcgcgacgaacccggagtgcgttctgtacagattgccggtagtgatcccgatgagatggcagcggcggcgaaaatcaacgtcgacaatggtgctcagatcatcgatatcaatatggggtgcccagccaagaaggttaatcgtaaattggcaggctcagcattactgcgttatccagaactggttcaaaaaatcctttctgcggtagtcaatgcggttgatgtacctgttacattgaagatccgtacaggatggtcaccggaagaacgtaactgtgtagaaattgcccaattggctgaacgttgtggtattcaggcgcttaccattcatggcaggactcgttcttgtctgtttaatggtgaagctgagtatgacaacattcggacagttaagcagactgttgctattccaattattgctaatggcgacattactgacccgctaaaagccagagcagtgcttgaatacaccggggctgatgccctgatgataggccgtgctgctcagggaagaccctggatctttcgggaaatccagcattatctggaaacaggagaactgctgtcaccgatgccccttggcgaggtgcagcgtttaatgaacgagcatgtacgagaactgcacgacttttacggtcaaggcaaaggagttcgtattgcacgtaagcatgtatcttggtatctcaaggaacatgctcctgatgaccagtttcggcgctcattcaacgccattgaggatgccagcgaacagctggaggtgttggaagcatacttcgaaaatttttgcgtaaataaagaaaagagctgacagaactatgttcgaacaacgcgtaaattctgacgtactaaccgttgctactgtaaattcacaagatcaggtaactcaaaaacctctgcgtgactcagttaaacaagcactgaagaactattttgctcaactgaatggtcaagacgtcaatgacctgtatgagctggtactggctgaagtagagcaaccactgttggacatggtgatgcaatacacccgtggtaaccaaacccgcgcagcgctgatgatgggaatcaaccgcggtactctgcgtaagaaactgaaaaaatacggcatgaactaatcctagtctagtaacttgctgtttaagaagcactttctcttttggggaagtgctttttttatttctgtttatacaaatgtttatacatggaaaaatgtttatattcgctaagtatgagcaagtaggcagagggaaaacttggaaacaaataaaaagctatgagaacaaaaaagtttctttttatctcagtacgttaaagtgtcagatagtgattttttgctatataaacaggtactacatcttcaagaatctttatcagctgtggatccatatagagataatcatctggaatatcgagaacatggatcggcttagatttaagcaaacgggaaaatacagcttttaaccgatttttatgcttctgttccatgacacaaataatatcagcccaacgaataagatcaggtgtcacctgctttttagcattactgcttgtacctgcagatcgaacagaccaatttacatcattacgccatatttgctctgctgtcggactacgccattgatttcgactacaaataaataaaatattcataaacccttataattaatccttaagagcattccgcgttaaaatttgggttcgcctattatccatatctctcttgttttattaagtccggcggatgctaatagtactaaaaggaaatagccaataataaaatttcagtttatcgctatttcattaagaatcagtgagtaaaacataattaatcgtcattattagtatgataagttatttcttttatattagtaaaatagaaatctcaccattagaatggtgaacttaattaagaacacactaactctcatttctactcttcctatatcagataatttatcatccaattaacgccataaaaaaataattttaattttataatacagataggtttcaattactcattaaggatattatttttatgtcagacaaattaatagagacatggattgaattgcatagttcaacatcagaagagcaaaagagaaaactttttatcgagtttttgaatatatttcattcatcagatttttggcttatcagcccagtttctgaggagagaggttcctactcgttttcgataaaggaagatcctgagtttcattccagaccttatattgttgcttacctttcggaagaaaatccggcttcatggcataatgcagaatctatcgagaataatcctgaaaaccttcatcaattcggtgctgaatacttgtactatcttattgatgagtttcaatgtgatctcgttatctacaatggtgataattatatttgatcaagatacactgacgcatataaaaaattcggcacaaaatgcaaatgatataccagaggaaagaaacgaaatatatctccctcataacccacagccttttttaacctctgattggggcatgatactgggtgctccctatgcctactttaatggatggaattgtaatgattattctccagaagaggatgacgctggtttgtcatcagcctggggaattgaaaatcggcaagatctagttttccagttatttaaactaatggttaacgggcatgctgctgattattacaaaatgcgagatgaactcagtgaattatcaaaaccggaatttgatgaaattttagcgggcattcagcaaagtgatatgaatgcatacgataagcaggaaatcatctggcgttataccatgatgtatgacaatgaaaacgatattcaaaatatccaatatttggcatgggactatgttcgtttcagtatgctgtgcctgaacggatgcaagctgcaatatatcacggaacaggaagctaaaaactggacgctcatgctcgccccactgttacgaatggtttatagcggatgggacgatctgtggtaccactttgcgcttacacgctggttttgggcatccactgatgaaggctgggctgaatgccagtccgagtatattggtattatccgtgcattgctgaatgatccgaatagcccaacagttgcgatcaattggaatagcgagttaccgccaatcgagacccactcatttgctcaggcactaactgaagttttaaccgaacaaaatccagatgctgaggttaattttaatgaagtgcatgatgctattagagaacaagtcagggctgatgaaccataagccgtcaaaaaccagttgctatctgtattcactgattatgcaatctacttcggtaaccatatgagtataaacgccagtaattatctagctggcgtaattttgctctaaattatcgcatcttattactatcccgaataaatatttaatcctggtgaacgtattatctctcaaatgtcactcttgatatttcatgcagatattctgaattaaatggggtgaaaataagttaggtggcgataaatcaatcaacatataccgttagatgagaaaattatcggctattaaataaggtttatttttcagcttatataataggctgaattagataatcttcaccatctcttcatacaaaagtcctcattatattaatatgcgcatggtcagatgatgagatagaaatcagtgtcttttacttactttcagtcaattttatgaggaaagctctaaataaacagcttttctaacaattgagtttataaagtaaacacgtgtaattaaataaaaaataccttacttgcaccaataagttcaatacattgattttatttaaaaaacaaagaaatggcataaattcattgataaaaaaatgaactgtatctgaaatgttcaaaagtgcgagtaaactgaaattttatgcgaaataaaagacaatttagcggaaaaggtttttataagtaatattttctaattaaaatttttaattttgcaacaatcatccaatgaaagattaaaatatatttatttaaccaaaatctgtaaaattttattaaaaaacaaaacattttataccaaactgtaaacataatcctatataacattacttaagtcaaatttcattacataccaaataacattccacttaatttattataatatatgaattttttttgttattcacatatttaatctctttcaaatagtattaatgataacaaattgttaattatcataactcaatagcacccaaattaaccagaattaatattacatcatcctttcatatacagaacttaattctataccatatagataatgtagattataaatccaaaccaaacagtttggtatattttgtttagtttctaaccttagaaagcttctttaaaaatcaaaaatatgccaaataatggcgatttgtttataaaaaattatattattgggtttttatagatttaattaattaaatttaatttaaattcaatatgttatgtatataaaaataacaaacttaacgttttaaggcctgttcattattcctcatatgagaagaacggagtgctgttttgctcaatgacgaggaaaagcagttgcaagaagcaaggtaataacaaaatagagaaacgtggtttgcatcatggaagagtctaccttgcctcagtaaaggttctgttttttacaagacgttaataaaaaaggttatttcattaaaaaaacaaagcgcatgtcggaaaacaaaacggcgaatcaggtgtaacaataggcataccatgaacgatggtaaatccgtcagggtatttcctatgtcgtgcacaatgacgaaggaaaactgagtcatttttaagctccagggcaattatccttgataacgccataacttactgatttaaagatgaaaggataagatatggaagaagatgcaaacctactagtcgggcaaagaattcaacagaaaaggaaagagttagggatcacggcaactgccttagcgaaacaaattggtatcagccagcaacaactttcgcgttatgaaagaggaaccaatcgaatcaatattactcatctggttgccatctgtctggaattggaaacacagatttcctggttctttgaagactgttttgaaaaagagagcaaggaaggcattgttaataaactggatactcaatatattcccattgctgaaacaattataggaaaaaatggttgttagatggggaataacccgccgtcagaagcctgccagcccgcactaaactgaaaaacatgtgggcttctgactctactggatacttattcactttctcaatcgccgccttcttttttatgtgcacgagctatgtaccaaaccgatgcaatgttacgagccaatacatgcagattatcggtactgtcagctaaagcgtcagcaagagtgcaaacttcagggataatagaaaatacagcagtcagtccatgttgatggacaacattataatctttactcattcctcccactaatgcgataacaggtataccgaatttgttggctatgcgtgcaacaccaataggtgtttttccatatatagtctggctgtccatatgtccttcgccagtaataaccaagtctgcgccctgaattgctttttccagcttcagagtatcaagtacaatttcaacacccgactgtaatcttgcattcaaacaaccgagtaaagaggctcccatacctccggcagcaccagctccggcagcatcaagcacatcaattcctgttactgttttaattttcatcccgtaatggagcaaagctgaatccagtatattaatcatttctggtgtcgcgcctttctgtggcccaaataccgcagatgctcctgattcaccacatagcgggttagtgacatcacaggcgacggtaatttctaactgactgagacgaggatcaaggtttgtgagattaatactttccaaacgtgttagcgcaaccccaccaaagggtaaaggacggttatcgccatccgttaaatttgccccaagtgcctgcatcattccggcaccaccgtcattggttgcgctaccaccaatacctaaaatcagcttttcgacaccatgatccagggccgccagaattagctcccccgtaccatagcttgttgttatcagaggattacgctgtgccagtggcaccaaatgcaggcctgaagcagctgccatttcaatcactgcggtttttccatcacccagtaatccccaaaaagcctcaacaggttgccccagaggatcagtgactgtacatgtgaatctttttcctcctgtcgcagccaccattgattctaccgtgccttctccaccatcagccattggtaacttgatgtaatcggcctgcggaatgatttccctaaatccctgctctatcgcttccgctacctgcattgcacttaaactttccttaaatgaatccggagcaattacaattttcataataatttctctctcccgcaatttatctaacccgcaaaaccaaatacgccaaagattaaggttgagataaaagcgatagttaagcccaccagcgtttcatatggcaataatttcaggcgttcgtgtaactgcatatatacactgcctcctgtcgcatggaaaaaactgccgtgtggcagctgatccagtacgatagcacctgcatgtaacatcgcagctcccgctaatgcactgatacctaaatcgagtaacgtaggtgcaaaaacagccgaagcaacagctgtacccgcggtggtggatgctgttgtcattgacattaaagcccctgaaaccggagccagtaaataggctggcagacctgatgctgttatcccgtggatcaatatttctttcagttcagaattagcgatgatgcctaccagtgtccccgtccctaatagcatgatagctataggcgacatacggctcagcccagagagaataaagcgatttgattgacgccaatgccccataataatagcaccagccaatcctcctacgggcaatgcaattaaagggtcaatagtgatatcggcaaccggacgtaaagccagcaaaaaaatggcaatggcaggagccgaaattgcagccataaaagagggaagagattcttgtgcggtcattgtcagctcttcgcttctgaccttatacccccgcgttatcactcttcctgaaagatagtaagccattactaacccgaatagcccggggagaatacctgcgaccatcaacgatgttaaagggacatgaaaagcttctgatgcagcaatcgtatttggattgggagacatgacgtttccggctttacctccgccaatcatggcaagtaagatcgacatctttgataaatcagcccgatgggcgattgccagagcaatcggtgcaacggtaatgattgccacatcaataaataccccaacggctgttaatagcattgttgcaattgctaaagccaataagacccgtttaccgcctgccttgcgtacaatagtttcagctatggtactggttgcaccggattcaatcagtacaccagccagaacacctgcggccaatatacgtaagacagcattggtcattccttgtgcccctgtgaccatcaaattgacggtctgtatcagatctgcacctccaatcaaaccgccaaacagcgctccggccatcatgccataaacaggagaaacttttcttaatatcagaaagatagaaacaaacaatgcagcaatagcaccaatagcaccaatagcagaaacagtcgtcatcttgtcattatcctcaatgacttcattattagctgaagccaaaagattactatacacttcgtctttcaagttgcctctttgttggccgcactcgttcaccccggtcaccgtttttataaacatacgattatctatgctcccggtgactctctcccttgccgccgcgacgcatcttaaaatccattgtgtatatacgcataactcatttatataaataacgcgcataaaaaaagcgataactaaattatcgccttttaatctgctattgcatgtgttcagcataaatatatatcgttcatgctcagctagctgtgtaaattacgcttcaattgccattcgtaactttttcatggcgtttttttccagctgacgaacccgttcagcggatacgccatatttatctgccagttcctgcaaagttgatttgttgtcatcatccagccaacgggaacggataatatcctgactacgttcatccagcttttccattgctacagtaagtttatccgcagcatggttttcccaattgtcttcttcaatgccatccgcaaaatcagacgctttatcctgcaaatacagtaccggagctggcggattatcatggctgtcgtcatcagatggcatatcaaatgccatatcctgcgccgacatacgagactccatctccagaacatctttgctggtcacccctaattctttggcaaccaaatcaacttcatcctgactgaaccagcccagacgctgtttagccttgcgcaaattgaagaataacttacgctgcgcttttgtcgttgcaactttcacaatacgccagttacgcagtacgtattcatggatttctgccttaatccagtgaacagcaaaagacaccagacgtacgcccacttccggattaaatcgacgaaccgctttcatcaggccgatattgccttcctgaattagatccgcctgcggcaaaccataaccagcataactgcgagcaacatgaacaacgaagcgcaggtgagacagaatcagctgttttgctgcatccagatctccctggtaatgcagcctttctgccagttccttctcttcttctgcagagagcataggataagcattggaagcacggatgtacccttccaaactaccttgcggaactaatgccaaagtttgcatttcttttgtcattcaaattctctcaaactaaattagtggtcttttaaactttcctgaatcaacctattagattttttcaggccaaagatgagtctattttaccatcgtgaggatcatattcaaattatctgcattgtatgcccacacatacaaagtatacaaaacaataacagtttcttcgactatgattaagcctaaaagttcaccataagtccaacaaaagtgttctattcaggcctgaaacgacgcaaatgctggacagtcgcaaaccatgctgcaatccaaccaatcatacctgaaatcagtaccagtaatagtgattcatcccaacccaggccgtataacttgaaagtggtgccgaaaacgctggcaacttcagtgacaacgctggaaagtttccagactagcaggtacgaaagaagcagcgaaaggatcgctcccagaattcccagtaatgcccctccattgagaaaaggccgaaggataaacccatccgttgcccctatcagtttcataacattaattgtttcacgacggctgaaaatacttaaacgcacactgttaccaatcaccagaagcagcgcaacgaccatcagcccccctattaccgcagcaatccggccaataaggtcagccagtgccgtcagccgggcaaaccagccatcatccattctgacttcttcgataccttttagctgtgcaacacggtcacgtaatgttgtcagcgcctgtgaattctgaaaatccagtttaggggagacaatcgctaccgcaggcaacggattttcctccagcatatctaaggcactggcaaaccctgaccaagcgcgaaactcattcacagcctcctcacgggacagatagttcactgacttcacgccatccattgctttcagttcttcaatcagctggttagagctgacgtcattcagtgatttatccagatacactgtgagttgtggtacgggataccattgttccacagcctgattaacgtttttccagacgatgtaaaatacactcggtaatgtcagcgaaatagctatcaccatgatggtgagcaaagtcgccagtggctggaataacatatcagacagtgtgcttttccatgcataacgtgactgtacgcgccatccccctttcagcgatttggagcgggatttgggagaaaccgtttttttcgttgaatgacgggcaggcttaaccatgatgctctccttgcatacgtccctgattcagggtcaggatacgataattcctgcgctcaataagagcggtgtcatgcgtcgccataagaaccgtcgtaccgacccggttgaattgttcaaacaagcgcataataccctcagatagttcaccatccagattccccgtcggctcatccgccagcagaacggtgggtttattcacaacagcgcgggcaataccaacgcgctgttgttcccctccggagagctgaatcgggaaatttttcgctttgtccagcaagcctaccttgtccagtgccgccgatacccgtcgacgaatatcttcggtactggcgcctgagataatcaatggcatggctacattatcgaatacagtgcgatccaacagtagatgatgatcctgaaaaatcataccgatctgacggcgtaagaaggggatctcacgggtttttaatcggctgacatcatgcccgccaaaccagatataaccggcactcgggcgttctatgccacaaataagtttcagaagcgtacttttccccgctcctgaatgaccggttaaaaatgccatttctcccggacgaaggtggaaatccaccccttgtagtgcctgccgtcctcccagataggctttactgacctgttcaaagcgaatcattgatagttaatcctcccgggtgaaaagagcctctataaaatcgtcagccttaaatggacggagatcctcgataccttccccaacaccaatatagcggatcggaatttcgaattggtccgcaatagcgaaaatcacgccaccttttgcagttccatccaatttggtcagtgaaataccggtcaaaccaactgcttcatggaatagtttagcctgactgactgcattttgacctgtgctggcatccaaagtcagcataatttcatgcggagcttcttcatccagctttttcattacccgcacgatttttttcagttcttccatcaaatgcgctttattctgtaaacgccctgcggtatccgcaatcaggacattaacacctttagctttagctgactgaatagcatcaaaaatgacggaagccggatcggcaccggtatgctgtgcaactaccgggattttgttacgctcaccccaaacctgcaattgttccaccgctgctgcacggaaagtatcacccgcagccagcatgacggttttaccctgtgactggtattggcgagccagtttaccaattgtcgtcgttttaccaacgccattcacaccaaccatcaaaatgacataaggcgatttacccccaacttccagtggcttatcgaccttagccagaatacctgacatttcttcttttagttttacgtataacgcttccgcatctttcaattctttacggctggcgtgagttgtcaaattgctaatgatcttgcgagttgtttcgacaccaacatcagcaatcagtaactgttcttccagttcttcaaacagatcatcatcaattttcttaccacggaataatcctaaaaatccggcccccaaattctggcgggtttttaccagactttttttcagacgagcaaaaaaaccttctttagtcggacgttcctgctctttaggtaaggaagactgttctacagcctgacgcgcggcttcttccgctaaacgttgctgttccgcttctgctgccgcctgacgcgcgacttcttccgctaaacgttgttgctccgcttctgccgccgcctgacgcgcggcttcttccgctaaacgttgttgttccgcttctgccgctgcctgacgcgccgcttcttcggctaaacgctgctgttccgcttctgccgctgcctgacgcgcggcttcttccgccaaacgttgttgttccgcttctgccgctgcctgacgcgcggcttcttccgctaaacgttgctgttccgcttctgccgccgcctgacgcgcgacttcttccgctaaacgttgttgctccgcttctgccgctgcctgacgtgccgcttcttccgctaaacgttgttgctccgcttctgccgccgcctgacgcgcggcttcttccgctaaacgttgttgctccacttctgctgccgcctgacgcgccgcttcttcggctaaacgctgctgttccgcttctgccgccgcctgacgcgcgacttcttccgctaaacgctgctgttccgcttctgccgccgcctgacgcgcgacttcttccgctaaacgctgttgttccgcttctgccgctgccagcttttcttgttcaatttgttcttcttgttgcttcttttcctgacgaccaagtccgaaccaagagaagaaacctctttttttttcttttgccatcggccactacactcctcgcggttaattatggcgttataacaacctacaccagaaactgactggaattacctttatttcaggccatcagttcttatcgggataagtcaagaactcagaccaatagacgctatactcttcatatttcaagttgcctctttgttgtctgtgacataaattgaaatctgttaggtctctattttaacaattacgcctacagagataggttctaatggtgataaaatccagtctaacattttcatctcaccacaacacatattctattgaggatttcgtggtaaattaatcaatgggtttcctgatcctcgtctttttattcaccatcaaggcctgataagcagtagataatattacggcgatgacaaataattaatttatgtaactatgactaaaaaaccacagcgctcgtctttagggcaaattcgtattattggcggaaaatggcgcggaagaaaattaccggttcctgatagtgaggggctgcgtccgacaaccgatcgtgtccgagaaactctgttcaactggttaatgcccgtcattcagggggctgactgtctggattgtttttccggcagcggagcactcggatttgaagcgttatcacgttatgcaaacagtgccactttgattgagtacgatcgtaatgtagcaaaacagctatcgaataatttagcgctattgaaagcagacaacggcaaggtgatacaaaacaatacgctacaacatctcaatcaggccggaacgccctttgatatcattttccttgacccaccatttcgaaaaggaatgctggaagagaccataaacttgctggaaactaacggatggctggctaaggaaagctgggtttatgtcgaagcagaatctgaatctgccgcgacagcagtccctgcaaactggcacttacaccgggaaaagattgccggtcaggttgcatacaggttatatattcgccgccagtaaatgacggtctggctatttaaatacaattctggagtcaatgatgtttatccaattgggaagagcaattatggtttgtgtctgggggattatgatcctaaatctggttcaacccttccctaagccattaaagtattttatggatatcgctatggtttttaccgtagtcatgcatgctttccaacttttgttgttaaaacactctcagccgaaagaccaaaaactttctggctggttgcaaactaaaatcttctttttcggggtatttgagttattgtcatggcagaaaaaaaaccggccggaaaaaaaataataccttcattttcccggtaaataacaaatagtactgaacagcaactccccagccatataagcaacaatgtgactggggcagaaaccgcaaaaagtggccttcccttttatacgccaaacttacgccacacgattactcattgacgtacattccttttgataataaaacgttaccttctcgttaatataaaattaaagttggtactctcgctttatccccatcataaacagcaattcctgataaaacaggcgctgaacatttaaggaaaggaaaaatatgagttggccatttcttgctgtgttcttctctggatggttatatattgatgccgcctatcgtggtatcaaatggcagcaatgggtgttctatccggtcacgatgctgcttctgctattatgggcatttcaggctccaaaccttgaagcttccggctacctgattattgcaggccttatcaccgccctgctttctgactcactccgaatgctccccagtaagtatttgctattctcattcgtcgcgctatttctgagttatttgctctataccatcagcttcgccctgcatatgagtttccacttattctttccactgccattaattctattggtggtaggcattgtagtgatgttggtcatctggagccgtctggatcaattacgctggcgggtgctggatacctgggttatggtgctcattatggtttgggttgccggagaacaatattttgcgctcggtaatgaaagccgtctctcagctatggtcggagcaattctgttactttttgcgcacagcatcagcatgattagccaataccgttttccttttaaactatcaaaagcaatcgtagcctcctgccgttttatcgggcattttttgattatccgttcactgattatttaaatcattgctttattctcatcctaagtgaggcgttgatatcaacgcctcacttcaatacacagatattcttgccatttcttccaattacaacgctgtctgctacatagcagaccccatcggtaatagcacaattcatcaaaataattgctttttttatttgactctggagtgaactctaaagtgtagagttaatggtaatcaacctgaataaacatcattgagaggccattatgttctctatttccaaaaaacataaacaattgcagcgtggctctatctcgtccccaaaaagggccttgcagggttcttccagcctaagaaatgaaagtaagcaatcacgtacacgtgatacaaagcatcaacactcccatgatcatgcccactcccatcataaaagccattcgcatgatcatcatggcggaagttgcccgcatactcacgcacgccctgtacaggatacagttcccgctgaactgatcgccagacagcgttttaactggatgattcagggtatggattgcccgagttgtgcaggcaaaatcgaaaatgcagtgaaaagactggataaagttaaacaggtcaaggtgttattcgcaaccgaaaagctggttgtagatgcagattcagatattcgggctgatgtcgtcaaggcggtaaagcaagcgggttttgaaatcaaagaaaccgattcaacatctaaactgccaccagcaaccagcctctggaaaacattctctccgattctccttcttgcggtattgatggccgctagcggagtcatcgctaaaatgagtgctcctgccggaaaaatcgccttcatcattacggtcttgattgggttatatcctatcgcaatcaaagccatcaggttgttccgttccggttctttctttgccattgaaacattgatgactgtagcggctatcggtgcattgttcatcaacgctacttcagaagctgcaatggtgattttactgttcaagttaggcgaaatcttagaaggttatgccgcaggccgtgctcgaagaggtgtcagcgctctgatggcactggttcccgaacaggcactacttgtaaaaggtggcatcaagaaaaaggttcctgccgctgatctgcgtccgggagacattattgaaatcgctccgggtgctcgcttgcctacagatgctgagcttcttaatccgtttgccagtttcgatgaaagtgctctgacgggagaatctgtccctgttgaacgccagcaaggggaaaaagtcgcagccggttgcctttcgattgatagatcagtgcaaatgcaggttgtttctgaaccgggacacaacgccattgaccgtatcctacagttaattgaagaagctgaagaacgccgtgctccgattgagcgctttatcgataaattcagccgtatctatatgccgctgattatcctgctctcggcacttgttatcgtgatacctcccctgttttttgccgaaccgtgggatatgtggatctatcgcggcctgaccctgctattgattggctgcccttgtgcactggttatttcaacgcctgctgctattacttccgccctcgccgctgccactcgccgtggtgcactcatcaaaggcggtgctgcattagagcaactcggcagcatcaccacaattgcactggataaaaccggtacactgactgaaggaaagcctcaggttacgaatgtcgaacccgtggaaaatatcagtgtggaaacattgctggcattagcgggttcggtagaaagtggatctcatcatccgctggcaaaagccattcttaatgaagcggaaaataaaggtataacagttgtcgaagcggagaaccgcaaagcccttgccggtattgggattgaaggtcagttatcagggcagaagatactggtctctgcccccggacggctttctgaaaatgttttatcaccacaatggaaacaacgggttattgaactggaagacagcggtaaaacaaccgttgccattgttcaggatgggcagtttattggtctgattgccatgcaggatactttgcgtcaggatgccattgaagctatccagtccctgaagcgtcaaggcgtcaatgcagtgatgctaacgggcgataacccccgggcagcggcagctattgcgggtcagctaaatattgattatcgggcaggattgctaccggaagacaaagtcactgcggttatgcagcttaatgaaaaacacaaaacgatgatggtcggtgatggtattaacgatgcaccggcgatgaaagcatcaagtattggggtcgcgatgggaagtggtacggatgttgcgctggaaacagctgatgccgcactaactcataaccggctgactggtctggcggaaattattactctgtcacgtgcaacacactacaatattcgtcagaatatcactatcgcattaggcttgaaggctatattccttatcaccagcttactggggattacaggattgtggatggccgtgttagcggattcaggtgctacagcactggtgacagcgaatgctatccgtctgctgcgcatcaaaaacaagggacaataaataatttctctgcatgaatacgccctcactcaaatatgagtgggggatatataattaactcagaaatactttgaaagttcatgaaatagtttatgagtaactttctaattatttttattccctctcatattatttcatttttaatctacctggattcacaacttgtttattaaaaagcacacttcttttttcgtcacgaaaataaagacagcgaaccaatcaggtatatttcacgccctttcatccatacccgcccggtggttgtggccaaaccaccggactattaatgattgaacaatactctccagattactggcaaatattttgtgtatgtatcaagatttattataaaaaacgccggaatacagattattcctttaatactctcatttgattgcaacttaatgtaatcaaaaaatta

SEQ ID NO: 120 - DNA, 66038 bp, Xenorhabdus sp.
  unsure (1)..(66038): unsure at all n locations
agcataaatccgggaaaattgttccttaccgggttgagttaattcggcgcatcggtcaggcagcggtggatgctattgagtccaatcatgatcggcatcgatggacgattgaggaatgtcagtctatccgggataagtacaaagaaaaactcagggagttacgggcacgggaggtggcgtgattttcactaacttcgacgaggctcaggcttacgcaaggaagcgtcggctggagaataaagaacactatgcaatcaaccagagaccgcaagggcgattgacagttggaaagtgcgggaagcatcggggtcagcgtccggcgtggacaacacgcgatgatgaacgctctgaattctataacatcactcacagcaaaatttacaagctacatcccactgatgcgccattaattctggggctgttagcggaagggttaacccaaaaagaagtggcagaaaagtttgatgttagtcgttctggcatcgcaacttttgtaagaaaagcaaaggcaaatctgaggataaaatgaaattagaatcattacccaagtacttttcacccaagagcatcatgtttagtgactctccagccgcaacagcgactgattccttttcaattaccgatgttatggcctcactagggttggcgtccgctcaggcgaggatgggtattgagctgtttttggcgaaacaggggatcaataaacccgatgaagcagtggagagtctctatcagtatgcactgacgcaggttcataagcacagtgcaattgcgaaacttgatgaggatgttaagcaaagcatcctgcgaatactcgtaaattatgcctttcaggattatgcgaggagtgcagccagtaagaagctgtgttcggattgtgatgacgggtttatcgaggcggaggtgttttctacaaagacatatacaccctggcgtgagcgaacgctcgttaaggctaatttaagcatgggagcggagattatcccgtcatcatacgctaaatctcgtgaggtgagagaggtggtgaaagtttcctgtccaacatgcaaagggaaaggtgaagtgagtcattcgtgccgttgcaatggtcggggggaggttctggatagggagaagactgaattacagggtattccggtttataaaacctgtcccaaatgttcaggtcgtgggtactccagattgaaatttaaagacgtctggagtgcattaaaaccactcacggaagtatccaaaaccacctgctacgacaaatatcagccattgtttgagcatctggtaacggaatgcttcaaggaagaggacagggctgattctatacttcaaaaactcacagaaggagaaataatttccaattaatattaaatgattggtaaatagatgttgcatcattcggaaaaatagcctatcgttatcccaacgatgagttattgcctctcgttgaaataaaatagaattccatagcctcgcactcgcggggctttttcatatctaccaatagtcaatttagagttacagcccaactaccgaggattttcaggtagttcgaaatcccgtaagttcgtgatgttcagaggaatatctttgttctcccttttagggacttgaagacctgtttaaggtgcgtccactcaggctaccgtctggatgacggtattgttgaaagtccatgttccccgttctcagacaatcgttactatctgactaatggctggtatggtattcattcaaggctgctaatgcggtctttttgtttttggtcgccaactaccgagaaagtgttgggtgcgttgcggatttacatgttccagccgaccgcaaacgctcatattggcaggaccacaatttaacatctgaaaacaggcaggctagacccgctacaagctacgcacattgcgtatctatgccctaaattcttagggcaacctattcactacaactcacaggggcgaccacagactcaccccacggacgcccattgttctgatggggtggaaatatgcgtatgactgaaaaagatacggagttctgggcgcatgtctgggactggttaattatcaatgctccttttctgggtggtatgtttttagcggcatcaactgcatttgcccgggagaaaagggatggctcaggctggaaagcctcattagtcgaagcttttatctgtgcggcaatcagtgtcgggattattaacgcactggagtatgcacaactaccactgagtctggctcagttcttcggtgtcctgattggctttttggggaccaagaagattggttccattcttgatgcggtcttcaccttctttaaaaacaagttcggggtgcacagatgaccagaggcattcgtaacaacaatcccggcaacattgactacaacaaagcgaataagtggcaaggtcaattgctgcgtaaggcagcagagaagaaagcagggggcagtaatggcaacaacgagatgtagtgagtatgtagatgctgtcctgtcatttgatttatttgcgggtgattttggtgatggaactgaacgttgcctgaaagacaaaatcggtataacccgcaaatcggctcgctgttatatctgcgatgaaataattccttcgaaatccacggccagattatctacatgggtttttgacggtgaaatcatgcactaccgttgttgtaccctctgttgtgatgcgatggctaaattcaatggtgatgacgacgaactcattgatggtcgatatgaaattgatgatcgatatgaaatcggcgaaacatctcgaatgaagacaggtgaatcatgaatacctatgactttcctccttatggtatcagtagccggatgtatcccaccactgttgttttagaacgtattacgcattttcagcccatcgactacaacggtaatagtggaacagctatttttctggacactggagtagaggtttgcaccagtatgtgtagttgggatgttggaaaattactgaccgaagctgaataacagcggggtgaaatctgatgaaaatcagcgagaacggattgagcttcatcaagcaatatgaaggcctgaaactgaaagcctatcccgatccggctactggaagcattccgtggacgattggctacggtcacacaaaagacgttaagccagggcaaattatcaccgaacagcaggccgaagcatttctgcatgatgaccttaagcctatttatatcacccttgaatcagccgtgaaggtaccactgactcaggatcagtttgatgccctgtgctcgtttatcttcaattgtggtgccggtaactttgttcgttctaccttgttgaagaaactcaatgccggtgactaccaaggtgcagcggatgaattccagagatggaataaggcagcgggtcaggtaatgaagggtctgactcagcgcagggcatctgaacgccagatgtttttatcatgagattcaatctcacctatggcgtgattattgcgctgattattgcctctggtgctgcttacctctatcgctctgggtataagaaacagcttggtatcaataacgaccagctaaccgaaatccagcaactgaccgaccgaattaactatcagaacacgcacattgatatgctgcatgagttagacagcaaacacactcaggaactcgccaatgccaagactgaaatcaacactcttcgggctgatattgccgctggtcgtcgcaagctgcgcatcaaagccacctgtcccgtgtctgaaaccactgcctccggccgcgtggtcaatgacaccaccgtcgaactcagtagagaaactggacaagctgttctcgatatccgagaaggcatcatcaacgaccgggcaaaactgagatatttgcaggattacgttaaggctgagtgcgggggagataatggaaaatactgataaagcattagttgaattgattaacaaggcactgtcaggcatagatggcatgattggatttggcaaagaccagttacccgcagtcatagagcaattaatgctttggaaactctggcaacatggattgttgtttgtcctgtttctggcgctggcaatattggcgggttacgtctggaggaaagcgacaaaaagcatgatctacaatgatggctatgcataccttcccctttttctttttgtgtgcgcatttggatttagctctttacgttgcggattcactgtcattcagatagtcatagctcccaaagtctggttaattgagtatgcgtcatcgcttattaaatagtaccccagaacaaatgactctgtggcgtggagtatgttaggacgcagtgcattaattgaaaattgaaattttttcttagaactggctttgcatcagaggacgaagaaaaaaatagtgctatacattcagtaagcgtttaaagttcttggcttcaaaaatagttacattacctctttggaaagaaaggcaggaaaatgaaagatatagatgtgcggcgtgctgttcactccaagatactgaaagaacatcataaagatccagatacattggttattgacgagttcacaatgagtcttggagcaagccgtgctgatatcacggtgattaatggatttatgcacggttatgaaataaaaagcaaaagtgataatttattacgcttaccatcgcaggttcaatattattcatcagtcatggataaggtaacacttgttgtttctgaaactcacgctaaaccagcaatggaaattatccctgattggtggggggttaagatagtaacacaaggcgcaagaaatggagtatatctgcacactgaacgtcataatcgccttaacccatctatagataaagtctccctttctatgctgttatggaaagaagagatgctggaaattctctctgttctaggcaaagaccgtggccttaaaagtaaaccacggcgtatattatggaacaaactagctgaagctttagacacaaatgagcttcgtggtttcgttagagtaaaacttaaagcccgtacaaattggagagttgaaaaactaccttagttatgtggtgattttgcccgcttcttctccaagtttctgcgttgccaaacttataattcccattaggatcttgaagaaattttgcataagtctgtgcataatcatatatatcctgatcacctgcagaaaatgaggctccagaatatgagtgatgagaaattatcgcttggctatgggcaccgtattgttcataaccatactggcgagctactttccctctaaatacccagaaatcatcgtctccagtatatcgaatgcttgctgtagtgctagggtatctagtcgcaggatgagagtaatctggatgttggactccgtaatcactatagataatgtgtcttactagctgtttactagaatgaagttcttgccatagctgccattctaagcgcgcttgtgggtaaactcctacggagatatctcttaagtcaacagggaaagaacctgacgctaatgcaatggacctgaattcttggacgtgagcgaggttattaatcatccctgatgctaatattttgatttgacctgaactgatatcattctctgacagcatatcgcgtaagtctatgatcacatctataaattcaagttcgacacctagtgattttatatattcagaaataagctgagggttaactagatctgaagttgttaatctaaggcagacttccccctgtacaagagagtgaattgattgctgatagcgaagtgagcgggtaggagatgttaccggaattacccttaatcctgcactcctagcttggttaatagcattttcaatagggtattgatctgctatgtcaataaactgaccttcaatcaaaatgccatccaagaatatggtcgaaactccggtgcgttcaacggaaattttctgtccgaatctatcgagtattatgtcatatgttttgtctggataatcctgatctggataaagaggagcaggttcaatttcaagcagaggaattatttttgacttggtaaacgaatttaattgacttagtgcagcaagttcagctcgcttagcttttaatatagggatatatgaagctgttccgaacactatctatctccttattttttgaggttaaaaatccatctattatttacttctataaaacgcaaaacgtagagatgtgggtcatatttccgcaaacggatacaatcatttattaatagccgtgatgttattcatgtttcttaaccattagtaactcactgaaactaaaccaaatatttctttacccattccctgagtggttaaaggaataccccaagccatcacatccgtggtggtttttttatatctgaatttcaccgcttctcgctcgaagcacaaacaccaaagaacctttcaggataagccttgaggaataccagtagtggtctggttaaccctctttgggctggttattcctgagcgcaaggtttatcactaaaaggaactaaaccctatgagtacagcattaactttcaaagaacatgaaatcgttccattcgacaataaggacgggaagatttggtttaccagtaaacaaatggctgaactgctcgagtataagagcgagaaatctgtcactaatctttacaacgcaaataaagatgagttcacggacgatatgacaatggtcactgagtcaatgaccattggaataaacaatagcttacgtaaaaagaaggtgaggattttctctgtcagaggttctcatttaattgggatgttagctgatactgatgtcgcaaaatcattacgcagatggttgctggatttggcagagaaagagcatcagccgcataatttggctctcatggatatgaaaagcctcaaagagctaaccattggtgaaatgcagaatcgcttggtaagtgccaataaatggtcatatgaaaacttcggtcagaaaggcagtgacctgatgaacttgcgtaagcgtcaccttaagaagatacgtaaggctgaaaaggccatccttgagttgtcacagcttacattgccgggacttgatgacttccctgatgatgagggcgaacccgcatgaatcacgaacaatttatccaaaagaacgtacaggccgagttaatcaagctcggcttttcttcatctattgcggggatggcaagtgaccgggcaaaggagcactatcgccgttcagcctcagccagccggaaaggtaagttgtttgatgattgtctgagtatcgctaaggcatgggcgagtaagtattcagcagagaaacccaaaggtaagagaacctagtgatgaaatatatatatgcaatcattctggatgcaattatcgcgtcctttttgtttattggcgttatacagaataccgagggttttgtgaatgtcggttatttcgcaggttggctctttggtgtgattaagtttttagggtatttgtttggtagggattcattggttaaagattacaaacacattcctacctcttttcggtgttacgacatactgactgatactgcatttgtcatcttcgttgtgtatcaaggctggtttgttttgggcgctatttacgcaataggggcaatagccaaagctcagttccagagtgaacaagaaaaacgattgaaagagcaagagtaaccattttatccacctgatcctgcaaagcatcctaaaacgggtgcttgatagagttttgtgtcagttttgggcgggtggtgtctcgctccgataggggtttatataaatagagccagttttttattctgaattcaactacagagaggtaaatatgcctgagcaccagataccaccgggattgcgtccgatcaggtcaatgcctgatatcgcccctaaagaagaagccaaggctaagatattgctggatatcgtcaaactcaagcgatactacggactcaataacgaagaattagagcaggtcatgaagatggcttgtgaattatcgaagtaaggaaaggaaatggcggctaaaaacaaagttggtcgcccctctgattatttaccggaggtggcggatgatatatgcgcattgcttgccgacggtgaaagtttaagaagcatttgcaagcgtccgggaatgccaaacaagtccacaatctttcgttggttgcgtgaacatcaagctttttgcgaccaatacgcgcacgcacgcgaggttcaggcggaaactttaattgaagaaacgttggagattgctgacgattgcatcgctgatccggcggaagtggcgaaagcaaaattacgggttgatacgcgcaagtggttcattacgaaggttgcgcccaagaagtatggcgaactagtgaagcaggaaattgatcacaagtcgagtgatggctcaatgactccgaataatatcgacctcagtcacctgagttttgagcaattgcaggcattgagaaaaaatcgtgaaaaatagctctatttaacataatggacatttcaggaatcgccgctttccaactcaatcaaaatgtcaccttaaacgggtaaaagtctcactcttctgtctaattttcgggcgtttgtttgttgctgatttgttatcaaaaacgtgaaaatcatttcaccgtgattttggtacgaaccgcgtatttttctcactttgggcgctgacatggatatcgataatgcaatgctggatgaggctatcgaaagagagattgcccggcgcagtctgcatgagttcatccagtacataaatcctgaatatattaccagtaatttttcacgtcaggtttgtgaagctttagatgaatttctgctggatatgatgaacggaaaacgcccgatactgatactgggtgcgccgccacagcatggtaaatcagatattgtttcacgttatctgcctgcctattttttcggtaaatatcccgataaacgtgttgctgggttgtcatatggtaaagatttagcctccgacatgaaccgtgatgtgcagcgcatcatgatgagtgaggagtatcgcaatctatttcctgcatcgtcattaaaccctaaacgggttgtaactattgagacaatggcgaagcgaaacagcgaaaccttcgaaattgtgggtaacaaaggttcctatatcgcggcaggtgttggtgggccattaacgggtaagaaggttgatttaggtatcattgacgacccgattaaaaacgcccaagaggcattaagcccaacaacaaaaaatgccatctggaactggtacgtttctacttttaaaacacgcctgtcgaaaaacagtggcgagatcatcatggcgacccgttgggctaccgacgatttatccggcaaggtcattgaaatcagctcaaaagctaaagtgttagcctttcctgccatcaatgaacaaggtgaagcactggttcctgaattacatccgatagaaaaattgctcgaaaccaaaatcattctgggtgactacttctggtcagcgatgtaccagcagtcgccgaagccctctggcgggacgattttcaaggaagattgggtgaaatattatctacctaaagatttacctgagaaattcgacagggttattcatagctgggatatgacctttaaagacagtgaaggcacagactatgttgttggtcaggtctggggtaagaaaggcgcaaatgcctatttgctacatcaggtgcgagaacgcatgagttttactgccaccctgaaagcagtgagagtgttagcggataaattccccgaaggtcgtcgtaagctggtggaagataaagccaatggccctgcggtcattgattcactcaaaagcacggtatcagggttgataccggttgagccggacggaagtaaagttgcccgtgcccatgccattaccgctgagtgggaagccgggaacatctttttgcctcataaagacatcgcgccgtggatcaccgaaacggtggatgaaattactaccttccccgtaggggcgcatgatgatgttgtggatgccatgactcaggctctgcgcgatttataccagaagaaacggggtttcagtatgaacccggacatcgttaatcaggccctgcgcccttcacgcactatgcgtcggtaaatatcactatggcaagaaaacaaaaacgtcaggcgataaagcctcggcggggattggcattgtctcaaaccctggcagaaaagctggagtcagggcagtacatcctcacttatgaagaagtcaaaagtatttatggtccggcaaaaacactaggcgcacccaaagcagtggcgctggcaatggacagcgctctcagtgcctcaggcgcgtacacgcttattcaacatgcctgggagcacggacagggttatgcaatgggaccgtcctttatgggctatgccgcattgtcatcactgacccagaacgggctaatccgggcgtgcattgaaaccgtcgttgatgatatgacgcgggaatggatagagatcaaagccgtggagattgacggtcagggtgacagcagcgaagacaagaaggacattgaagacgccttgattgatttcaaggtcaaagacgtctttcacaaggccgcagagtttaacggttactttggtggttgcctgatattcattgataccggtgcatctgacacccaattgttggtgccgctggatatctcagaaaagtcagcagagctgaaaaactttaaacgctttgtgctggtggagccgattaatatttttcccggcagatatgagagtaccgatccgctcaatccgcgctatttcagcccggatacatggtgggtattaggcaaagaagttcatgcctcacgactcatccgcatttgtggtaatgaagtgccgatattgctcaagccaagttataactttatgggcatgccacaggcgcagttgctgtatgactatgtgatccactttcaggacagccgaacctccgccgcgcggttactggagaaattctcgctcacggcgctaaaaaccaatatggaagacattctgaccaatcctaatgccactaaaggattggatgctcgattggcgtatctggcccaacatcgttccaatgatggtattttggcgattgatatggaaatggaagacattgtcaagctggaaacgccgctgtcaggtgtgaccgatattgttcgccagatgttggagctgattgtcgtgataaaccggactccggcggtgaaatcattaggtatctcgcccagtggctttaatgcgaccggggacagtgatatccgcaattacaatgatcatgtgaaaagccagcaagagaaaatcttccgtgccgggctgcaaaaggcactgaatatcctccaaatcgtcacattgggccgattgacacaatctgtcactttcgattttgtcgatttgaataaggatgatgccaaagccgccgcggaaactcagaaaatgaagaccgaccgcgatgtttcgctgattgataccggggtgatttcggaaaaagaagccagacagcggttatctgccgatccggacagcgactatttcggtatagatgcggatgaaatcccggagggtcattatggggaagaagaaaaccaaaacgggacgctctacgcgccccaacgcgggactggagcaggaatattaccgtcggatgcaagccttaattcaggaaatggcgaactcggttgattattggttatcggcagaatacaaacgccagcaaccggagattgtcggtgatgcctcacctgccaaagcgttaacagaaaaactctttgccatcaaagggcgatggaatacgaagtttgggcaaatggcgaagtcaatcgcggtctggtttgtcaaccgggccaatacctatgcgtcacattcagtcaaaaacaaactgaaagcagacagtatcaccgtcaatatgcgcgtcacacccgcagtacagaatgtgttagacagcctgtatgaacagcaggtcagtctgattacctccattcctgagcagtatctgacacaggtacaaacgctggtgcagcaaagtgtggttaacggtcgggatattggctttctgaaagccgagctgaaacagcgctatcgcctgacagaaaaccgggctaaaaccattgcccgagaccagaacgctaaagccaccaatgccattgcccgggagcgttgccgatcaacggggattactgaggggatttggatacaccgcgccgggggcagtaaatcgtatcgcgagtcacatatcagcatgaacgggcagcgatttatgttgagcgaggggtgttacgacccgcacgtgcagcgtcatatccagcccggtgagctgattaactgtaagtgtgatttccggcctgttattcctcaatttggaaatacttaatctatgcctacattgaaagaaaataactcggtcgtctttgacaaggggagccgacgacgcattgatgccaacggctacctccatgtttcacagacgcatctgaccaaagaacaggtcgtaccttatgtcgggcgggaaatccccggctgggagacgctggaattagacccggatcggctttatttcggttatcgtcccgccgatgagctggaaaaggccaaggccacgtttaatggcatcccgctactttatcgtcatgagcaggacagtgctgaacagccattaaaagaattgcgggtgggctctatcggcacaacgccagtatgggagccaccctatctggataacgcattaaccgtaaccgaccggagggcaattgatgccattcaggatggctcgttaaaggaactcagttgcggctatttttttgagcctgactttacatcaggtgagtttaacggtgttgcctatgacttcgtgatgcgtcatcttcgcggaaatcatgtggcactggttaaagaaggtcgggctggccccgatgtctttgtacatgacggcaagccgtctcaattacaggaacatgcaatgtcacaggaaaataccgcaccgaacagtgcagaaaataagggccctatcactcaggataacccgaatgaggctcagtctacggagaatcagaaaccgacagagtttgcgatagataatgatgccgtcaaagaaaagatgacagaactggggttggcaacggatgatgaagctgtcgtacagacctttatcagtgggatgcagtttgcgcatgaactggcagaaggtgaaccagtcaccgtgccggttggtgataatggtcaggaaaaacctaatccagtgaatgataatccccccggagaaaataccggcgagagcaagaaagagtcaccggcaatggaccgcaaacccaacattacgatggatgccaatacgattcgtcatcaggcggttgagcaggcgaaagcccatttccgggcgcttaatgaagccgggcagaaagtccgctcgctggtgggtgaggtcgatatcatggcgtttgacagtgccgaagcgatttatgcccatgcattgaaaaacaaaggctatgatcccaaaaaatacgacaagagcgcgtataagggcatggtcgatgtgctggcagcgcaaaagccatcgccatttactcaaaatccggtgatggatgccgctccaagtagtctggaagggcccttcgcaggcttgaaaaacatcaaaatttaagaggctattatggcattacaaaaacaggtcggcctgtactatgctccggcggtgcccggtgacagggccacgcaaaatccggtgatttatacgcagggtaacccaagggcagaaggggatatcaccatcgggcatttcgtctttgcgggtacagatccgttcaggcaggtaaaaaccgccacagcaggcaaagatgccccggtgggctttgtggaacgcctactggcgtactacaactataatctgatatcgccgggcacgatggagattcctgatcaaacggatgtaaccgttgcggtacgaggtgacttctggtgcgcacccagcaatcagaacgtgactatcgaccaggctgtctttgcatccaccactgacggcagcattcaaaccgccgatgcgaaagcgacccttgatgggtatgttaaaacgggctggatagtcaaatactacgacgccgacagcaacctcgccattatctcgaactggcagaccgcctgattcctgactgacattattcacgcatgacgcgacactctgaaataccgggtgggctttgtcatgcgtgtggagaacccaatgagtaatatttcttttgaacaagccaagcaatatggctttatttttaacggtgcccgtcagtggatcacgcccggcagcatatcgcgactggctcaggatgcggcactcattacctcgccaaactccactgttcccgctgaattactggcctatgttgacccgacgattatcgagatcctgactgcgatacgtaacgcccgtgaggtgttcagcgaagagaagcgtggcgactggacaacgccgtatatgaagtggcgcgctaatgaggtcacaggcaacacggcggcttactcggatttcgggcattccgggacatccggcacgaactacgagtggcatacccgtgaacagtatcgttttcagacggtgactcaatacggtgacttggaggcggacatggcttctgaggcgaaaatcaatctggctgccgataagcaacgcgccgccgcgacgattattgatattgatagcaataagttttatctgctgggcgtcaaagaccgcgagatttacggcgtgctgaatgacccgaatttaaacccggctattgccgctgccccggtaggtgaaaaaagctccaccaagtgggcagataaaaccacgcaacagcgttaccgggatatcctgaacctgtttgctcggctggtgagtcaaacaggcggtctggtgtcagagcgtgatgaactgatcctgactatctcaccatctgcccgcgtgttgctgggggatgcgacagactttaacgtttctgtgatgaaaatgctggaaacctacttcagcaatctcaaattggtgagtctgccgcagctgggcgggccaagtggtgagactatccagctcatcgccccgaaagttgcgggcatggagacgggtttattgggcttcggggaaaaaatgcgggcaggtcgtattgtgcctgatttgtcttctttctcgcagaaattcacggcaaccacttatggtgcagtgatccgaatccctgcggcgattgcgcaaatgacaggcatttaagcctgacacaatacaacaacatttaatggtctctttggaggccattttttatatcggagaaaagcagtatgtcaaaaggaaaaaccgtgagtgtccgcctgaatcatccgcatggtattgaatttcccatgccggacggttccagtgtggtgttgaaagggaacgccttttatctctttgggcaggaaaaaggaaagctccccgtaggtctattcggtgaaacgcgagtagatgcggacaagtgggattacatcctgacgcattatggcgagatggaaatcttcaaaaaccagctgtgtgtctgggatgagaaaacgaccagtgctaacgataaagccagcgagaaaaaagaactgcgccacgggcgcgagcctgtagatactagcaaaacagccacggagccggtgaaggagagtacctgatggccatcgtcacctttgacagtggcgccttccttgaactgtatccccgctttgccggtgtcctgacgaaaggacagctacagcaggcgtttgatgtggcctgcttactgctcgataactcggataattcggctattccctatgagcctgacggcacacaggaacgcaagaccttactgtatctgctgacctgtcatattgctacggtcacgctctgggggaataacggtcaggcaggcccagccgccagtgcgacagaaggttcggtcagcgtttcgtttgccgtgccggatgccgctaatgcatcgtggtttaagcttacgccgtgcggacaaatgtactggcaggcgacccgtaagtatgtggttggcgggcaatactcagccgtaaaacattatcatccttgggggtgaatcatggtgatgaaaggtggggataaaatcagggctgcattagcactccttgcgggtacgcaatccattgaggttcgtgcgggagtattggcaggcgccactaacgaaaagaccggtgaacctatcgccccttatgcagcggctaacgaatacggcacccgtaatattccaccacgtccttttatgcgcggtaccattgccaatcagtccgatgaatggggtcgggtgcttggtgctcaactccgaggacgcatacaggaatcaggcgggattgaagccgcatttgaaacggtaggtaagataatggccgatgatatcaaagacagtatcgaacagtcattaccacctcctaatgccccggcaacggtcgccagaaaaacgaaaaaagggatcgcctcgcccgataagacgctagtggatactggcagtatgcaacgagcaattgattacgaagttattaaaggcggggaataaatcacggtagccgatttgtttcattgttatcattgcgtgacctaacgaaaggaaacgacaatgaaatttaaatttgcattagtgacgttactcataatgagtgttagccatgtttttgcagtccctgttttagagaacaaagtattgcgctctaaaatccttgaagaacggaaaaaactgagtacttgtttggttgagcatgtcaaacaagaagctataggtactcagaaagaggcaaccaaaattgcttcggaagcggttgagctttgctctgagtactttcagtcggtagaggatgtcaatgtcgaggcattcaaagccacatattcagagcctgattatgaagatattgtcgaatggctagaggcaatgaaggaaggtaatatctttaaaaacaaaaatattatgctaggggaaatggccgcgacagtcattatggtgcgcaaaaaacacgccagagataacccataatcagtgtgacattttagtatctaatgccgcctcgtgcggcttttttgtatttcaaaggtgagaaatgattaatgtcagaactatcgccaataacctcattaccaccgttaacccgaatatcagtgcgattctgttcgcaaacgagggctacaccgtcactgattccggcaggcagatccccaaatataccgagcatgacatcactgtgcagctccaaagcctcagtacgcaggatttagagcatttgggcgtgattaaccagcagggtcagtacatttatgcttatgccaaagggcaaatctccgctatccggcgttcaaagcagaaaggttcagaccggatgaaattcgccgcttacggggaagatgaagtctcggagtggaatgtcaccaaggtgatagagtcttacccctcatgggtcaaggtgctgctatggcgacaataacagtcacgcatgaggatatttttaccgaggtgcgaaagtaccttattgcgttattttcatgtgatgtgatgcagggctatcagaatgacgtgccagtgcctgaaagcggtattgtgatgcacgttctgtttgagcgcgatattgactataccgctaattactaccatcacgaagcctcaaccatcacagcgcagcgttctgtcgagctgtccatgcagttagatttttacggcgaggaggctgactcacgggcaagggtagtcgctaacctctggcagtccagttataccacggctcagctcgaaaaatgccagcctctctacagtgaggcaccgcgaaaaatggtgctggtcaacgaggcgaaccagtatgaaaaccgcgtgatgcttgaagtgaaattgcaatacaaccctgaaatcacctattcagtggataacactgactcattctctctcgatctcaactctatttaaggaatctccatgaacactattccggcaagtgacattgtcagtgtcctgcccggtgtcgttggcacgggcggaaatcctctggcactgaacgcgctgtttattaccaaacaaacgcctagtgcgatgctgggtgtgaaagcctttggcgatgctgagcaggtcgctgatattttcggcacaaaatccaaagagcacgaagcggcgcaggtgtattttgcgggctttgtcggctctacagcgcgacctgaaacactgtatatcgcttctatgatgaccagcgatcaacccgctaagctggtgggcagcaaaatgcccgtccgtgattttaaccacgttccgcaagggttggcgctggagattgacgggaaacgtcaggtagtcactatcacgcctgacaacatcaagtcttattctgcactagcagaaacggtatcggcatcactcgccaaagcaggagtgtgtaagtatgactctggcagtcgtaccttctccattgagggcgcaaagaaaggcagcgacggtacgattggattcggcaccggggatttagccgactacatgggactgagcgaagacacgggcgcacagaaaaacgacggtattaatgccgataccattgaagaactgctgccccgtattaccaaagagaccagcaattttgtttctgtgatggcacttggcaatttcagtacggatgaaagaatcgcgattgctaaatgggtgacattacaaggtgatcgttatctccatgtactgtactccgacagcagtgagaaagtcgtactggaagttatctctaacaccattatcgaatcggatataggcggcacgtacctgatgtttggtgatcacacgcacggtgcttttgtctgtggttatccggcctgcctgagttttgatgagctgaacggacggactaactttgctttccgccgtcaggaggggctgaaaccgtcggtgaatgataaagcactggctgatgaattactgcgcctgaaattcaatttctacggggcttacggtacggcaaatgaccgctttatctttgcctatccggggtcaatatccggcaaatttaagtggctggacagctatgtcaatcaggtctacctgaacagtcagttacagcttgcgctcatgaccatgctggcgaacttcaaaagcattccctacaacgataacggcgccgctattcaccgcgccgccatcaaagacccgattgaccagatgctgaactttggtgctatccagcgtgggattgccctgtcagagcagcagaaaaagcagattaacaatgaggcgggctttgatgccgcgacccaaatcaaaaccgagggctggtgcttgcgcattggtgaagcgactgcgcagacacgcggacttcgccgctctttgccgttgaagctctggtatgccgacggtggcagtgtccagcaggtcacgcttccctctatcaatgttcagtaaggagtaaaccatcatgccaatgggacataaccccctcacaatcacctccgccaatgcggtgctgatgttgcggtgcaagggtatttatgacgattacgtcacgattcagggctttcaggcggataacgcatgggaattcggtgaagtgactatcggggaaacccggttaggggtcgatggtaagcagtctatcggctacattccccatgaaacgccgtggacactgtatctggaggcaaacagcccctcgacacaggtactggaaaatatccgcaaggatttcaacagtaatatggaatcacgctatatcgatatcatcattgagatgccttccatcaaaaaacgctacacaggaacgggaggcttaatcagcctgaccggaggtgcgagtggaaaaaaactactggacggcactagctacaaattcaacatggtcaccaacggcgcagaggaaatcgcataatgtcactgttaaactccaaaactatcactattgaatcaggccgtgatgcagggaagacctttgtgattacggaaatgccgatagtgaaagccgatgattgggccatgcgtgccctgtttaccattgctaatggcggtgtggatatcggtgatatccggcctgaaatgggcatgatggcaatggcgcatgtggcaatcaaggcactggcgaacatccgggcggaagacggtattccgctgctgaatgaactgctggactgcgtacaaatcgtcccatccggcggcaatgcccgtgccattgaatttaatgccgatatccgggatgtgaaaacgctgtttttgttacgcaaggaagcactggctatccatatcgattttttcacacaaggcggtggctcagacttgagcagctaaaggccgggctaccgctgaaagccggggtactggcggagaccgtgaatgtgtccagtgtagtctttcaggtggtgaccgcaggctatgccaattatcacgagcttgccacgatctacggccttgaggctgccatgaatctgatagaaatcggtcaggctagtgaatataacaagcgtctcaaggaagagatggaaggcaaacacccttaaattcaggcaaaaacgctatacttaacacaggttatcttgttgtgaggtgtccgatgttcaagaaaatcgctgcggctttactgttattcccctgtacgttactggctgatagcggggtgtataaaggggaggacggtaagctagctatccgggatggtaattatttctgtgatatgtaccccgcttatatctttaaggatgcgcaaaatctcaagggctttccgtccggttactttccgaaagccatgatgaatgtcagcacggatgaggacgggaaatacattggtgttgacctgcacccgggtatggcttttgatacaaggccatcaggctcatggggctatgtgaacgccagtctgggaaccggctcacgaagtccgtcagaggtgacttattatgtcgccagagatgacagcaatttcgcgtatgtgattggcacggaaaaagcaggtgtgatagctgcgctgagtagtagtgatgcatttagcccagtgaatgcagtactgggcaagtgtaaccggatgggggaataaaaagcccgttatgggcttaaagtacactttttgccagctcagagagcacgtgtgacactgtgcctgtgttagcgaataaggtatcaacacatttacccacgacagattcagcgcctttttctttcactaatcgcaaaagggttttcttttctgactcaggcaaattggcagacataataatagtttcaatctgctcaagggtgtttttgtggattttgatggtaacggcatttaattcaccgccgatagtatccacattggcataatcaaatccttttgcggtcaatgccataaaatcagtgcggaaggtatagtaaccatcatggctaaaacccacggcatcagggttaattaacccaatattcatcaaatagcgagtgtcgtcagccatttgatcccagcctaacatatcacccaaaagattcagtttctcatcactgataggttgtaatggcctgtcagggttatttagtgcgcgaataatcataagatgtctctctttcagcattgccattgattttctctttttgttcgctggggtgattgaatcataatcgattttgttgctggggagtagcaaaaccactgccgtctgaggtggttaaatatgcagacacattaaaccaataacgggagaagaataatgagatttgaagatttatcgcttgattcacaacaggcagcaagggaagtattggcagatatgctgaagaccaagtatcagcagttatttgatttaccggacagcgaagcgcggtatttaggccacagagtgagagaggcatttgtggccttggaaagtgaagagcctagtattgtgagtgattcagactgctcaattccagattaaatactttttaatccaatccatgatctgcgtttaacttcggttaccagtactgatgggtttgtctttactgatttagctacatcgtatgccaaatctcgaacgctaccacaatttctggtgtcagagctgtaatcgtactccgctgatggaagctcataatttcctcgttcacctaaaatcgtcttcctaaaaccctttgtattcattttgttatgaagggtttcgtaatctgagcttgttgcgttgtgaagctctatacgaacagtaaaatccgccatttttcttattcctcattttgtttatggatcaatcaacctatcactttcccttaattacggtaagtgaggaaccacctcgcctgatgtggtgaaaagcaggcaattaatctcagttaagacggtagtgagcaggtggaattactgatatattttggtgaatgacaatggacgcatgagagaatatgcacggaggaaatgatgcaaacaatagcttcactttttgatgcttatattgtcctatttagtttattttggtgcgctactattcctatagggctaggtcttatagttccggcatgtatatttaaaacaaaatttagcagagtattcttttcaatattggctatcttctttttatttccatcaatgtttgtgcttttatcgatagtgctatctaaataatttattgcattaccaaaaaccagcctcgcttaatgcggggttttttttacgccttctttaatgtgggcttagtcaaatcaaattaaccatataggtgataatgtgaacacttttaactgcaatgaaggaagatttatgacgatcacctataacgatatccgtgagaaaacggcaaagattaaagaagaacgcgaagcaagaatcaatctgatttactctgaagcttttgcgctgattgaggcatataaacactcactagggctgaaaaaagatgatgtctggttcaatttaaatggagagccacagccgtatgttatgacaggtcttcttggtgacgaacaattccaaaaattaccgttaacaagcatagagctgacacctgaataccaccttaaatttattattgggacagtgactgatgacacgcccagaggtggttgtgcttcattagtagaaatagagctttttgttgacggtcatcagatgactgccaaagtgggagctgaaagcaagaaattcccaatctttgatggtgacagagccaatatctgcgatgccattaaagatgaagtaatgatgatgattaatgatgctaatttaagaagataaatatccttaatctcataccgggctaccacagggggccttttttctatcagccgcttaactgcggttttttattacccaatgtttctaatgaaaggtatagtttatgagcaacttaataatgaataaggattatacgtttatgtctgaaattgattttgaagcattgggtcgctgtcatcacttgaaaggaaaaatacttgaaacccttcgtaagagggatgatgcttttcgtgacatgaaaaataaataccacactgacccgaacccgttcgataggttacatgaggtcaacatggagttttttcatgaaaaatttaaggagttagatgaagcaaacgccgagcttgtcattttagtaaatgagtacaaccagtgggcggggaaagctggagaatatacaatgaaatggattaaaagtagtcgctaactctaacccatcatatagtcaggtcgcttaagcggcctttttttacgcccaaaggagagctaaatggctaccctcgtcgatacattgcttgtttcactcaagctggatatgaacagctttgccagtgatgctaataaggcaaccagagcgcttgatgatctggataaaaaggctggtggtgcgtccactgcggtagtgaaactctctgacggggtgaacgaagccgcaggcagtaccacagactttgaacagtctaaccaaaaactggctaaatccacggataacgtggggaagtcagctaaaaatacatccaatgttgtcttgaatttttccgataatatcaaaggaacgacagagaaaacgcaggactgggacaaggcgataaacggcgcagtcaaagccttagccgggctgtttaccactatctttgtttcgacaggacttacgaaactgattggtgaaatatcaagtgccaatgacaagatttacttcctgagtaagaacctcggcatgagcgcggagaccatcaagaaatggcagaatgcagcagaacagacaggtggtagtgctgatggcatggcggcgacaatgtcaggtttaaataagtcactgtgggatttggtgactgtaggtgatgctcaggttctgacttattttaatgcattggaagtggctgtaatggattcacaaggtcaactccgcagtctggatgacattctgttagatatggctgacagcatgtccaagatgccacgcccacaagcttataacatcggtaaacacatggggttggatgatggaacaatcaatctattgcttgaaggcaaagaagctgttcagaaacgtctggatgcacagaagaaccttgttatctccactaaagaagaactggagcttaatcgtaagctacaagaccaaaacgctgtcctcagccagcaatgggaaggactgaaaacgctggtggcgaattacctgataccgcgcttactgaaattatctcagatggtgactggatttttggagtatctgaacagaaacagggaagcggctatctcagtctttaaaggtgtggcaatggttatcggggtagccttgatccctatggctattgccgcaggttctgctttgcttgccatgttcgcaccgttgtttacgggaataggcctgattgcgcttttcgccacggcaatgtggggcgtttatgacgattatcagacatggaaaaaaggcggcgattccttttgggattggtcaaaggcgcatgaaactctgatatgggttatggagaagctggaagagttggagatgtggttcaaagggacaacgattggcaagtggttcactgacactaacggtgagcttgatttactcaaaatggcttttgcaggatttgccacttacattgctgtgagctgggtaggtaagattttaaaagcattcgctaaagtgggcagaggcattaaagggataggcaaacaagccgccaaggttggtaataaggccggaaaattaggcgcagtagggagagttggagctgttggtttggctgcgggggctgcatatgcgagtgttgattatgttgatgctgtgcttaattcagtgtttggtgaatatgactggtttcagcgattcaggactgctccaaactggaaatatgcgggaatggctgcgataggacaaggtgatgccagatgggttaatggtgaatgggtagataatcgtggtaagggaacaggccaccacatcaccccaaccaccctcgatatcccaaccggcgatcctgacctcgacagacgcaaacgcaaagttcagcgcggtgaaatgactcttgatgagcttaacggtgtcgccccgaatgccaataagctaaaaggtcaggctgctctcaatgccatgagaggatattttatggagcttgagaagagggaggggctgccagcagggtggttatatggagttgctatggctgaatcatcagggaatcgatttgctattggacctcagacaaaatatggaaaggccaaaggtccatttcagtttatcccgccaaccgccgccgaatatggattaaaaggcgatgatgtttttgattggtataaatcatcagatgcagcagccaaaatgtacggtaatttatccagaaaatttaaaggtaacgaagataagatgttggccggatataattggggggaaggtaaaatggagagaaatggcatggaaaatatgccaaaacaaacacgtaattatatccgtgaagtcaaaaaatatagggaaaaagaactacaggaccggaaggcgcaaggtattgtgcagtcactttctgatttccaagcaaggatgaatcaaccgattattccaaacatggatatgagcgcccctcatgagttcctcgcgcaaaccgaaagaatacgtagtatgcctatggctggtgcaactaataatgtcaaagtagatcttaatggagacattaatgtgaccactacagccaatacggtaacgggaactgtaacggatgcaggcgaggcggctagattaagtctttctcagattatgacatcgatgggctaagcgggaatccccgcttagatcaagactgtttgatagattcggcagatacaaaggtggggtaaagaccgctaccgcaaccgcgggatgttaattttatcttggcatcctgctttatcagatagcggatatagttataagcatattgagggatatctttgtagattggggatatatcataggtttcatagttaccatcactatcttttactttaaaagtttctacagttctttcatctggtgtaacagacacaacagtgacaattgctgtaacgggggcagagcaattaaaccagtagccgtcaacatcacttgaattattcttgggtacatcataaataccatatattttcccagcgcgaatatccatatagtaatcattacctgcataagtcatcgactcatattttttattctctgctgccagagaaggtaatgctattacagtggcaattataaggagtgcggcttttattaatctcattacattgcacctcaaagtagttgatcttatgtgtacagcataacactaatttgtttagcctgtgtttatgcgccattgtaacatcccctcttatggtttttttgcacggagtaagacatgaaccaactagatatctacttaaataaagatgatggtaaagttcatcatcagaaagaccaacgctttaagctggtctacatcaacgaaatagtaaaaggctctttcctgataactgaattttgcaacggtgaagttaaacactacatgcaaaagtccggggaagaaccagtgttaactaatacgtttccgtacagtgaagatgattcactatatccatctatggctgcgcatatttatagtgcagccattggcaatcagccttgactgactgcggaagaaattacattaagtatttcactaggatttgtgagcgccgtgtctatgacttttgtcatgatgtgacgaagtccatcaacaggtagttttttcagttccgtttttaaggcgttcttttctgagtcgctggtatttaatctgtcaatataagagcttaatgcttcaagagtatcatcgtgaaatttgactatattgacattcagtattgcgccaagcccgccatccgcgcgcaagaaatcaatgcctttgtttgtaatgctaatccaactcggagctagtacaattggcatattgaacctgtgatcatcggctgaatttgaccttgggcactctgaaatatcaagcaagtcacttcttgctaaatacattatattgtcgtaaaaatccttgtatgcgttatatggctggcatagcgattcccactcttcctcagtgactctaccgtgcttgcactcataaaacgctaataatatattttgttgccactctgggttaaatctgtcgtaaggcattcaattatccttttcgtatagtttagccagcttatcaaggggtaagatattgtaagttctaaatctggagcttattcatgcgacattttctttaatgtttctagcagcgcagccttgaatttatccgcttcaagttgagctagctcatcaatctttttaggttgtgaatcatcatctagagcagattgtagaatcattaccatttctgaattaagagaacgcccgtttttcttagctcgtttggtcagagcttcctttaactcgtcaggcattcttatgctgtatggacttatacctctaacttttttcatttttcttagtgagcttttctagttgagattctactttagctaacctttggattatatccggtagctcatttgctggaactacatgatccatgttcacccagtgttcaatagcggcaaccatctcagcatttgctgagcgcccatgagtgtcagccaacttattcactttttcttttagttcgacaggtaatcgaaggttaacctgtggatttttgtatggcctgctagacacggatacctcattgaatacagaaaaacaaaaaatttatctaaatataaatacgtacctattgactatcaatgcgtacctacatagtatgtatgcgtaccacatacaaaagcatacacatgaaaggagaaaataaacatgggaaaggctaaaccatcaacagttagattccctatagaaatgagggagttacttgaaaaactagcaaaaggtaatgataggacatttagtaaagaagttattagcaggataagaaaaacactgactgaggaaggtttacgttgctaaaggtgaagctctgactgagccaacaatcagagcttcgttatcaaaaatctattgggaaatttgacaatgactattatatcaacagaggtaattgcaagcaataattcaatcgaaagcatggtagccatcatgcacggcaacactccggtaattactactgaattactagctcatctgtacggaacagataccgataacatcaaaaagaactactcgcgtaatgcagagcgttttatcgaaggcaagcactactttaagttaacaggtaacgatttacgttcatttaaacacaaggtgacagatagtccctttgtgaaaattgcaggaaatgtcaggcacttaatgctatggactgagcgcggatcagcaagacatgcaaaaataatcgaaacagataaagcgtgggatatctttgaaaaacttgaagatcactatttcaaccagaacgagcccaaaccccgtaaacaacccaagcaaatagccgggcgcataacaccagaccagcaagaggctatcaagcaactggttctcaatcgtggcaaggcgttaccaaaagagagccaagccaaagcaatgataactatgtggtcagccctgaaaactcattttggatgtacttacaaagaaatagagagtgagcagtttgcagaagcactttctttagctgcacgagtaccattagagggcgagttattactcaaagaagaattaccagtcccaaaagcagaacagcaaatatctgacagtgacctgcaaacactctgttggctgtggcagcattctgtcgatatggctaattacatgatgaatatagagccgttacttcaattagccgaacataaattagcaggggcgtatgctacccatccacaaatcgctatcaaatgtgccaatagtgcaaggcaaatactggagaaagccagtgagcatatccaaattaaagctattcagatggataactggatggtgctacataacctgagaaagccaaactatccattttaattgtgagccacggatggcctcatgagtttctcgcacaaaccgaaagaatacgcagtatgcctatgggtggcacgactaatattaaagtagatatgaatggcaatgttaatgtttactcaaactcagacacagtcaaaggcactgtatcagacggcggggaagcaatcaggacaagcctgtctcagctagtatcgtcaatgagttaatggttggtggtaggccacggagggctaattttatcagtgccatacaaaaattggacttatctgccatctcacaaatcagacaattttcgatcaaaatattagcaaaaatggtaatatatttatcgctatgttctattgaaatcaattaactatagggaattctgtatgagtgccgatcaacgctttagtctggtggtttttcaaaaagaaaatgagctaattgatttcaaaatacaccgggatactcaagagatatgggctacaactaaagaaatagctactctttatgaagtagatgaaactactattataaaacatataaaaaatatctatgaggatggtgaattagatgagtcttcaactactgaaaaatttgcagtagttcgaaatgagggaaacagaaccgttaacagagcaatatatcattataatttagatatcattatttccgtcggttatagagtaagcgccaaaagagcaataaatttccgccagtgggcaactcaaacactaagaacgtatcttgagcaaggatatatattcttaacgaaaaagttctcagtgaatcccccgaaaaagttaacgcgctagcagcaaaagttcgtgaaataaggtcaggggaaaagcaagtttacgcaaaagtacgagaatgttttaagattagtgcttctgattataatccctcatctcaagaagtcaggactttttatgcgcttctgcaagacaagtttcatcatgcagttaccgggatgacaagctcaaaactgattcttgatagagcaaatcatcgtgaggataacatggggctttattcaatagctggtactttccctaccaaaaaagagattgaaacagggaaaaactatcttcggcctgatgagctttatcgattgcatttactatctgagcaattcctgctatacgcagaggctactgcgttacaagggaaaaagatgaccatgtcttcacttcatactcaattagacaggttattaactctaaacgattatgatgttttcccaggctatcaagattatctaaaagatactgcgttagatcacgcaaggcaagaacttgaaaggtataagaaaaagaaagtaattgaagatgcaggctatatatatgatgaagagcttgttgaattaggagaataccattttcttttcgaaaaataacacaagtatgtatacacagcccgcctagcctgggtttttactttccatcgcctatcagcgtaaccactacagcaaatacggtaacaggaacggtaaccgatgcaggcgaagctgcaagattgagtctttctcaaattatgacatcaatgagttgaagcaaactgagacaaggatgtcttttgtctttcaacataaagactataattaaaccaaattaatttgatttgaggtctaaaatgataaggaaaattgctactgctctattacttaccgccataacatttccatcgttagcagagcccagctttaccgtaaatgaagtaaccaaaacggctagcattaacaatcttgataaggttgttgagggatgtgagtccggcaaggggttctttacgattgatggttttcagtattctgagagcggcaataccattgatctcattaaatttaaggcattgaataatgaaatcttcgccatacctacggggtttaatgaattaagcaacgcagacaaacaaagtgtgcaaaaattacttaagaaaggacagccatcctttgttgagtatgtggtttgtggtagcggcggatttatgagcctaatgaatctcagtgttcctgcgggtaaatagcccctacggggcttttttgttggtactgaggcaagaagatattattttttagtttttataggctcttcatatctcggtggtatgtgtttggttatgttatccagggcttcctgagcaattttaacctgtgtactaattttcataaatctgtctgtgtctgtgtcttttgttattccatgcaacagactaatttgcatttttaatttctcaatatcttcatcttttttcttagactcgctttctgattttaacgccttagctatccgcgtataaatatcgtcagatgaagtggctgcaaaaagcttttcaatctgcaatgacatatcaatgtgataaataacctcttgctgaaggcttctcttcgatttctctgccttttgttccaacgcttcccttaattcaggcggcatgcgtaaagggtatggcgctatacgtgacattactttgactcctttagactcattaccggcagtgtaggtagtaaatatatgtttgacaaggtgagtcattatgatccattatgtaagcgaagtaagttgattttaagggtaaataaggagtcattgtgagtcataagaaaagaatacccccgtatcccttgaggatgccggatgaggttagggaatggtatgaggaagaatccaacaataatggccgctctctaaatgcagagatcgtgaagatattaaaggacaggatgaatagagttagaggacagcggaagaatgcagcgtaggaatagcgaagccttagctgctcgaacaactaaggctcctgagtgctatttaccgtgagataaacaacttagccattgtaacgaatgacaaattaattttctagggcacttgcaggcgctctaaaaacagaaaaccagtagttaacggctactggttttaatcaaactaactctacggagagctttaatgactaataataatgtagcagcttctagcgcagttgtcaccaagatgtcaagtcgtgaaatagcggagctggcaaggaagcgtcataccgatgttatccgggacatctgggtaatgttggagcagttatataaactaaataaagatgacgcaaatttgcgtaactataaaaatcaacgagttactctaattgaaggtgtaattgcagttattgatagccgaggttatgtctttgagttcttactcgaccgccgacacactgaaattctgattactggctatgatgttgttcgccgcgctgcagtcattgatcgcttaattacactggaacaggaacgccgcaacacgcctccgcgattaccgaatgtaaaagagcttgcgctaatggttattcaagcggaagaagataaagaacgcttgctactggaaaataaaggtcttgaagatcaggtcgccgaaatgacacccgatgttaaagcctttgagcgcatagcaaaatccaacggcagtatgtgtgttacagacgcagcgaaacatcttcaaatcaaacccaaagccctttttgacaagctgcattcaatgaagtggatctaccgtcgagctggcaataaaaactggattgggtatcaggacaaactacagcagggtgtcattgagcacaaagtaaggtcatttaccgacgatgaaggtcaagaacaaacccgcgaacaggttcttgtgacggcaaaaggcattgccaagctagcgaagatgttaaatctggaagaagtcgcttaaggatttaagccacggaaggcgaagagcgaacaatcaagctatcaatgttattaagggtatgcaaccgattccctatcttaaatcgattgattagtctaattttcgagccgcttcccaaatttagcatgtaaatatttacaaaaggttacagttacgtaataaatgatgtcgctttaaatggcgaagccccgaactactggtcatagtatcggggcctctaatacaacgtttaccccgtgaagaggaagtaaacatggtaagtataacagttaatgaattaactaaaaactccccatcagtagagcacatgatccccatcatgcacaacaatgttccggtcattactactgagttgttagctgatgtttatgaaactgatattgttcgtatacgtcaaaatcacgctagaaataaaggtaggttttgcgaaggtaaacatttttttactgttaaaggtaacgaattacaagagattaagaacagagtatctttaagctactctgttgataacagactgactaactgtcagttagttggaaagaatgctcgtagcttaactttatggacagaacgcggtgcagctcgtcacgctaaaatgctggatactgacaaagcatgggatgtcttcgggaaactggaagatttctactttaacctaaaaggggttgagtctaaaaccacaacctatgatcgcactcccttacgtggactggttaataccctaatgggtaaatatggcatcagtgatagaacgttattccagatggttcatcgtgagtttggggtaaaccatattgacgagctaagtcatgaacagcttccttctgcgatagcatatttggcaactaaagtgattgagggtgagtttctaggtaaagaggctttgcctatatcccagcaaattgatttatcatttgagctaagtaacgttaatgctctatataaaaatataatgaattttaaagaggtgtgggaaacgttcaatccgcattttactattctgacacctgatatagcagacgcgtttaacggggcattcaataatttgtgcgggcctatctccattctcaggaataggcttgaacgaagatttgcttgctgagtaaacactaagccccgtgaggggctttttaccattgaacttttgtctatctcttcacactttctgaaatcgctgatcaaataatcagtaacacctagtattgactcggtggctggtggtaggccacggagggctaattcgatttttgctacatgtataacatttaatacaaagtgatggcaaagtgaaggtatctttcgaaaaagtgcttttaacttgcttccatctccttcaatcgtgcttatataagtcgttaattgccgtttgtcggtagttgtaagattaagtaatgtatcatatagtgatacttagtgacactctatgactgtttgtgactcactgtgatcaactatttgataaggtaaaacgtcatgaatctatcactactaagaagttgtttagcaggagttttatttggaggcgcgttaacagttccttcatttgctgctgagccagtggattcaggggacgaacgcagtatgtttaatgtaggtaagactatctgtagtctggatgagttaaaaactcaatatcaagaaagaagagaaactattgatttattagctaatgaaatcagtgattattatctaaatcttctgagccttgatgaaagccaagtccgtggagctatgattcaaaacgacttggaaatgaataaagcctgtgaaaccacaataaaagggtttgagcaggggcttaaagccatgttaaagcaaaaccgacctgatgaagaaaaacaagaaatacggctctatcttaaatccgtggcaaaagccaggtttgagatagtgcggttaaatgacttttctcgtcagttgtttactttgcctactatttataaaagtgacataaataaagctgcgctatcagaactggctgcttatacaactaaaaagattgagtctgaaaattattcatttaccgggtgataaatggagcaagtggacgtatcaataaacaaatacacaaggaaagatttttttgatgacgtcttccttaagcatccagatcttgagcaagctatattgcaagactttaagcattataaagagactggagaagttcccgattattttggtcgtgatgtcgcttatactcaaccagaagctgcatataaatcatgtctgatgcatattcatctttgttttccgcctgacgcattccccaagaacagagttcagtattatagaacttgtaaatcaggtgacactaaaaacgatgcttgcttggtttacgttcaagggcttttggaagaatacaaatattccttattagcaataatgcaccctgatgcccacggtagagctaggaatcctaagataatgggttatctagcaagaatagctcaagatttcagagacaataactaacccgccctgtgcgggtttttcatttctaaggccgcctagtgcggtttttttacatctaaaaacggggtgaactatgtttggaaagccagatatccctaactggaagggtatccccaacgctgcaatggatgccggaattagcctgggtggtgcagcgttaatcaatacactgttcggcaactactgggggatattcaatcagtatggcatccctctgttgctggcggatagtgtgatctcgctgcaataccaaaaccagtatcgggtggtgagtgccccgatagagaacggctcatttgcttcttataacaaggtcggtgagccttacaaagtgacggttcagttaagcaagagttcaggcggtacattagaacgtggcgttttcctgtctcagcttgagatactggcgaaaagcacattgaagtttcatgtggtcacaccggaatttgtctacatcaatgctgcgattgtcggctatgaccttgcacgggaagccaaagacggtactacgctgattaaggtgaatgtccatctggaagaagtcagggaagtgaaaatcaaatatgacaaagaggaagtgaagaacccggacgatgctaagaaaaaggatacaggcgatcagacacagaaagtggaatctagctcttctcccggttctttgacaaagatggctaaggagctgggtgagctaaataaagatggcaacatgtcaaaggtaaaagtgacagtcgaaggcgctaaaattatatggagagggatgcagggtataggaagtgatttatcgaacatgcaagctcaggcagaaaatatggtgaatcaaatagataaaaggagcttctagtgatagcggaaatacctttagacaaaatccccaatcaaacgctttctttctcctttgagggggataactacgatttaactttagaaacccggcttgaaaatttattcgctacggtcaagaaaaatggggaatatctggtttgtaatcgtatttgtcgcaatatgacttacatctgtgagtggtttgtttttgcggacatagaaggcaataccgatccagaatattcacagttaaactctcgatacaggttggtgtggataaatggtttttaatcgaaaagtcatcaaaattaccctcacgctttcaggcaaagacgaatctttcacctccggtcaaaacaaactcgccgccaccgggctacgcattaacgccgaaattaactacggcaacggggcaatcacgccttacgcgcgggtgaaagcttatggtctgcctattgaaatcatggagaagctactgcgcaaaaagtggggcaattttgaggcgcttcgcaatatgatgaccattgaggccggagaggaaggtgaggcgttatcacaggtcttcagaggcggtatcacgtttgcctatcctgattttggtgatgtacccaatgcatcactggtgattgagtcgcaaacggcggtgttggataaaatgcagggggtgaatgctgaaagttacgaaggtgaacacgatgttgccgctattatcgcgaccatttgccagcgcatgggctacacctttgagtctaacggggtgagcgtgaaagtctcagatccgtacctgcataacacggacatcgataaaatccgccaactggctcatgctgccaatctggatgtgtatatcgaagacaaaaacgtggccatcacctacaaagacagcccccgacgcaccttaaaaataccggtcatctcaccggaaacaggcttaatcagttaccccataccaaccaatctcggcgtgcagttcaagtgtttctatgatccgctcgtccggttcggcggtatcgtgcgtattactgacagcctgataaagatatgtaacggggactggctggtttttggtatcaggacaacattagaaaccgaacaggattccgcacaatgggcgatggaagtctcagccagccgacgaggaggaaattatgccgccatcaagaagtgaacgggtattactttatgatccacaaaccaccgccggcggggcgctcagtcaggaagccattatctggtcactgattggcagaatgggcacggtgaccatttgccgggtagagaaaatccacgggggcggagttggcccggtagggcatgtcgatatcctgcctctggtacaacaggtcgatggcgcaggcaatatctaccagaatgctaccgtctacaatgtgccgtattttcgctatcagggcggcgagaacgccgtcattcttgacccgaaggtgggggatttgggcttttgttttaccgccagccgggatatctcaaaggtgaagagaaccaagaattcagcgcccccgggcagtaaacgcaaatacgatatggcggacagtctctatctcggtggtttactgaatggcacgccgagccagtttatccactttctgggcagtggaatagatatcgtgtccaccggcatcgtgaacgtcaaagccactaaaattgtactggatgcgccggttgagacgaccagcaccattcaggccaagagcaatattaccgacaacacaatcatcaatagccaatcaatggctggtatgcgtgaaatctataaccgccatactcacctagaacacgggcaaggctctaataccagcccacctaaccagaaggcgtaatcatgcggacattatttttaatgcctgccacatgggatttaactctcgatgcggcgggcaacattgctgtggcttcagaccagtacgccagagcgcaatcggtggctaatgcctgccgggtatttgtcaaagacttgtattactcgcaaggggacggtattccgtatctggaggaaatcttaggcaagaaccgctattcactggcgatgtaccgcaagtatttagaggatgcagcaatgtctgtcgagggagtgatatcagctacggcggaactcagcaccgccaatgacagggtagtgagaggacgaatactgtttactgatattaacggaaccaagggagccatcgaactatgatcccaaaactgcaaatgaccccacaggggatattagcgccccctacacaggaagtcattgacggctggtggcaggtacttaaagggtgctttggtgacaatctcaataccgacatgaacaccccgcaaggccagctagtgactaccttgactgcgattatcaccgacgaacgtaacttctttatccatctcctgaacagctttgatcctcgttacgctgacggcctgatgcaggatgcgctggggtatatttatttcctgcaacgtaagcaggctaccaagtctgttgctgagatcacggttaatgggctggtcaatgcggttattccggttggttttcaggttgctgataacgccgggaggacatggagtacgcagacggaagccacaatcggtgatgatggactggtcactgtgcatgtttactgtgatgttattggacgaattgaagcggctgccgagtccattaatcgcattgtgaaggctattgccggggtagactcagttatcaataaacaggccgccattgtgggcaaagaggccgaatcccgacaggaatttgagctaagacgacagcagtctgtggcggtcaatgccaaaaatactaatgccgcgacacagggtgcggtaggtaatcttaagggcgtgatcgactgttacgttattgataatccctctaacgaaacaaaaaccgtagggttcaccaattatccgttaattcgcaactccatcgcagtgtctgtcgtggggggcgatgataatgagattgcccggcatattctgagtaaagccgggtctggctgctcttttatgggtaataatacggtcaagtacgaagataccgaaagctttccttacatgccgcctgtttacgatattaagttcatcagaccgcatcatatcccggtggagtttattatcacctttgaagataagttgaagctaacccatcaggacaaagaagcgacccgtcaggcggtcatgaatgaattcaccacaggtcggggaaaaggtcgcattgccaagaaactgattgccagtgattacatttatgttgtggctcaagctgcgactgagcggttaatcgcggttcaggtagccagaaaaggcgaggcggtagcaaattatctggagtttggcattgatgaattcccggtgttatcggtggatgacataaggatagcgtcatgattgagataaaagacaccttcctgagccagtacgctaacagccccactatctgcactatcctcaataatttcaatgatactgtcgaccccagagccagtacggatgagttttatcatctggcagtcaatgtactcacagcgaaagggttcgggctggatatctgggggcggattgtcggcattggcagggatttatccataccggatccgaatgccgattatttcggctttaaggagacagagaaatataccccgtttgaccagtcacccttttacagtggcgggtcttcagatatgtcctacaagatggatgattccacttatcgggacgtgattttaatgaaggcttactcgaatatcctgtatgccaccgccccgaatattaaccggttcctgaaaagttgcatttttacaggccgggcctattacctgatcaccggacacatgaccgcaagatatgtttttgaataccggttatcggaattagaaaagaacctgatttaccaccaccacatcttaccgcatccgtcaggggttcagatttctatcgcagaactgcccgcgggtgaatttttcggcttctacggaacgggcttccagcctttcggtcaggccgcttttgcacaataaggtgaacaatgaaaaaccctaatttaatccccaagcccttcgcgcagaacgggcaaaaagacgcgatccctacgaatcacaaatcagacctgcccagtcaaaaggccacatgggataccggcttcccgcaaatcaccatgatgcccgtcaccgcaggtggattgccaccgagtgggcgggattttaacggtatcctgaaccagatttcagagaatatcgtgtatttatcccaaggcgggaagtttaaatattcgcaggaatatgcagattcgaccgggggctaccccaaaggggcaatattgcagtctgatgacgaaacccgtgagtttcagagtctggtggataacaacaaaattaactttaacaaagaatcgtctgagaaagtgaatgcggcatggaaacaggtaagtaccactcagcttctggatgagctgaataaaaagctcaatcgctctgatgtcgtacaatcagtcggtaactgtaaagcgcaggtgatgagccagaacgctaccactgatgctctgaacaccaaacaagacaaaggcgattacgccactaatactgccttgaatcaggtcaacgacaacgccaatagccgccttgagaaagcgaagaatggggcggatattccggataaagcggcgtttgtgaacaatctcggggcttaccctaaaacaggggggaccattgagggtaaagtttttacaaccagtgatgtggacgtggccggctggataggtggggctaagttgtatgaacgtcatgataccgggggatgggcacaagtctatagtgaggcgcacaaacccaaacctgaagaaataggcgtgtactcaacgaaagaggttgatgaccgctttgcttataaaatctcacaagatacgttcacctgtggcaacctgcatgtgaatgcaacgcatgactgggccggtgtcgttttaaaaaagcccagcggttacagcaccacgctagcggctaacccggacaacagcgaaagtatgctgaccgtccgttatcgggataacaaaaataacacactgaactatattgatttccccaaaaaaacaggcacggtggccctgacatcacaattgcttggtgttgatcaaatctggacggatgtcatgtcagtccgcagtaatgatacgtggtatgtcaatgatacagggaaaccgatcaccgtctatgttgagagccaaaagaccgataaaagaacggggccgttcagtatgggaggagaagtcgataattatcgggtgggttatttttgggtatcaactaacagcatccattcctttagttttattgttcccccgggaagtcgttatatcgtgaaagcggggtggggggtgactttgacacccgatgcgattgttcgttgggttgaattgaggtgaacatgaaatactacaaatcaaaagataatcaggttcatgcgtttacgtcagacggctctcaggatgcgtggattgagccggattttatcttgattaccgaaaaagaagcccgggctattacgaatccaccgcctacgcctgagcagttacagcaacaagctgtatatgaaaaacaatacctgatggatgtggccaaagataaaattgctgtctggcaggatgccgttgatcttgatatggcgacgaaagaagagaaagccgccctgctcaaatggaaaaaataccgtgtcctgctcaaccgggtggattgttcgactgcccccgatatcgtctggcctgaacagccggagtgaggctgtcgtctggatgtccgtgtccagatgccggcgaattcggtgtggaatgtgaagcagaaggtggtgagtggtgaagtaggtgggtgaataagcaaaaagccaccgtgtttaaggtggctttattgtgagtggatgaaattatagggttaaaaaatcaatctaaaataggttgctttattaatatctttgtgaatttattcattttgaatcacatctttagtgaatagatttgagctaggtactatgctgctttttgggtgctattataaatagctaaatctatcttttggcctaactcttcagctcgggtaagtaatttatctatttcatccaagtatcttttaatttctattatgttcataaattatctccgatttaatgtttatatttggcactatatttaattgatactacttcgcggtgaaattatataaattcttggcatataaaaggttttttatccaaaattcttacaattttttgtagttcatctgtgtcatcattttcaatagcgtcggccatttggtgcattaaatcaatgtattcatctaaaacagttgcatcatagtcaagtccaagagcggttgctactgggagcattctcttttgcacttcacttaagatattagctctttctttaaatgtaggactttctagttttagtaggtttgtatttaaagctaacactttactttgctctaatgctttaatgacgatatgcaagactctactgtaatggtcttcaaatttaactatataaaaggtacgttcttgttgtattgtggtcacaaattatactccatttatagtgcctgatagtaggattggcaaggtgttctttgtgcgttatgtttaattaagctttatattgcgcattgctattattgaatattatttttttaattaattgatttttaattgctttgttgtggtatggctttgtaagataccggcaaatcaacccaacaataatatgtatctaaatcacgtatgtatatcactggaacgattggatctaccgccatgattttatagcaagaatgctatcagttatctgcttcatttatgcatagaacgacatacactatattgcttttattgatagttaatagggaattatctgatttgtgagatagtgggaacaattaattcagatagagcgcaatcgcaatgaaaaatattatccaaagctaaactgtttccattggttatatttgatataaataattaacccgcagactcacgtaaacttttacgcgaccttataaccttgatatctgctaacctattgatttattttatttctgtcaccatgcaggaaataagcaaaatcaatcaattatctaaataggataattctccccttttaacccattgattcttccgtggtcctcgctttggcttaatccttccgtttcaaacggagagattaatcaatgtgcagaagggcatatttctgccctttatgagtcactctgccttctgatgcatgaacttattgaatttttcgtgtagtgattgaggatatagttctgtgtatacctgccagagtacattcagagagcgatgcccggtaacctgtgcgacttcttcaatagagaagcccgcctcaaataaacgacttgcaccctctctgcgtaggtcgtgatagcgaagatcttcaatgcctaatgcatttctgacacgttgaaaacccgctgttacgcttttgggattatagggaaatatcagttcgcttgttcttggttgacgctgagcaatattccatgcttcaccgagtaatgggactgacatatgattaccaactttctttcgggggtcctttctatccctgacgagcacagccttctgttttttatcgatatcatcccatctgattttacacacctctccaatacgcatacaagaaagtattgagaaatttaagatatcttcataagggatctttccttctcgatgatcacttcttctacgtaaaccctcaattagtttatcgagttcatcttgtagcggccttctgttgcgcctttgtgatttcccaatcaagcccatctgaattaatgtagggcgagcatcacttgccgggttagatatataattaataccgtagactggtttagctgattttaaaacagaagccagataactaatgtcgtgattaattgttgttggagatgcgccagattcccggcgataacgacaatgattaataatatgattcacggataaatcagatagagagatgcttgctaaatcacaatcaagaagcatattcagcacgtatttcttagtcctcccggccttaccacctaaatctggatcattgatatatttatatagcagggtgccaacagtcaggccttcggtatcattctgtgtagggattccgttttgctctaattcagccacccgcatagcaccccatgttttggcatgagcttgctttccgaatgtacggttctctctataaatatatttaccgctggctttaacacccacagtgcaacgataacggatagtgccgtctgcgcgggggcgtttttctatgctatagtaggccatctttgatgttctcctattcaggtccccatatttatggggttccctatggggtgctaatagtccaaaaatagcccaaaacaatctgaaatgcacgaaaataaacaaactaaaaacaccagtgaattcactgaaataccaagtgaaagcggaaaattcaaaccttcccgcttctccgttgcgccgatgctggattggacggatcgtcattgtcgatacttccatcgcctgctaagtaaagaagctttgctttacactgaaatggtcactacaggtgcgattattcacggtaaaggaaattatctggcttataacgagcaagagcatccattagcactacaattgggcggtagtgagcctcaggcgctggcgcagtgtgctaagatcgcgcaggaacgtagttacgatgaaatcaacctgaatgttggttgtccgtctgatcgtgtacaaaatggtcgttttggtgcctgtctgatgggggacgctacattggttgcggattgcgtcaaagcaatgcaggatgtggtggatatcccagtaacagtaaaaactcgtatcggtattgatgaacaggatagttacgagttcctgtgcgattttattggtactgttgtgcaaaatagtgcctgtgataattttgttatccatgcgcgcaaggcgtggttatctggtttgagtcctaaagaaaaccgcgaaattccaccgctggattatccacgagtctatcaactgaaaaaggattttccacaactgacgctttccattaatggtggaattaagactttggaagaagcgaaacaacatttgaaacatgtggatggtgtgatgatcggacgtgaagcctatcagaatccatcgattctggcacatgtggatcgtgaattattcgaccaaaacgctcaagtaacgaatacggtagatgcggttaaagctctttatccttatatcgagcaggaattgtcaaacggtacttatttaagccacattacccgccatattctgggcatttttcagggtattcccggcgcacgccaatggcgtcgtcatctgagcgaaaatgcacataaacccggttcggatattatggtcgttgaaaaagcactggaaatggttacagagcggatgtgatccgctcaggtgttttagaaattacgggattaataagctggaaccgtgagttgcgcggctttcaagtatctgatgtgccctgacagcctcgctcagtgtaaattgttggttttctggcacatcgaccttgattttgccactggcaatgaagtcaaatagtgttttgctcgcttctgctaactcttcccgcgtagtgatataaccgttaatagaagggcgagtaaggaatagcgaacctttctggttgagaagcccgacatttacaccggttactgcacccgaagcgtttccgaaactgaccatcaacccccttggtgccagcgaatcaagtgaatccagccatgtagcctgaccaacggaatcataaacgacatcaactttttgcccgttggtaagttccaaaacgcgttccacaatattttcacgattataattgatggtctgccacgcgcctgcgttttgagcaaggcgagctttttcatctgaaccaacggtgccaatcaattttgcacctaatgcttttgcccactggcaggcaatcaaccccaccccacctgctgctgcatgaaacagaaaagtttcaccttcaagaatcttatatgtctgatagaaaaggtaataaactgtcagccctttcaaaagggaagcggctgcctgctcaaatgaaatagtatcaggaagaatagttaacttgttggcagggacattatgtacttcactatatgcacccagaccggattgagcatacgccacacgatccccgattttgatgtatgacacattcgagccaacttttgtgacaatcccggcagcttcagtgcctaacccactgggaaggcttgctgttgggtaaagcccactgcggacataagtatcaatataattgattcctatagctttattttcgacttggacttcatcaggcgcagggtcaacaggggtaaattcactatatttgagtacttctgggccgccggtggcggaaaatatgatgtgttttgccatggttgctctcttatcattctggaaatattgggaacagcctcgcacgtttgcaaagaaatcgctgcaaacagcgtaaatgtatctgaaatcattgcagactatatatatttactttgtgttttgaagtttgtccatgattattatttttatataaagatcaaataattaattaatcattaaactgtatgttgttacagtgtttattgacgttttgcctctcttgcagcacactgcgtataaacaattgtataaatatttttagcgatcatggctgccgaactaaacaagctcagtgacaaaaaacttagaactctgcacggaaaagaaaggggcaatattgaattttttgccgatggtgcggggttgagcgctaaagcatctaaagctggtggcgttagttgggtttttacgtaccgacttgatggaaaaaagttaaaccgccttaccattgggcgctatcctgatgtaagtcttaagcaggctagagaaacgagggataaatgtcgtagttggttagcatctgggaaagatccaaagctgcaatttaacttagtgatgcaggaatcattaaaaccagtcactgtgaaagacgctattgaatattggatagagcactacggcagagaaaatcgagtcaatattgataccctcattctgcaattagaaaaacatatttatccttatattggtgaaatggcattgtctgactgcgaaacaatatattggctacaatgctttgatagaatgaaaaagaaagctccggtggctgctggttctgtatttcaattgtgcaagcaaactctaaaattttgccgggtaagaaggtatgcagttagccatgtattggatgatttaactattcaggatgttggaaaaaaacaaaataaaggccagcgatatttagacgatcatgaacttggtcaattatgggactctataaatacaggtatttacctaccttattataataatttattgaaaattttggttgtatttggttgtcggacacgggagatcaggttatctaaatgttcagaatggaatttgaattctatgctatggactgtcccaaaagaaaatagcaagacaggtgagaaaatcattcgtccaataccagaatatatgaagccatttttaatggatattattcaccaaaaccataaaagtggttatctcttaggggaaattaaaaaacttgaagcagtcgcacaatatggcagaaaaatatggaaaaaattagagcatgacgaggaatggtctttgcatgatttaaggcgaacgtttgcaactaaattaaatgatataggcatcgcacctcatgtcgttgagcaactgttaggccatgcactgccgggcattatggcgatatataacaagagccaatatttaccagagaagctggacgctttaaacaagtggtgtgagcgactggatgtattagcgggtaattatgagaatgtggttatattaaaagcagctcaataatgggaattaatgagttgtgataatgaccattgtgatatacacgtaacaaatgtggatttctttcgtaataatttctgttaagtaaaataccctcacaaaaacaattaaacagtgagggtaacataatcatgcaatacagtactcctacaccagaagaacgccactccatcctttccgaatatggtgaaccttatgatcgtcttatacgtgaaaaggaacgccagcacatcacctctatttctagaacgtcagcatggaaattagaaaatgaaggccgtttccctgcccgtaagccattaggccgcaattcatgtgcttggttgcttagtgatctgctgcattgggtacgtaatccacccacagtagaaaacgtgaataacccatatagccgcaaacctactaactaaaaaataatgctatgaaaaattaaatgccttaattggcagcagtcaaattcaccctaaaagcggcttaatttcgggaatagttggtgtgatggtagatattagttacagagattctttgatattaaataaccatcaatttgagaaacaaccctctttaagagggttaattgattatgcttactcagatgatgttttggctttgcgctggcggcgtttgatctcagcgcgcattgccgcagaaacaaattgccctgtactttcgttgtgttcttttgtttgtgccattccttcaatcaattcgtgtagtactcgtactgttattgattgtgatttcgcattttttgcacctgttgccatttctgcacctcttattaattggtgtaagacagtatacgcaaaaagaccaaaatttaaagagttgacatgtaagacaccttgtatctatcatgtgtcttacaccaagccttgtgtatggtatgaaaataacaacgccccgaagtgcgggaacactgtcgaggcgtctgaccacaacattatcggagctaatgctatggctgatacacagtctaaccaaactcgccttaaatttacattccttattgcatccgacactcagcggctggctgacatatcctctttgatctttgcattacgtcagggggcacaccatgagtaagaaaccaatctcattaaaacaggcgctgcatcgtgcaagtttgggtatttcacttttcacgttcattacccaaaaagccaaagatgaacactgtgaaatcaatttaaataacctgattgcattggcacacggcattcatcaggaggtttatcgcgacctgtcgaaacatgctccacagaatccagtgaataaattagttaattgccttgtacgcagggagagagatccattagggcaatcctcgtttcgtgcgggtttatgtacttctttatatgaggtcattcttgaacaggcaagccaacactgttcggaagagttacacgatttgctgtcgctagcctgtgatattaatcaggaagtttactattcgctctatgcagcggttaatggtgaggacgcgtgatcatgagtcagggaaataataatcagaaaagccgcccgttagatgtgattcgaacagttaaaacatcagccatcaagcactggcaaagcctgttgcctgcttgtggtgttgatgttccggcaaaaggtaaacatggtgcttgcccgatatgcggcggtactgaccgctttcactttatagatgataaccatcatggtgactggcattgtcgccagtgtgatgcgccgaatcacggtgatggactggatttagtcgcaagaaccaaagggatcacggtctttgccgccgctaagttggtagctgatgcgctagcacttcccttgcctgaacccaaacccgctaaagagcagccccgaacagtaaaaccgattacagaacgcatcgctgcgctggttgcaacttctgttatgggtgaatctcagtatctgactaaaaaggggctgcaatgccccaatcagcggttactgaaagatggctctttattgctggtgattcagactctggacggcaaaatcacgggcgcgcagaccatcaagccgaacggtgaaaaacgccttgtatcaggaactcagaagaaaggtggttttattcccgtctcagagattaccggaacgccggacactttcatcattaccgagggttacgctacggcgttaacggtcagacagttacataaaggcgtagtactggcagccattgatgaaagtaatttacccactattgccgagctggtcagaactcaatggcctaacgcaaaaattatccttgctgctgataacgattggcacgaaccggaaggacgggacaaaaacggcaggttaaaaaagaacgccggtaagatagcggcagaaaaggccgctatagcgattaacggctgggtcacactaccgcctacggcactgaaatctgactgggacgattatcgccagcatcacggcattgaggcagcaaagcaggcattcagcaatgggttatatcaggttggagagaaaaaactcatggaagtagaagaggtgattatccacgaaacaaagtccaaaaaggccaagaacaatttggctcaaatggcagccagtcagcggggggcactgttggttgagcggtacggcaaagtggcggttaatcctgatagcgaaatggtttaccactataacggtacaacatgggaaaccgtgtcggataatgagctgcgccgcgcaatggtggcaatcttcgaccagcacgaaaccccttacagcccgaacgggatcaataacgcgattagtgcgatgaaattacaaattcctgttattggtgaaccacggcaggatttaatcgggttcagtaatggtgtgtatgatttatcagaacaacaatttatcccacatcagctagaacactggctaatgaaccataacggcatcgaattcactccgcctgctattggtgaaaatttgccgaatcatgctccagatttttatcgctggctgtctcatgcagcggggagcaatgaaaacaagatgaaccgcattaaagccgctttgttcatgattctggctaatcgttatgactggcagttatttattgaagtcacaggtgaaggtggcagcggtaaaagtgtgtttacttacattgcggctttattagcaggtgaacacaataccgccagtggcaatatgaaggcgctggatgaagccagaggacgttatcagtttgtcgggaaaagcctgattacgctgcccgatcaggttaaatatgtcggtgaaggcgcgggcattaaggcgattactggcggtgatttaatcgaagttgacgggaaatatgagaagcaattttctacggtcattaaggccgtggtattagccaccaataacgaaccgatgagctttaccgaacgtaatggcggtattgcacgacggcgggtgatattcccgtttaacattccggtcaaagagtcagagaaagatccacacttgccggagaaaatcagccgggaactgcctgtgattatccgccatttattaaacgaatttgccgaccagaacaaagctaaaaagctgctacaggcacaacgcgattctaacgaggcgttaacggtgaaaagcaattccgatccgttgtatcgcttttgtggttatctggtaaccgtcaatgatgcaactgggatgaagatgggcactaagaacattagcccacgagcgccgaggttgtatctgtatcatgcttatctttcctttatggaagcgcacggctttgaacgcccgctgacattgactaaatttggcgaatctattcctaagattatgcaggagtaccggaaagattatcgaaagacgagaacaacgagagggtattcttataatgttgagttgtcggaagaagcggaagaatggcttccatcgttacctgagcataaagatctcaacattataccattatagatttttaggtttaactatacattctgtacattaaatggcgtatttttttgattttaaatataaaaataggatgtatagttattcttcctctatacactaagtatacatgttatacataatctaaaaatgttttagttaacagatgaatagttaatgaataccatattaatggccacaaccccagatatgacaggctttttaaaaatcttgcatagtgtgtacagtgaatggctccaaaaagatttctaggggagtcaccggatataactcagttattttttattagtattatggtgaatggtgacatttggaattattcaatatgaaatagtatggagagcttaaatgaccaagcgtaaagattataatcccacttggcacggttatttgggggattatttaaatggaaaagtgggaattaaccagttaatacctcagcatgaattttttgatagtataggattggaaaaggaattaaataagaatactcaatatcactacgttcttacattagctcaagcccaaagcattattgaagatatcaatcctagtcgtccacaaaatccaagtcacggtgaatcactggcaagaggtattgaagaggacgaccagacaaaaggtcctatgtcacatgtattttctgtcacagatcctatttctccttatgccggaaatatctatgattcacgaggattttatgatgtttgccgagagtttcagaggttaaatatcacggctagaacacatgtggcagaaaatggccgcacgtatattcatgtgtcggggcatgcaggtcttaggagacttgtcaggggaacacgatacggtgccaatcatcctcaaatgatagggatggggatagggcagcagggtcttaataacagcattgtaagaggggttagattctgcatcatcttttctattggatatcgagtcgtagaaagtatttttaaggatgagtatactttagctgattttctcggaaacataacaattgatatggctaaaacagccattactgcggctgcatcttgggctgttggtacagttttaactgcaacagccattgtaggtgggagtattattgctgctgctggaatagttttggtaacgggtttttttggttgcttatggtttggacgttcttgataaacaatatggaataagtgaaaaattaatagcatttttaaaagaacaaagggacagaaaaccaagagcgccagaagcggatttacgacatttttttaacggattaggaaggatgaggtgaagagtaaatatgttaaagcattaggtgtgctaattctgttgttaggactgacatttatgatgagcttagttgttgattctgctatttcattaatactaatgagagatgaaataacattttctagcgccgttatcatatgttttatgtcttttcctctattgttttattctttatcaggttctatttttttctttctatttgataggctgcctaaatttaacaaggttattgtcaagtacttaagtatgctgatggttacatcattcatcgttagtttgcctatatctttttatgtgagctataagttaaaaaatgatggttatttaacatgtgataaaatatcgtggatgtcgccaactacttacgtcaaaaatttatcgctgtgtaaatgaaattttttgtaaatattctgtccttatgttttgtcctgtttagcctctaaagtttagaggctttttaattattttagatagtattaaatagtgtctttgaggaaaataaataaccataagacacaatgaaaaaactactcgaattacgccagcaaaaaaacgatttaacccagcaaatgcgttcgttacttactcaagccgaaaacgaaaaacgctcactcaatgctgatgaagccaaacagttcgacgagctgcgcagccagtccgataacctgaatacggaaattgcccgttatgaggctttatctgatgaagaacgcagccaagccaaaaaccagccgatcaataacaaactcaataatgacgaattgcgccactatatcctgaccggagaaactcgctccttatctacgggagttccggcagacggtggctataccgttatccctgagctgaacaaacaaatcatgcagcagttggctgatgagtcggttatgcgccgaatctgtaccatcaaaaccacacgcagtaatgagtataagcaacttgtttcggtcggtggtgcagcggttgctcatggggaagaaggcaaggcgcgcagtgagacagctacaccgaaaatggaagaagtcagcatcaagctgtttccgatttatgcctatcccaaaaccacgcaggaaattatcgattttagcgatgtcgatattctgggctggttaacctcagaaatcgctgacacctttgttgataccgaagaaaccgatctggtgagtggtgacggcagcaagaaagctacaggctttttgtcttatccccgcgatactcaagccgataaggttcgcgaattcggtacgttgcaaaaattggaagcaaccagtcttgaagccgatagcctgattgacctgaaatttcttctcaggaacaaataccgtaaaaatgctgtttgggtgatgaattccacaactgccgccaacgtgcagaagctgaaaaatagcaacggagattatatctggcgggagcgtttacaggcaggcgatcccgatatgttgctgggcttgcctgtccactatctcgaatttatgccggataacattattggtctgggtgacttcaagcgcggttacttcatcgttgaccatcaaacgggtattcgtacccgtcccgacaatatcaccgaaccgggattttataaggtacacactgataaatatctgggcggtgggctggtggattccaacgcaatcaaggtgctggaaatcaaaggcactaaagcgggttaatgaataaggggcacagccccctttcagttttggagtctattgatgaagaatgattttgaaattcgcaccgcctcactttctgccagtgataaaaagctgacaggctatgtgattaagtggaacagccgatcacaagtcttatgggatgagtttgtcgaacaattcgcccctaatgcctttagcgccagtctagcggcaagtgctgatatcagggcactgtatgaacatgatcatatgaacctgttaggccgtaccacatccggtacgttgcagcttgccgaagatgccaccggattacgctttgagttaaccccgcctgatacgcaattaggacgcgatgtactggcactggttgaacgtggtgatatttccggtatgtcctttggctttcgtgccgttaaagatcagtgggataccaatcaaacaccgtatatcagaaccgtcttagaggctgaattacgggaaattactgtcaccagtttacccgcctatcctgaaagtggtgttgagattgccaaacgctcattaaacgcagtcaaaccttgcttgcgtcattactggctgcaattatctgaggtgtgatcatgtggccctttaagcgaaaagcttctgaaactcgtagtatgaccattgatgaattgttttctctggtaggcatggttaataccaaatctggcgagcatgtttcaccctcgacagccgaaggtttacctgcggtgatgaatgccgtcaccgtgattagtgaagccattgccactatgccctgttatctctatcgggttcaacaccagcacggcaaagagtcccgcgaatggttgagcgatcatccggttgattacctgctcaatgaatgcccgaacgattgccagaccccgtttcagtttaagcgaaccctgatgcgtcattgcctgttaaatggcaatgcgtatgcagtcatcctatggggcaaagatggtcagccgcaatccttgcactcttacccaccgtcagcggttgtcccgcaacggttatccgatcacaggttcgcctataccatcaccgaaccctatagcggcaaaatcagaacctacccttgcccggacgagagttcactgagtccgctgacattcatggacagcccaatgtattcggagaaccgctcgttcatagaagactgataatccgccagttcgatgtttttcccctgcgccaccccactggcagccactttatcgctgacgcgggtcaggaataaattcccatccggcgtgtcgtaatacagcagcgctgaccagcgggtaatgcggtcaatgatctcctgtgaggattcgccccagttcagggtaaactgcggtagcggctccatgtctgccacatctgaaatcacatcaatgccgtaccattgcgccagcttctgggcaatctgtaacgccgttgcccgactaatgacgttctgcggccatttggcggaacagtccactaaatcctgacatttactgcgaccggtcacccgtatctgatgggtactcttgttaatggaagaattccagatatcgatataacccgttatcaccgggtcattacccagcagcacctgacagggctgcccggcctcgacctgttgtttttcatcactgccggggtaatagtccatcagcatcagttcaaaatcagacggtaaccgttcaatgccccgcgtcacacgcacgctgtcccagccataaatggccttgccgccaattaccagcgacagttcatcctgttttttcattgtctgagtgccttaaatcgggtaggcataaaagccgggtgacggggatcggtggcctgtatcagctcatcactgcgcccggcatcctgataaatccggttcgccactgtcagtgccggtaggacagtaggcagactaaactgcgctaaccgtcctgactctgcacctttcagctctgcactgatcataaattcatggtgcaaggccatcagagactgataaacctcatccacacccaaatcacccgccatcaccagtgccgtatccagtgcctgacagacccgcgtttgtaaatcatgggcttcctgattgctggacggggtaaagtcactggcgacctgcgccatcgcccccgctgacaggacaaccaacaacaatacggtcatttccgtaatgtgacggtcaaccgtgccctgttgatagcgcgtgttctgaaacgcagctaatgcctcgaaaatcgccactttctcatccacactgccggaagagtcaataatcgcgatcaccacctgaccggcggcctcgctgaaggtttccacggtgtgggcggcgttcaatttatccagtctgtcggtaatcgttttgcggctcatcaccaccgcagccgtggtttttctcacaatttccgcttcattgtgctgccggtcatcccgtgaccgaagtccggtagctccggaaacggtaccgccgatttttccgcgctgataacgcccgtaacgctcactgccgaacgtggttttcagcatatcgctgaggttggtcacctcattcattgaacgggtcaccataccgacccattggttcgcggtctgtttaataatccgtatgccctgcgtcaccgaacggatctcacctctgaccatggcgatatattttgccagtgtggtggtataggtttgtaaccaatgcttttttacttcggtggcggatttggtgctgttggtgactgcaaagactttcagtcccgattcaatcacggtgagcgtgaactcaaatacccggccaaactccttgctctcattcatgcgcaggccactttcggtcacactgaccgtcagctcccccagtgtcggatggactaaagtgcccgtcgaaccggtttcacaggcggccaccagatttttacgctgggtgatcacatccggcgcgtgataaaccgcactgtcctgaatgataaacccgcgcaacgtgatcctccgggtggcccggcctaaatcctccagccacgccgtatcgcggtacgggtattcatgcacagcctgacggcgaccgaagacactttccccggaaaccaccgcaaacggcaccccccggaacgaagccggatgcagatgttcagcccactgccatgacgcatcactgccaccccccagcagggaagaaacggcatctttaataaaagccatgcgagacctctttttttagggcgaaaaaaaaccgcactcggcggccttagaaatgaaaacccgccgaagcgggttagttatggtttcttcatgtatagatttagcaagaacataatgacaggcattgctattgaaaatagtaatagagtcaaaaaccatatcttaagaacaccgatttttgcatccacttgctcagaacttgattttttctctatggatgaagacatatcactcatcctctgtaatatcaaggcaacatcattattgtttgccttgctctctacagttgaagaaaggctatccattttttgtagcactaaagcaacatcggcagtgtttgctttactttctacagacgaagagatgttatccattttttgcaaaatcaaagcgacgtcagttttaactataccaacatcactggtaattgttttcagatcagacttcatatcactcatggtagccttgatatgttcaacatctgactcaagttttgccactctcgcttccatatcaccacctccaccgccgttaccattctttaatggtgaatgattatcaggatgatgtccatcatttgcaggaacattggacgctagctttttcccactagaaaaagaaataatgttagagttttcaggattcattctgctctcctttgagaataactctaaagtgagcttccgtttcgtgcagaatcttatttatctcatcagcactagctatagcaattttaatagtatgaacaccaatactcatcattctgactaaaagatcagcacggagaaatcccggaacgtcagcagggtctgcctcatcatcatttgctgtaacaggaacctctactggcgactcttttaagatagttgtaccatttttatcaatgatatctaatgaaatcagatacttttttaactgctcaagcccaacaaaagcagctgcaaccgttacttttgtatcaacgggtaatttttcacattgaaaattaagaataggcccttcattaccatccacgtctttagccgctggaaaaatgaaagctatcttttctctacgttccattttctctcctgcatcaaatagtctatcgaaagatactacattactcgttctgatgcttgaacggaaattgtccaaattgtgaaaagggaaacggcttattttttgtgctgactatgaaggcgtcatgaaatgcagatcaaagcccgtagggtctatttcctctactctggctttttatgggattccgggtatgcaattggttaaaagaattccagtaccttcttcaccaatgttgagggctatcgctattgatgatgaattcactctaatcgaagcagagttactgaggttagtgtaaaaagtttctgacggaaaagtctctattcttaaacgactaatagaaatttcaggtgattcctcgccatttttgaacaatgagaatgctattgctttaactttggtactcccagcgatacccaccaaagcaccgtcccatccttcaatttctttgccttcctttaaattacgtgcttcgcattcataaccaccatcaataatataatgatgaccatcagcatcaattccaataccagtaccgatgttagcagcagcccccattgagatcaggagagcgactacacaaacaatcgattttaacatttagcacctcattaaatgtcaatttggtttaattatagctgcttatataaataaatcccttaccgctaacttaagagtatttcatcgacgttgtgactttcccggcagaatttgactgaattttttgtcgttctccggttttatcattgaacaaattaatatcgacggtgatagttttatcaccaatagcctctcgaaccgcctgtgcaattcttttacccatttcttcatcgcgctcaacctgcttattctgtccgtagagtgaggggagtggctgctgttgttgctcttgctgtggtggctttttcttattggtatttttttcagcaattgcggcgccagccttcatgtatttcttaactttgggaacataattgcgtgtttccggtggcatgttccttatgctgcctcttctctccagtcttccaatacctccgttataagccgccaacatcccgtctgtactaccggttttctgacgtaacaagctgagatatttagcagctgcttcagctgatttgtacggatcaagggcatcacttctgcttaatccctgctctttggcagtatcgggcataaactggaacattcccatagctcgctcccccgtatatgtcattggcccaatcttactgggatctcctgacgattcagtcatagccacaccgtgcagcaaaccggattcgtgaccgtatttcttctccagcatggcaaaataatcagacatggattccagtaatgccgcgcctttaagctttgacggattaggataatcaggtgcttctactttttgtgctactggtatctgcttggcaacctctttagcttcatgggcttttttctgcttttcccatgactcactgtatttatcatccagtttcttttgcaggccttcatctggcttattaacggtcagagacaatctttctttaaacgttaactgctgcttaaattcgtcatccctgagcgcacgttgccgaatatcattctctttatttccgtggtaaaagttgtcggcggtgtctttctctcgcttcttatattcctcaacagattgcatctgtggactggctttggttgttttgcttttatccaaaaaccatgtcgcactccctatttttactcggttccaaatgccgtcaacccttgcgcccagctcattggcttccgtattaaaatccgtgagtttttgattttcttccgtcgtgcgactctgaccattttttaccgacttatccaatcgctcctgtatcttattttcacgaattaacgtcagaacatccggtgttaattccggtgttaatcctaatttattggataatctgaactgcgtttcggagggcatattgggaaatttttccgctatcgccaataaggttgggatcgtatccgctgaaccatctttagtggtatgtattgggatattaagattatttaattctgccagtacagagggattttcaccgcgctgggctgaattcaaaacgttaaataagttttgaacagactgttgggcatcatcagcatccgccccgatttgcaccaatgcaccggtgagcttagaggtatcttcaatggacatcgcagtatttttagagagggtgtcaagattgttagcctccctgcccatctccctgagcgtcttatacgcactaccgtaggcgattgcattgattacgaccgcatccgtgatgatattctcaaagacagccagcattttgatattaagctggtgggctttgatacatggaacgccacacacttacgcacccaattacaaggcgcggggctggatgttgaacccttcccgcaaacctatatgcgctttagccccgtggcgaaatctgctgaggtgttcgttaaccgcaaggtgattcgtcataacggcgatccggtgcttgtttgggcgatagccaatgtggtgatggaaaccgacgctaacgccaatatcaaaccgaacaaaaagaaatcagcgaacaaaatcgaccctgcgattgcgttcctgatgagctttggtacatggcaagtagagcatgaagagttttctttcatcctcaatgatgaacagaaacagagactagataactttgatggaatttagataactgattgatttttaatgcctgtgtcggatagaaattaatgaaatcaaataatcagaaggttagagattacaccgttatttggattaatcgctactctatcggacagtcaactatgagcgagaagtggacatcaatactcgttctagggctgcatagagcatagcgtatgcagacctagaggccatttgttaggctcttcacatctcatcgattagatctttaatctgatctatctcatcgatgctagcttgaattgttaactttccttgaatgtcatctaaaagagcttttgctttagcattaggcttactttggaatagctctatattcgctctttcattatctttaaacattcttgccaacgccatgagttgattgctattaagtgcatcaataaacggcttgagggttatatgggctgtggagctaccccaatagttaccacaccatactgctaggatttcctgatacacatcttcaaaagcgattgaaggtatatgaggaccaaactgagctaatgctttagctgctttttcttcgtcagaccagccgtaagatgtatcttttgctttagctaattgttttacagcatgtctgtagaggctagctctcgcagcatctgggatatattttatacctttaactttcaccaaagtctcaagaactctgatttttgcccctttgtcatggctggtgtctgaactggggtctactaaatatgaatgatatctctggccagctgatttcattaggtcttcattagctctttcccataccactggaaatagtgtgctggcattttcgtgagaaggactttcccctttacaaatcatgtcaagtaaaaaaccaaaagtaagacgtatgtcaccaggcttaaatgatcgtatttggtcttttaaaatttcttcatttccttcggaaagctttgagcttttaattggatcaaaaaggccagatggagaatgtcccggatcaggcatctctgcttcaaatagatttttttgaagtatgagagctaagccaaaaacctcttcagcctgtacggaattttcactaccgtgagctggtgatgcgtggttacgcatccaattaatcatctcaagtgactttcctgcttttttgtgtaaaacgccaagctttgtagcaccatttattaatgtaaggtcatctacaccagaccatcgttcacctagcgtttcaccatctttatcatatttttttctccctgattcatcctttaccgctgaagtgaataattcaataccatatgcttccattctccggcgcaaattatgaacagcagcattccatatgtctaaaagagagtggtcaggaaagcccgcatccaaaagccttcttgcttgtgataaatatccgatttctgcgtcaacagttgtggggaaattatccgtcgatggtttccctaagattgctggcaaattatctgtcatttttattccttaaatttaatttgacaccaagtcttggtgtaggtctaacacttagtcggcgagtcgctctgtgcttaaagacaagttaacttgtctttatatattccaaacaatgaaattacactttttccactgaaattcaattatttactggtgatatttctttccgtgtagacaacatttatgaagtaaagaacgtcttcttttggctatgagctgactgttatatttgcttgaatccagagtggcaagagtgtcagcttatatgggctatttaatggcatataacgcaaaaagttaagcgtttatactgattcgcttattgagtccgataaaccaatcagttaaagtagccccgccattagcaaaatctagtggtcaaggattagcacccttgcaaagagctatccactggtaggaggtttctaccagtgtgtctgctatcgcccattcaatggcggttcaggcaggggaggcttcggcctcgctggaagatagctcccagtagtgctaaccctgtctgaattgccaccatcaattttctcaattaatggaaggggtagcaggaatgaataacgctaaaaatgactggcatcaagctgacatcatcgctgcattacgtaaacgtggtacaaccttagcggctgtttctcgtgaatctggcctcagttcatctacactagcaaatactctcagcagaccgtggccgaaaggcgaatggattattgctaactatctcgaaatacatccctcagaaatctggcccagtcgctattttgattcgtatggtgaattgattgagcgcaaggttcgggatagatcataaaaataatcagttccatttaaaaatcatcgggaagatagccgtaacggggtatcttctcactagcagtaacattcgtaattatccttcccaaaaactttcagcgagataagccataacttcttcacaaaatcagaacagttagcatactggccttgttttattgatcacaaattcactcttattctttcctgtcttttcttttacactgttcttatcttatgtcttgtttataagtttgttcagcgttctatgtataaacaattgcataaacaaacaaaaacaacttcgttaaataattgtaattatttaaataatatcaaatggttatactttaattatgaatatagctaatatatctcaagttaagacttttttcctctcattacaggatgaaatctgtaaacaacttgaacgtctggatgatcattcccatttcatcgaagagtgctggcaacgggaggaaggcggtggcggacgcagccgtgtcttaaaatcaggtaaggtttttgagcaggcaggtgtgaatttttcccatgtaaccggagattccctgccttcgtcagcaacagctcaccgccctgaactggcgggtcgcagctatcaggcaatgggggtttcccttgttattcatccccaaaatccttatgttccgaccagtcacgccaatgtacgcttttttgttgccgaaaaagaaggtgagccccccatctggtggtttggtggcgggtttgatctcactccctattatggctttaaagaggatgccgttcactggcacaccgttgccagtacgttatgccagccatttggtgaggatatttatcccatatataaaaaatggtgtgatgattatttcttcattaagcatcgtaatgagcctcgcggtattggcgggctgttttatgatgatttaaatagccccgattttgatacttgcttcaatttcacacaagctgtgggtaatggtttcctttcagcttatctacctattgttgaaagaagaaaagatatcggctggggagagcgggaaaggcaattccaattgtatcgccgtggtcgctatgttgaatttaatttagtctgggatagaggaacattattcggcctgcaaagtggcggacgaacagaatctatactgatgtccatgcctcctttagttcgctgggagtataattattcccctgagccaaattctcccgaagaagagctctatacatcatttctgataaaaaaagattggatataaataaatccgggagtagcccaatagcataaatatgtattgggctatttatcactactctaatctaaatttaaaattgaatatacacttcgtctttcaagttatgtctttgctggctacacatcttgagtttaattgtatatattacacccctgcttttatatcaatagattaataaatttattgatagcattccattaacaatattctgttataaaaagtcaatatttaccctaatgactatcactttaattatcgatagtatgcaaatgggcgcccaaaacaataaacatagcaatgacaaaacaggggataattatgaatagacaagcaattaatagatgcagtttaattcctccatttgtcttggaacaaatatcaaatcactgtgacgagtgtactaaccaatatgtactaaaaacattagatcatgtttataatttaatgaatattacggtatggaaggtatnccacagccg

SEQ ID NO: 121 - DNA, 24270 bp, Xenorhabdus sp.
tgctcgcacgcgtgtgtatttcattttgcttctcggatactttaaagccaaaccgccattttttccggtttaccttcaaggatgtcgccgacgatacgcaattcatcctgaaaaaattctttgactaaactaatggtcaatggcaaggaggactttctcgtgattcacttcggtcgcagaaacaatccatcctcgatctgttcgactatcaggattggtctacggcggtagaatccaccgtcttcgccaagttgtgcgaattaatccgttattttcctaaaggccatagcgccttgcggcagttgctgttttacctggatcgacaacgtattgttacgccgacatatcgcaaacttcaggacatgttctcggatgccttcgccgtagaggaagccaggataaaaccaattcttcaatccattcccgactattggcgtgaacaactgtcctcgctcattgatcataaagatggactcaaccagctcactttactcaaggccgatcagaaagattttcaatataccgccgtgaaattcgaaatcgagaaagcgcaaagcatggaagaactgtatcgatttgccgaagaatttttgccttcgttgaaaatttccaaaaatgccatccgttattatgctgatatcgtggaacaatatgccgcctaccggcttcgacgcctcggaaaataccagcaatggctatacgcattgtgttttatctttcaccgttaccagcaaatcacggatatgcccggttgagagctgccctgtatgaatacaacagaatattcaaaagcacccatgtgctcaatctgattgatgatatgcatctaagaaaagcaatacggactgccaggaaccgtacggagtcgtaccatcaattacaaagcattatccgtaaaatctacaacaacgtgttcaaaggcaggaaaatcaccgataaccgagtcagcgcccatgctgccaggttagtcgccaactgtattgtggcgtacaacgccatgatcctaaatcgagtgtataaaaagatggtatttgaaggtgtgccggaagaaatactggaaaaatttgcgagaatatcgccgattgcctggcagcacttgttctttactggtcgttacagtttcaagaaggcgagcaaaacatccattgatgttgctgcactggctgagctgttggaacaacacttaaaacaggcattctggaagtcatgaccgcagaatcgtcacttttgggggttcttcggcggaacccgtctttgtgctgctggatgcgccggatgagatagagcaggcaaagcaatgtctgaaagatctctcatcaggatatcgtcaatggggtgctgcctaaaagcgaagtgcgtatatgacttttagaagtgacatttaaaattattcgttcacgattaattttgtaacataaataccattataacgatcttgttttttaatgtttatttatatttttattttagtaaaaatgccattgtaataatatatcctaatattaggtcaattcgatttttgataattaaagtataaaatataattggaggttttaatggcaatctacaatgtattaattgctttagatgttgaccagatgataaaaaaatatgatggtaagactgctacaatagacaaaccattgctgatacaagacgattacatccatttgttattggttaataatgatggacaagtaatcgatcagggtggaagtaaactatccctcaatggaatagctgttggcgataaaataatgtggcgtacggtttcgttatcaaaatacaacacaccaaattccgtaatgttatctaattataaatcaaataacgcatcaccacttattgaagtaccggtcctgaataagtttaagcgccttagacctattgtagtcaatacagacccaatagacattgtcgctcaagaaattcccggatattactggtctgctgaagtgcttgaggcaggcggattatatgaacaaatatataatgctacgttcgtgatatacgataacaaagcaaaaccttataagtattttgtatggaaccatatcgtttccctcggtgacataaaaaacaattaacataacgttcatgtagataggctgcgctctggcgtagcctaatgtatatctattttctgtatttataacatttaattataaaaatataacttaatgtttttaaatgatatttattgagatgcattcatgatggataattgttttaatttaaatctatagctcttttattatgtaatagtgaaatatatttcctcatattttagcagataacgaatttcacaaaaaataatacatttaaggtgggtgttatacccactttggaattaacgaaagagggttatgttatgacggtatccgcaagattagaaaaaattgaatttgccgaaggtgtaaatgctacctttattggatataaagcatctaaagaatatcaccaatcacgtgtggaactcgctcttccggatatatggagtattaatgatgatacgaattggagtggtttttatgttgggcaaacaatagaagtagcggaaggatatttacccgatcatgctacttggggtgaaagtggagtttttcttaacgcgatatatcttgatagaaatattgcagaaaattttccaataacagaaaggcctctggaatatgttatacttgaaggcgaggaattatcagatccacagaaaagtaaagatgaaaaatacgcttatgttgtaaatgctcttcttaatgatctagacattgatgttccccatggtccactcatacataatcttggtctcatgggttatatttataaagggccccttgtaacagatgaatcagaaactcaaattgaaattattgtcccacatacaatcacccagtacggagcactttcagctagaactgatactatttatgaattcttaaattatgaaatagttgaaagtagagtaatgagtccgaataatctgacagccgatcaggaattagtaacaccatctccaattgatccctcgattatagttacgataggttcagaaaccttctacccatggaaagatgaattataggaatatctggtgtgattacagagaagcggccttaaacgatattcttaatgaaaaatgtggtgatataattcatcacattctttttaccttttcatcatacacgacatttataatttattttcgacttaaaatcttgaaacattataatcgtataatcgtaaaaatgtctattactcaccgcgttccgtctatcacacactgatcaggagaaacatgccgtgttgggcaaaagcgaaattgaagaacgccgttatcatgtcgccaatgcccttgcaagccagcgtcttgaaggcatcgagccggacaggcaaacgcttgaagacctgaatctctttgcatcgggcgagcttgaactggccgatgtcctgtcccgattgcaggaaagaacgctgaattcggtgaaaatgtcgcgattcaagggatgaaacgcggtgggcgatagacggaaaatgaacgtcacacaccttcaccgtccggctcataaaatagccacaaatctacatttgtgctaatgtgtgtctgtacattttcaaacaggagtgatttatgagccgtttaagcattgacattaccgagcggcagcaccaaagcctgaaagcggccgccgccctgcaaggcaagacgatccggcaatatgcgctcgaacgcctgtttcccggtcaggacgaggatagcgaggcgtggctggaactcaaggccatgctggaaacacgtatccaagacgggctggacggaaaggtatccaaaaagagcgtcaacgagattctcgaagaagaacttgcaagggaaaaacgccgttgacggattatatcctcaccgaagccgccgaagcggatttacgtgccgtgatcagctatacgcgccaacactggggcgaggcgcaggtgcgccgctacgttgaaaaactggaaaacgcaatggcacggcttgccgcagggcaaggttctttcagggacatggagacgctctttccgggcttgcgcatggcgcgctgcgaccatcaccatgttttttgcctgccgcgcgttaacgaaccggcactggtcgtggccattcttcacgaacgcatggatctgctcgcgcggctttctggcaggttataggcaaaaggcagattaagaccaatcaatgctatattgattaaaatagggcaattttaggcaattaaaatcgattttacgaaattctgaggcataccacccttactgaaccggaaaaaaggcacatttaaagaagcttgccttgcgggtcgcacctgaaggactagcgggagcattcgcgcagaaacttacggtttaacctttttggggcgttatataacgtatgaaattttactgatctgaaactactttgttttcattctcaaaactctcatagagggaaagtaatcgagaatataatttcgagaatggattttgataattgtaatgcctgaacgaagcgtagtaaaaatccaactcaagcagttctcataatccaccgtttttgcgaaagaattacatggcatggagggtttaaaatcccaaaccgtaagtttctgcgcgaatgctcccgctagtccctgaaatcaaaccgaaggcgagccaccttgcgtccggccttgaccggcttccactctatgatccatccgtctttttccgtcagctccttcacggccggctcaatgatcttgcggcggatgtttgcgaaattttcgcgctgtttttgcgttgcatccatggaagtggagaaatcgtcaatcgtatattccgcccagcctgtcgattcaaagcgcatgaggagttccagaagcttccatgaataggccgagcgcagggcgctggcctgcaactggtcgtaagccgtatcgaggcttacgttaaagacctcggcatattcggcggcagtaatgcgcgtgacaaggatgttcaagggcggtcgcggcttcttgctgtcgagtttcgagaccccgcaggcttcccgatatattttgtttttcggtgctctcttcgcaggcttcctttctgtcacttttctcgccatacatggctaacaccctgaattttttgctaagatgaagttttaaacccatgcgatgaggcagcaagactaatccggctgctagccccggcaatgacagcgcatactgcgatcactaaggtatcaataaaacggtgtttaacctttccctgacaacgtggatctggaaaatcagaaaagatctccactaattctttcatctgcacccctctaaaaatgaaggaattatccactaaatattttcatgcgtaacccctgggggaagaccatatacgaagctcaggttatataagcattaatcaattagttttcacacaaacattctttgttaagcgatagaatcctttaaagtgagaatataaatggtatttgatacgtagctcttctgccatgaaattttggcgatttcacactgaaatttttcaaataaatataataaattcagtttgttataagtgaaattagttggctaattattcgtttgaattgaaatgcttttgcattaacatttggatcattctttccaattcttcctcaaattcttttggtgcgcggttaaattcaaaactcacagctctatctttaatccgtttacgggcaaatgaattcttatctttgaagttccaaagagaaattatctgcggcttttcttgtgcggttttttttgctttgttgcggctaaaatctttaaacagcttgatgataatcgacttcatttcatcgggagcaaccagcttggttttattcatatgctggatttcgtcacacacacagctgacgacttcatcaatcgaaagtctgtttttcttgatgccaacggtaacgtccaaaagtattttataatctgagtagctcaattctgcgatgacaggaaacatagcaacaatcttactaggtactgacgcacactggattgcacgagtcactttggcttgtgacatattattagattcagcaatttctttttgggtcatccccccttcccgtaatcggatcagacgcataccgacttcacgaatgttgtgttctcttgcagtctggatatctgcggcaagttgtcttgcgtcatcggtgcttatgtttgtgttcgtgactaagatatctaaacctacaccacagaaaatagcagcagcacgtctgcgagaaccatccagaatctctatcttgccatcaatacgacggcctattgccgggaagaactgttgaagattgatagtacgtatgatgtcgctgacagattcttttgtcagtgcgctttgatcccggccgttgacccaaaaattaacggtcgtttcagactccagtttattggctggaatgtgctctagttgaaacatggctgtttgtccggaagcaagtgtgaaacgctgttctgtagtttggtttactgccggtgtttccaaggatactgaattgaacgttcttccgatagttggacgttttttattttgcattgttgcctctgttagctctgatgaactcaatacggtcaaaaactgctttggcaaagtcttctgctgctcctttcgcattctttaatgcttccccactgccgatatacgtggcagggtttgcggaaataacggtatcaaaagactcaccgcagcgctcgaatccatccaatctcgggatagcaaaatcaagcatgtcaccaccaaaaatttcttttgccaggctatgacacagcttgtgatcggtcttattcactaacttggacataaaaccgatgttaccgctgaggcgagtcgatgcgcctgtcgattcgattatatctaccagctccggcaagcgagccagatatttcagcgtactgtggaaatccacttgtgcgggtgggattggcgtcatcagaaaatctgcggctgcgatcgcgttagagaggaaggagtccaagtgtggcccgctgtcaataaagatgaagtcgtaatcgtgtttcactttatcgatgatattctcgcgcagaacggtatagatgttctggtttggcaggtgttctgcacaaagttcttcccaacgtgatgcaatgaatgcgtcttcaatggatgctgggataatgtctacgccagcaacaactgaggatgtgataaattcagacagtaactcttcgcgtgaaacgttttgcagcatggcttgggctgatgttgtatcaacagagccgatcgactgcttatgatcgaggaacatggttgccgatgcctgtgggtcaaggtcgatgaccaagatcctaaggtcttcgaaaatcaggtgtgggtgggtacgtaatgcatgtgccagggaaactgtactgacggttttagatactccgcccttcaaattcccgataaagaaagtcaaagcttcgtgatagcgattccggtatttgggtacgcctctgtgatggtatagatctatgatgttctcaatggtcattgcgtacttggatgaagagcctgcttgcttcttgccaaatacatatccctggccttccatttcgttaacggcataatccacgcttgcacgcgttaactttggtaattttgcgagagccgcttttgaatacgtttggtaataggttgttttactcagctcctgcttttggctttggatttgatcactgagtgactgtagtagacgaactgacctttgcgcaaccttgtctaattgtttataggtttcattcatatctttactctatatgtaggttttttgattttatttaaatatcctacataaaataataaatgtaaaattttttaattgaaaaacgctttattttgcttatttttctccataggtatttcatttttatcttattgtttttaattaattttaatgaaaaatttcagggtgaaatcgccagaatttcgcatcaatttcagaggggggatagaattttgtgttctagcttaacctgcttatcaggagggctattgagagatcataaaattccacatgaaaaaggtgagctggtaaacatagaaacggggatatggttttagatagcacgcaaagtcaaagtaaaccaaaaaagccgtggagtttaaaaatggctaaatcaggctgccatttaaatctcacggcttcatatcaaaatttatcattttcacaaactggctaaaaaactaaaaaactaaaaaactaaaaaactaaaaaactaaaaaacaaaggtgggttatttctgtggtttgttgcgaactttacgctcaataagttgaccacgttgatcaaaataacggctaggccaaatctctgagggatggatgccgagataatttgcgatgatccattcacctttaggccacggtctgctgaatgcatttgcgagtgttgatgagctgagtcccgtttctcgggagagtgcggctaaggttgtaccgcgtttacgtaatgcagcaataatatcggcctgatgccagtcatttctaacattgttattcattcctgctacccctttccattaattaatattgatggtggcgatccagacagggtttgcaataccgggacactcatccggcgaggtcgaaacctcccctgcctgaatccccatagaaaaggcgaacgcaggcacactggtagaaatatcctaccagtgaagtgtccacagggttgcaaatccctgaccattggtatttgccaatggcgggaatactttaactgattgttttagcttactcaataactaaaccgctaagtttaacggctataattcctctcaaaagcgcacaaactcaggggagaaaacggacggctaaatcaatctttgttatttattctcgttcgtgatcacttcgctatccgtatttcccctttgttttcagactcattttacttatttcgaaacattttccctgcgtgtcggttaggttcaccgttccgtggtgcgtcagataatgtgtagcagggcgagggttatgttgagtttttgcaggagttcgctgcgtgctcagcacggcgatggtttactccccgttcagtgcctgattcaatcaggatgaacgcctcattattcgtgacgtgtgatatctcctttctttactgcatcggcctattacaaggcggtgagtgaaaaacaaacgaaataagtgaattaaggcagaaaaatgccaatgaaaagtggtgacactgagtaatacggggttcaaatcggtcgtaaagccagaccgaacgtgctctggacgttgatcacctgacggcgtcacttggtaatcgcttcgcttaaacgcaagtgacgccgcgaagttttcgggacgtttattgtgcgtgacttaaagcgtaggtaaaagtcgtataaggtaaaacggttatggtgaccgtagcaggatattgctcaatgtatgtgataagcctgtctggtgtataaagtgacaggataactttcatcgtcagacgatatctgcttccaaaagtgtgcagatgtaccgctattttgctctccctttcaggctacaggagttttatttcgccacccgaaggcgatcctgataggcgatggatcgtttttgcagaaaaaatattaacggttaggtcagaagacgtcaaactgttgctgtgacttttacctcaatttacctgtgcattgttcgggaataacccatattaactggttatgatatatactgatttattcgccaataagtagattttgaattatatgcatgggggttctatgccacaaacaagtactgctacttcttcttcaaaacgcccatacagaaaaggtaaccgattaactgggattgaaagacagcaggcttttattgctcgtcgtaaagctgcaaatgataaatctattagagtatatgtatctaatgaactgaagctacagttacaaaaaatgtgcaaagtagagggagtatctcaaggtgagatgattagtcgcttaatcgaaagagccagtgcggatcacagtactaatgatgttaagtcataactttcttgagagtttattcttccggtgctagtatgaatattgtttaatttttgtttactgattttatttttttgataagtttagatagagtattggtgagaacaaaagcaattataaaggtttattgaattttttgtttcacagtgctagcttatcagggtttttcgttggtcagtcacgccgaaaggtgactaaatgcgggcagttaataatgtgattagctaaccgctaaaaaagaagaaaccccacaatctgcatcaaacttggcggcttgcatcagatatatggggctcatttgcagaaatcaatttgtggtttctgcataggagtatagaacgatgagacttctattgcaactttttgatctccgccataagtgcaggggatgtgtttaaaaatcaacacacccaatcaacatttgatccctcagttcgtcgtagccggcgtggtgaatccaacgctttacgtcgggggcagcctaaaatccatcggcgcaatgtcccgaaacaggacatcaaaatcccaacaggaacgcctgctcggttgtctcgtaccctaaaaagtcatgactggcggcgggatagggctcttatcgcgcttcgtcaaaagggctatacgccgtattccgagcgaaaaaatccgcactatgtgccaaaacccatgcgtatcagtacacgctctgagagccgtgaagcattaacttcgttgtcgttggcattcgtggcgaatgcggattttttccccggtcatgattatctgtttgaagtaatggtgccctttgaatttattgctaaagcaatgggagtactgcatgaatatgataacggccgtaaatcgtatgatgtggcacttcatgctttgtctgttcttgagcaactggagcaaatcgtcgttcatagggataaagaccgggatgccggccaaaataagcccgtgcggatttggttgaaaccggaattttttatgtctaaaggtattccgtgtgacgaaatccggcgcagcttgattgacttccaaaactgggcaattaaaagtggtcagcttgaaaatctggaaaaaaaataccagcgtcatttattgaatatggtgagattaggcattgatatagaaagcaaacacgcgctgcgtcagctactgaaaaagattaaacgctcagtggttgctccggatttacaggaacagaaagctgaagtactcaaacaaattgaagatagtattgagttgttagatcgtaaaaaatcaaaaaatctggaagccgaactagatagaacgcaacgttcggttgataatttgcgaaagaaagataaatcagattcaatttactggtgtatgtttgtcgagtggcaaaaaacaacaacaccggttgctgtctattatgcaaaaactaaattaaaggcacagtatcctcacgtaaacgaatattcggagcaattttatcgattgttacttgaacaagaagggatcatcctgacttaactaaagatttctttgattaataatcaaaataaccgtgcctagcacggttttggtgttttttttgtggcaaccataagtcatttttcacttattccacacatgattttcccatatttttctgctgttttgtatttaaaacagattactagaactgaaatctacaaaaaaagagtgaaaaataagctataaacttcgaataaatttttttacatgtaattagtttcgacgtttattcctgaacaaaacaagccttataaataaggaatcacaaatcgagttgagcctaaaggctacaactctcaatactagttcttttcacttcgttcaaggaaaaaataaatttgattacgtcccgtaagcggtcgtaaacgcccgctaacgcgcagatacgtcccgcctaacggcgtgaccactgcgtgcccttggcagaacttattaagcctaaaccacttgataaatcttttagcttaatagggacgagggatttcgagatcccattgatcctctatggcttcggcggttcagctccctcattcccattaatttatgagagccgccttttactcgcttcgctcataagatccacaaaaaagtaaaaacactttgcgcttaattattgcattaaaagcagtacctgttactatagtactcattaccactcggaggcatttgtggcgttctataaaatatcgtcgtttaaaaaaagcacaaagaaaattaacatttccgatcaacagttattaaatgctgcagaagaagttaaaaacgggaagtttgaagctgatctgggtgggggagtgattaaaaagcgaatagcagttgatagaaaaggtaaaagtggtggcgtaagagttatcatcttctttaaggttaatcaccatctattttttgctgatggctggacaaagaataccgttagctctagaggagcaaaagaaattgaggatgatgaattggaagcgtataaacagctttccaaacttttccttagctacactgatcagaagatcaatgagttaatatcctatggtatcttggaggaaatcatttgtgagtaataaattaaacaatatgcttgaattagcgaaagaactacacgcagtcgatgctgcaccaaaaagcttggttaacgatctcaaaaaagccgtcaatgcacgtaaaatcaatgaccagattaaaactgttactatgatgacaggggctgagataaagcaacttcgtacacagtacggaatgtcccaatctgtactggcaatggcattaggaatgtcaaaagaaagcatttctaaatgggaacgagaagaaaaaaaaccaagcggcccagctcttagaatgctccgtattcttgaaagacgaggtccggaaattttactggtttaattttgagtggtaattctgttaaacccataggggtccagtggaagaaccctcgaaaatgacgagtaacgtaacctgtcgttttaatgaattgatttactgattgttttttccacttcatcctccagagtcagtggccgtttgaccagcgtcagcaattgtggagcgacgttccagtggttgccgttctcagtgtgaactgtgaccgactttttgttcaggcgcaccagtatcccgataatttcatcgccatcagtctggaaactcaccacatcgcctgggcggaaatcagccatactctgcattgtccgctggcgttgtaacatattgagacggttaacaatacggtcatgaagcgttctggactagcgggagcattcgcgcagaaacttacggtttgggattttaaaccctccatgccatgtaattctttcgcaaaaacggtggattatgagaactgcttgagttggatttttactacgcttcgttcaggcattacaattatcaaaatccattctcgaaattatattctcgattactttccctctatgagagttttgagaatgaaaacaaagtagtttcagatcagtaaaatttcatacgttatataacgccccaaaaaggttaaaccgtaagtttctgcgcgaatgctcccgctagtccataatcagcttatcaaatgctagaggatctaattgagcgagatcgactcctcgtcctcgattatcaaacaaggcaaaatgatcatgaaagagggtctggccccagtgcgaccggcggaatttattgtcctccaatttacgcaggatatcgttcattaatctctgtgattaaaactcaggcactgtattaacagaattgatagtgcctatctcacgactttacaggagatgatgatggaaagaattcaaccgggcgtaacattaacagaaagtatcattaccacaggacaacaggaaatacccagtgcagtgcctgtatttattggttataccagccgtaatcaacaacacgcaaaaaccacagttcgtatcgacaatctggtggaatatacccggcgctttggcgacaattatttgatggcatttgcagtcaggcactatttcgataatggtgggcaacaggcttttgttttaccgctgcaagggaatatgccctcggaaaatatcacccaaacggaagcggaaaccctgatggcagcactaagcagcaaagcggtgcaagaagccattagcgcagaaacacagattaccctgattttggcaccggatatcgcccgcctgaatgacaatgtgattgatgatcaacaaattttatccaatttgtggtctgaagtctggatggtattgctgcaattgagtcagacccgttctaatctctttcgggttccgccgaagaacccccaaaagtgacgattctgagtaccgttacaccgtagcgaggattttatagactgtagcacgcgctatttttaattgtctcgatatgtttgttgctccgataccttgttcatgaagatggcgaacttgagctttgtctattgtgggtttacggccaaatttaacccctttagctttagcctccagacggccttcgtttgttcgctccagtattcgttggcgttctgcctgagcaaccgcagataaaatggtgaccaccatcttgcccattgtcccttctgtgctgatcccatcatccagaaaacgtatggcgactcccctctcatcaaattctttgatcagctgaatcatatcggcagtatcacgaccaagccgatccagctttttcaccagaataacatccccttcttcaatctttagccgaagcatttggagaccttctcgatccaggctactgccggtcaccttatccgtaaatatacggtctgctctgaccccttccgctttaagtgccttcacctgcacttctagtgattgctgactggtagagacgcgcgcataaccaaaggttctcatagtaaaaatgtctcctaaatcgatttataaacattctgctatacagattgtctattatattacatatatcgatttaatagacaccctcggattcctcatttaaggtgtcttaaatattataaaataatagacacctcaaatgatctttcttcaaccacgttggtgaaactaatttcagatggatagcacaaagcgcattcagcttctcacggaggctgaaatatcggacctctatgacaggccagacttcactgttgatgagcgagaactattttttgcgatcagccaactggagcaagaaaaactggacctgtattacaatgctcgcacgcgtgtgtatttcatcttgcagctcggatactttaaagccaaacagcaatttttccggtttaccttcgaggatgtcgccgacgatacgcaattcatcctgaaaaaattctttgaccaaactaatggtcaatggcaaggaggactttctcgtgattcacttcggtcgcagaaacaatccatcctcgatctgttcgactatcaggattggtctacggcggtagaatccaccgtcttcgccaagttgtgcgaattaatccgttattttcctaaaggccatagcgccttgcggcagttgctgttttacctggatcgacaacgtattgttacgccgacatatcgcaaacttcaggacatgttctcggatgccttcgccgtagaggaagccaggataaaaccaattcttcaatccattcccgactattggcgtgaacaactgtcctcgctcattgatcataaagatggactcaaccagctcactttactcaaggccgatcagaaagattttcaatataccgccgtgaaattcgaaatcgagaaagcgcaaagcatggaagaactgtatcgatttgccgaagaatttttgccttcgttgaaaatttccaaaaatgccatccgttattatgctgatatcgtggaacaatatgccgcctaccggcttcgacgcctcggaaaataccagcaatggctatacgcattgtgttttatctttcaccgttaccagcaaatcacggatatgcccggttgagagctgccctgtatgaatacaacagaatattcaaaagcacccatgtgctcaatctgattgatgatatgcatctaagaaaagcaatacggactgccaggaaccgtacggagtcgtaccatcaattacaaagcattatccgtaaaatctacaacaacgtgttcaaaggcaggaaaatcaccgataaccgagtcagcgcccatgctgccaggttagtcgccaactgtattgtggcgtacaacgccatgatcctaaatcgagtgtataaaaagatggtatttgaaggtgtgccggaagaaatactggaaaaatttgcgagaatatcgccgattgcctggcagcacttgttctttactggtcgttacagtttcaagaaggcgagcaaaacatccattgatgttgctgcactggctgagctgttggaacaacacttaaaacaggcattctggaagtcatgaccgcagaatcgtcacttttgggggttcttcggcggaacccgctgttgtgcgctggcccagtgtgcgcgtcactttaacgatgcggttacccgcccctcaaacggccagattttcatttttcagcgggggggcctgtgacgtcataccctgatcctttaagtgaaaacccgctccgtaaagagattgcgcccgcaccggcaacgcaggctgattttaaccctgagactgataaccatggctggcgataattttatccgctcctacaaagagcgcatggcaaaaaaacaggataacgaacaggccattttgcgattcctgaaagatgaaatttattccacggcggagatactgagtcaggttctccattatacggcggtcagcaccgtgtacgctgttttgaagcggatgtgtgccaaagggttactgagtaccgaaaaagtggatttaggcggttacaggccgtttaacgtgtacggtattacgcagcacggtgctgttatggccttagaggagcatgacgacccgtttaagctgaaagcgtttgagccgtctaaaatcaccctcagtacgctggagcaccggtttgatgtgcagcggttaagccttgttgcgcgtcatcgtggctatcagtggaaatcaaccagccatatcaaactggaaaaagggcagaaataccctgatggcctgatgcgcaaggacgggaaaatttgggcggtggaagtggagcgggtggcaaaatccccgaaacgctaccgcgaaatcacggaaatttacctgaaccaaatcgctaaaaatggctgggcgggagtggtgtacctgtttcccgaaccgctgttacgggacagggttaaacggattttttatgcggtcgatgctgccacggttggcgggcgtctccagtcgttaacccctgaaataaccgaccgttttttttgctttaacacgtatgaggaatttgcccgtgagtgatattcgtttttttgtcagcgacatcttggcctattaatccactctttccccttacgggtttaggtaaatgaagaatagataaaacgatatttgaatatgagtggatttatttaagtctaacttctttatgtttttaagataaattctctcatattctaaatgttctaatatctccattaggcatttcaacccataagcgaagttttccgtcgattgcttcaatataacgttttaaggacgataattttacatcttttcctaattgttctatctgcatcatggatgttagtgggatatccattagctcggcaacttctcttggcggaaaattcagttcttggcgtaataactgtaatcctttaaaaatgcattctcccgtaatggaatcagtttgattggcgttatctgaggggtttcttgctgcggcgagtaagttatcaaagatctttactgattcgcctccagcccatttagagcgacggggaatacgttttttcaggttaccaaaactatcaaaataacgacttggccagatttgtgaggggtgtaagttgagacgttgggcaataatccattcgcctttgggccaaccgcgattgagtgtgttacttaaggttccgtgttttaacccggattcgcgggaaagctctgctatgttggtgccaagtttgcgtaatgcggcgataacttcggaggagtgccagtcttcggtggtattcatgcctgcttgcctcatggttagggtggctgttcaagcagggtttccaataccggagttctcaaccggcgaggccgaagcctcccctgcctgaactgccatagaacgggcgagtgcaggcacactggtagaaatatcctaccagtggagaacttacggggttggaaatccccgactattggattttgccaatagcgttatcaggttaacgggataattaaaaatattcaataataaaatcaattgcatgtggttcattgattgtgaatatttttgtattaatggtgcgttagtggtgttataaactgtattttacacttgatgcgtgtcgacagtattttatatcctgcattccagttaaaaacttgctaaataaactgtgattttcattttcctcgtttttaaagtctctaacagatatttttagtgattaaacttacttgtttaacataatttatgatgggtggctgaatttataattatataatttttttatttcaaatattttattttaattatttttgtaatattatgattttatattgaaaatgggttatatcttatgggttaaatagggtgtttacatataaaaacatgttggataacagtgatggtattgcaaaagataaattatcttttttgcagggattttgttttcaattgttgtcatcatctaaagctaatggagttaatatgggtgtcttagatggtctaacaactataaaattatagttggaattaaaataattaagacattatattatctatttttcatggagatattaaaatgagtagaagggattttgaagaagcgttcgtggatcaatctttagtttttgagaatggaacattaaaaccactatcttacacgaaagattataggcataagaatttctctgaaatagaaagaaaatattcaaatatgtcatctgatattgtgaaaagaatgtgtgatgatgaagaatattatgttgtgttaactcatggtgaaatggttgatgctgtaaaaaattcttgtggaagcaatccgaattcatcatggaaagatagtctattttcagttacagatgttgtcacaacgtatgctggtaatatattggatggttatgcttttatgcgattagcaaatgagttaagcagtaatttcggcgtaaaagtaactgaatatgtcaatagatatggacataaaatggtaaagctgacggggcatgctggagtcagaaagtttttaactgctacaaaatataaagcaagtcattggaaggtaatagatataggcataggtacacaagcaatgcgagatggaatagctacagtatctagaagagttattattgtttctgtcctgtatagatcagcggagatgttattcagggatgagtatgatatttatgatttttttggaaatgttacgatggatgtagcaaaaaccgccgttggagctttggttggttttttgattgttgctggcgcagctatttttttggaagctggtgcttttgctttaggagttgctgttgtagcgttaggttttggagttattacaactctattgctatctaagcttgatgaacgttatgaaattagtaagaaactgataaactacttgcgtgagaaggaactggctgaggctgataaattagattatcgtaaacaaccatttggttatccttatccaagaataaaataaacttaatttaatagtgttggaaataataaagaggactggatgagtaataaaaatagattaactttagcaattgggatgttttttttatttttaataattaatgcagctctctttttttctgtggatgatattttatcgatgtatcatctttctgatgttgtctttttctcatggagaatatttgcaacattgtttttttaccctttattatgttattttatcattgctatattttattatttattttttttgaatatgccaaagaaaaataattcaatttttaagtttcttacatttgttggtatattaggtttttttattagttttcctgtgtcttggtatgttgattcaaaattaaaagaaaatggatatgtaacgtgctataaaaaatcgctaaattcttcaaataaatatgtgaaaaatgaaaagctatgtgactaagcatatacattatatgcttagttttatgtttataaaattctatcttcccatatactataagctgatgttccagcagttacatgattccatgatatagatttatagtttaatataactttttcatatggcattatatcatgatcatttatagagtgtgggtatacacaggaaatatctgtaatagtggcttctgtaattttcacttcgtagaataattctaattgtcctgtttggcttgttctataaaaaataaaccccccatttagtgactcatttgagtctattgccattgctagtagtggtgatgatttgtctattggtttgatgaactgtattggctggtgactcacgttttgctggcgtgaaattgcatgattcaggctgagtacctgtatttgatcttcatgtcccttttgataccgattccctattgaatcaagcgttgagcatccagccgatattaagccttgcttcttgccatttaatgttaaatatatcatgtatgacataaatattaccgtcctagttttttattcaaatcatactggcttgaaccccaagccagagagcgttaacttaacacataaaaaaacttgtaatgagtgtatcaagacaaaaaaaatcggcctgagattctttttgttacttgtagacaatatcaccaaaaggcgagatttagcgcaaggctgcctaatgtcctaatgtggtacaacgatgggagaatcaacatccgattttttcgattgggatcgattttctttggcagagaataagtaagctgacgcacttcgtttgtccaacgcctcgccgtaacaaaaatttttttgtcacgacttaccgtttagcggttagacaaaacaatgattacaggataattttaagcttataaaacacacgcccccgaaatcgtgttcaaacttggcggaatgtcacgattaacgagggcgcaagcacataacctaaaaggatattagcatatgagaacacagatacaataccccgccataagcgccgcagtgaatggttagtcttgcgctcgattattttgccgaccatctgccccgtaaaccgtatcacacagacgatttactttacggattgcgtatcaataacgctgacgtggcaaagctagcccgctacatccagcataatcctcctcatgcggctttctggtttgtgtttgatgttgaccgcgttggagcagcgatagactggacagacagcaacgcacccgcccccaacattacggtaaagaaccagacaaacggacatgcacacctgctttatgggctgcaaacggcggtcagaaccgcccccgatgctagtctcaaagcgctgaaatatgccgcctcagtagagcgtggtctgtgtgcgaaacttcgtgcggatgtgaactacagcggacttatctgtaaaaatcccctgaatcagcattggcaggttaccgcatggcgtgaggaagtctacacactggatgaacttgccgattatgtcgatttgagtttctcagaagcccgcaggagcgattttgagtacgggttagggcgtaactgtcagttattcgaaaaaacgcgcagatgggcttacagagcgatcaggcaggggcacccccattttgaccagtggcaactggccgtcattcaacgtgtggaaatgtacaacgttcagctcaccaacccgctatcgttgccggaatgcgcctgtatcgggcgcagtattgcgaagtggacacaccagcgtatgagtgaaaaggcattcgcacagtatgtggcagatacgcatacgccagagattcaggcgatcagaggtagtaaaggcggtatagctaaaggaaaaaacaacgcagataagcgcgaattagcattaacgttgtttgcgaatggaatttctcggaaagaaattgcagaacagttgaaagtgcatcgaaatacgatcagaaattgggtaatgcacaaatagcctatatcagataacagcccctttttggggcttttttgtactccctagttaaccgtagaattccggtcatttcacccgcaccgctcgccgcaaggggcaaacttgttttgccccgaggaagcggaatatccccttttcttcatgattgcactgccacacaatagctacataagatacctttctaatctccctttttatttacattgctatcttaagtagctatgttatgccttacggcatgattgttttctccgcgagggcgtcgaaaaacaatcagggggaagctgcacttatgtcaggctggacgcctgccaacgttaatcttccccctctttttgtcttatgtcggctgaacgccgccaacggcaaaaattcacccgcgccccgtcatgctcacgcatgaccaaaataaaaaactccgtcgctggacgcgcctaacgcttcgctgtttttcattttggtcatgcgttcacggtgttctctttgacggggcgcagcccaccgaaaaatcccgactggggtcgtgttttttctctcacctgctggggcaggttcgttgtgctttgtggcacggcgaaaaatctgctggggcagattgtttcttgtgtgctttcgccaagctgaacgcaatgcgaaagcatgaaaccgaggctcgtcacgctggggcgttctgagcctctttcccgcgctggggcgcgataatttcaccgaaaaagaggtatcagtgtctaaactttcgcatgagatttatcggttttaccaatcgcatgactggctttttaacgtggtcacggctgagtggtctacggtgtgttgtgtcggttttgtgttgtctctgattttagctaatgtgcgaggatttctggggcatatggggctggttggtctttccgctgagcaactgagaagagcgcgggaactgaacaggggggcagacggaaaacggattaatctcacgggtgcccaaaaagcgaatcttgatcacccgccgaaagggctttatttccggcggcggtgttaccaattcgcggaattttttgtgctgttgctttgcggtgcggcggtgttgttttatgggattaacgtgggtgctttgatgctggtgaatgataaagccatcatcaacctgttgttaagcgaagcgcgtttttatccgctgttctggctgataggcagtgttgttgtcggatcagtgacggcaaacttaacgcattttttgtttttgcgtgattttctggcgaagaaagatgcggaggttaaccgccgtgtgattgaaagccgctcaaaacatcaaggccgtaccggtgaactttctgatgcccgttctctgcaatttgcctctgtgcctgattttaatccgactgattattttgcccttgcgatggctaacgatgcggtgtttctcgggctggacgagcaacgccgtccgatcacgctcccccgccaaatatgggttaaatccaatattcagataatgggatcggtcggcagcggtaaaggggtgctcgcctgttcgggttccgccgaagaacccccaaaagtgacgattctgagtaccgttacaccgtagcgaggattttatagactgtagcacgcgctatttttaattgtctcgatatgtttgttgctccgataccttgttcatgaagatggcgaacttgagctttgtctattgtgggtttacggccaaatttaacccctttagctttagcctccagacggccttcgtttgttcgctccagtattcgttggcgttctgcctgagcaaccgcagataaaatggtgaccaccatcttgcccattgtcccttctgtgctgatcccatcatccagaaaacgtatggcgactcccctctcatcaaattctttgatcagctgaatcatatcggcagtatcacgaccaagccgatccagctttttcaccagaataacatccccttcttcaatctttagccgaagcatttggagaccttctcgatccaggctactgccggtcaccttatccgtaaatatacggtctgctctgaccccttccgctttaagtgccttcacctgcacttctagtgattgctgactggtagagacgcgcgcataaccaaaggttctcatagtaaaaatgtct

SEQ ID NO: 122 - DNA, 911 bp, Xenorhabdus sp.
  unsure (1)..(911): unsure at all n locations
nnnnnnnnnnnnnnnnnnnnnnnnnnnnnnnnnnnnctaaagccatcgggcgggtaaacaagcatgtgacagactgagcctgcctggccacccatgtgaggaatcacactctctggcgagcgtgcgtactcgtcccacacaccgcatgcaccacacacaaacgttcgtctgactgctggtggctgactaacccattaatatgaaaccaaccttcctgactgacaggtaggttattgatcttacctacctcctgaccggcccaccacactgtctgtctagtcagttaatcacttacattgtatgtatctttatgagagcgcactgcctgaatccctgcctctactgacagagacccaacgttggtcgatgaacgtttctcatatatatgcctggaggaaggattttcttcatacaataactatccatacattggctgatatataactaacctggttgctcgaatgccatccaccgaccgctgctgcccgctcacgaacgttaggctcgttcattgattgtgcctggttagatttaattaattgtctgacccgggcgtaaaaaataattatgactgattaaccgnnnnnnnnnnnnnnnnnnnnnnnnnnnnnnnnnnnnnnnnnnnnnnnnnnnnnnnnnnnnnnnnnnnnnnnnnnnnnnnnnnnnnnnnnnnnnnnnnnnnnnnnnnnnnnnnnnnnnnnnnnnnnnnnnnnnnnnnnnnnnnnnnnnnnnnnnnnnnnnnnnnnnnnnnnnnnnnnnnnnnnnnnnnnnnnnnnnnnnnnnnnnnnnnnnnnnnnnnnnnnnnnnnnnnnnnnnnnnnnnnnnnnnnnnnnnnnnnnnnnnnnnnnnnnnnnnnnnnnnnnnnnnnnnnnnnnnnnnnnnnnnnnnnnnnnnnnnnnnnnnnnnnnnnn

SEQ ID NO: 123 - DNA, 1020 bp, Xenorhabdus sp.
  unsure (1)..(1020): unsure at all n locations
nnattgaatcttttaatggttatttcaacttatacattcattttatgaatatatcactgatactgcgtcccccccccccccccccccccttaaaaaatcatggttttctgggtttttggctacggttcactggggtggaaccctggattcgattacaatgagaagattatcggttttattaaggactaccgacgcgtgtttgatttatgtaattcacaccagccggtgaaattatttttgcacagcttccacagtattttaaacatggcgttataattactttttgcagcgtgcattgatcaccggggaacacctgaatacctatcaagatcttgcacgctggaggtgaacgaagggcnnnnnnnnnnnnnnnnnnnnnnnnnnnnnnnnnnnnnnnnnnnnnnnnnnnnnnnnnnnnnnnnnnnnnnnnnnnnnnnnnnnnnnnnnnnnnnnnnnnnnnnnnnnnnnnnnnnnnnnnnnnnnnnnnnnnnnnnnnnnnnnnnnnnnnnnnnnnnnnnnnnnnnnnnnnnnnnnnnnnnnnnnnnnnnnnnnnnnnnnnnnnnnnnnnnnnnnnnnnnnnnnnnnnnnnnnnnnnnnnnnnnnnnnnnnnnnnnnnnnnnnnnnnnnnnnnnnnnnnnnnnnnnnnnnnnnnnnnnnnnnnnnnnnnnnnnnnnnnnnnnnnnnnnnnnnnnnnnnnnnnnnnnnnnnnnnnnnnnnnnnnnnnnnnnnnnnnnnnnnnnnnnnnnnnnnnnnnnnnnnnnnnnnnnnnnnnnnnnnnnnnnnnnnnnnnnnnnnnnnnnnnnnnnnnnnnnnnnnnnnnnnnnnnnnnnnnnnnnnnnnnnnnnnnnnnnnnnnnnnnnnnnnnnnnnnnnnnnnnnnnnnnnnnnnnnnnnnnnnnnnnnnnnnnnnnnnnnnnnnnnnnnnnnnnnnnnnnnnnnnnnnnnnnnnnnnnnnnnnnnnnnnnnnnnnnnnnnnnnnnnnnnnnnnnnnnnnnnnnnnnnnnnnnnnnnnnnnnnnnnn

SEQ ID NO: 124 - DNA, 906 bp, Xenorhabdus sp.
  unsure (1)..(906): unsure at all n locations
nnnnnnnnnnnnnnnnnnnnnnnnnnnnnngctcgctctctttcggtacctccgctcttacatgcgcctgatgattgctcaagagtggcacattgccactctgaaagctgacacagaacccgtcacggcttacgaacgtatcgatacatcccactctttggaacaccaacagattaccctgcatacccccgatggactgccccccgccggaacacccggatttggcctgcgaccattggacgaatccgctttaattcatacggcttttctactactgcatcccggtggactgactaaaaacccctacccggcaacctttccgatactggttgatgccgttcatgatgcgctgctgcaccgcccacgagaacccaactatgacctcggaatgttaccgctggattgacccatgcaacttctgtatcccgagcactatagtgaccatcatgagagtcaagccgccgannnnnnnnnnnnnnnnnnnnnnnnnnnnnnnnnnnnnnnnnnnnnnnnnnnnnnnnnnnnnnnnnnnnnnnnnnnnnnnnnnnnnnnnnnnnnnnnnnnnnnnnnnnnnnnnnnnnnnnnnnnnnnnnnnnnnnnnnnnnnnnnnnnnnnnnnnnnnnnnnnnnnnnnnnnnnnnnnnnnnnnnnnnnnnnnnnnnnnnnnnnnnnnnnnnnnnnnnnnnnnnnnnnnnnnnnnnnnnnnnnnnnnnnnnnnnnnnnnnnnnnnnnnnnnnnnnnnnnnnnnnnnnnnnnnnnnnnnnnnnnnnnnnnnnnnnnnnnnnnnnnnnnnnnnnnnnnnnnnnnnnnnnnnnnnnnnnnnnnnnnnnnnnnnnnnnnnnnnnnnnnnnnnnnnnnnnnnnnnnnnnnnnnnnnnnnnnnnnnnnnnnnnnnnnnnnnnnnnnnn

SEQ ID NO: 125 - DNA, 397 bp, Xenorhabdus sp.
  unsure (1)..(397): unsure at all n locations
nnnnnnnnnnnnnnnnnnnnnnnnnnnnnnnnngtgctctaaagatcgccacagactctgacccctagaccatgaatggaggggatgatgcactgaatctgccgtgattattaaaaatgttgactgatccgtgggatacatacatatacgggaccgtgatgtggctgcacaatacgccctggcattatattgagcagttcataacgagcctgactacaccctaactattcttacagatgctacatcattcgaacttgcctacgttgcactttataaagagctgacatcgtatctcccattatatggcacgtgatatacacttgccagccatactaccttgatctatgcacctgccgacggtgtggagctacatggctgacattcatcaaacgcaaan

SEQ ID NO: 126 - DNA, 689 bp, Xenorhabdus sp.
  CDS (3)..(689)
ctacacaatttaacctattaccttctcgttttaccgcactgcagaaaagaaacttgctgagtgtggatggtatggtcaggcctcttgataaaaatgcacatgggtttgtgcgtagtgaaggagtcggctgtatcctgctgaaaaatttacaattagcgatgaaagatgacgacgagatcctagccaatgtaaaaagtgcggcaagttggcacggagggcagggagattctttcactgcaccaaacgcttctacccatatgaatgtcatgacaagtgcgtttaaagaggcaaatgcggatattgagagactgcaatatgttgaagcgcatggtattgcatcttatgtaggtgatctcagtgaagctgatgctattacagcatttttatcaaagtcagcgcttgcatcctgtgtagtcagttcaatgaaatcgaacgtggggcatcttgaggtttgttccggtattgcaggatttgttcggacaatactggcgatgaaacaccaacagataccgggtatttcagaattacatgagttgaatgaaaatattgatagccatcggttacgcatcaaaaatattagtcagccttttaatcagcctgaaggattagtgggcttactctcatatggattaaacggtgtttcagcatttgtcctgttggaacctgttactactcatgcagaaaatcga

SEQ ID NO: 127 - DNA, 4356 bp, Xenorhabdus sp.
  CDS (1500)..(3416)
tcatttttagtaacatgctgaatgaaaaaactaattcatttgtcagataagatgctcaatattgagcatcttatcctgacagtgcacattatctttataagaaaggtaattgaaggttaagttttttatatttatagctattgtttttaaaaataaataattaattaaaataacagtagggaacatgtgggtttttttatttattgccaaggggttaaatgtgaaattattttttactaagctaattcgctggttttattttattggttacaataacatattgcaataattttaattactcatgttttccttattagaataatggatgatactaatgagtagcagtgctaaaaatttcagtgatagtattattgactttgcttataaaaatggagtgtatgttaaaaatataaaatttaataagggagagtatatatatgttaatggagggcgaggtaacttatattttatagaaaaagggcatgtgagaatttccactcaaacaagagatggtaaggtatgtaatattggtttttataaagaaggtgatttttttggtgaaagtggattctctggagatattattccagaaacagcaacagctttagtgggctgtattataaaaaaaataaatgttacttcgcttttagaagatatgaaagggaaagatttactttatgatttcataatttacatgtcaaataaaattatggagcatcaaaaaaccatttctagctttgttatttttaatagtgagaaaagattagcctatacattaatgagaatgtcttcagaagttaatagtgaaaatgtatatttaattaaaaataaaatttcttatcaagacttatcttatgttgtaggtacgactcgatctcgggttggatattttatgagtgatttgattaagcgaggtattattaaggaatccaaagagtgttttctaattgttgatagggaaaggattgaagagtatttaatggaataactggagatactatttaacaggttagattgattattaagaataacattcctttttaatgatgatttctatcactttgtcataaatttttatgatttggaatgctataacatttttcgatttaaccttttaaaaatcatgatatatcaagttcttatttctataagttttataatgcatcattataaaaataaataacaatcaatgtattacaattatataggatatctgaaacttccttttctatgatcttccatatcttcagttttgtgatagtaatgacaaactacattatctagtattcgtcagttctggctctactaacccaccggctgtggtcggtgtagcttagtaaagattttagtttaccagctggatataaataattttataacattctcacttttgagcatttttattttgaatagtatttatagtctcctatagatatctgattttttatattttagagagaaaaagtcaaagagagagggatacgcgcatgcatgacagagacaaaattgctattgtgggaatatcttgccgtttcccaggatgttataaccaagaggcattttggaaattatatcaagaaaaaaaatcagcgattgctgaaatacctgagtttagatgggctgttagtcaacattactcaccatattttgaaaaaaataaatctataagtcgttgggctggtttggtagaaaattttgaccgttttgatgcaccatattttaatatcacacctcgtgaagcggagttaatggatcctcagcagcgtatctctttggagttagcagttgaatgcttagaagatgcgggttatggcgtttctgatgttaaatcagctgatattggtgtttttctgggggtgtgtaattttgattacaaagaacgcctagaaaaatccataacgaatattcaagggcatctttcaactggaacttatactacgctaattcccaatagaatctccttctatttagatctaaaaggccccagtgttcctattgacactgcatgctcaagttctttggtggcactttcttacgctatgcaatctatccatgcgggtgattgtgaagctgcgtttgtcgggggagtgagttacctgtttagtcatacttactttgttgctttttctcaggctggaatgttgtccagaaccggaagttgtaaaacgtttgataagcaagctgatggttatgtgcgcggagaaggagctggcatgatcctgataaaaccgcttaaaaaggcattagcagataatgatcggatttatggggtaattgatgccgtggctgtcaatcatggtggaaacgttgcgacaattacttccccgaatgcttatgctcaggcaaatgtaataaaaaaagcgcttcagaaagccaatatttctgccaattcaatttcctatattgaatctcatggtacgggaaccccaaaaggtgatcctatcgaggtaaacggattaaaacgtgcattccgagctcatgccaaagaatgtggagaaacattaggcaccgcatattgtgcattatcgggttctaagacaaatgttgggcacctcgagtcggcctcgggcatggtaggtttgattaagggcctgctttctattcagaaaaaacgcctgttaccgatgctgaattttactgaactcaatcccaaaataattttggaggaaagtcccttccgtattcttactgaagaatgtgactggcagccagcagaaggagaagttcggtgttttggtgtcagtagttttggatttggtggtgttaatgcacatgcaattgtttctgaatatcaggagcagagggcttttaagcctgaaccgactacacgtgtgtttgcattttcagcatcctcagataaggcactaagagcctatgctttgttgatttcgacatttcttcaaaacacccccactgtttcggtaagtgattgcgcctacaccctggctcgaagaacaaatctgccgcatcgtgtcgcttttatctatcgcacccgacaagagctattggaaaaaataatctctttttccaatggattgtcggctgcaacactctctgtcggtgaatattcggaatgcgaaaaagtgactgcctggctgaacggagaaaaagataacctgagagatttattttcggcagattatgatcgtattacttatgtcccaccttatccttttcagcacaatacatattttcctgatgagttcgaaacgaaacaaaatgaaacagttgaaaataaaatcatcaggaatgaaaaacagaataacgttattaagctgtaccagatagaacccttattttcttctgttacatcctcttatgatgagttaaatcatgagaaaaatagatctcctattattttttctatgctggatgaaaatcaatcttcagtattgagaaaaacatgtttcacctgagcgatattttgaactgcccaacttaccaaatgatgcgtcagggagtgattggattaactggtatttacattttctgggtcaactgctcagagctatagaattagtgaaacctagttcatggatattattctctaaccgagaaaatatctgggcaaatacactttatgcacatgcactatcacttgaaaaggaattcggtttgccttgtggctggtatcaattccacaatgccgctctttcacaagatataaaacaatacttaacactgattcaaatgccggtatcgggatctttctgtcgacgtttgaattatgatgaaaagggttcacagatactcttattagaaaatttacactatcacgtcagtgtatttccggctgaatcagtacaacatagtgaatcattattgggttttaagccgaccatattaattagtggaggagccggcggtctcgggcaaatatttgccaaatatttagccaatacgtttgatgcaaatgttgtaattatggggcgtcgaaaaagtagcgagttgcctgcggattataaaacagtagaaaaaggcacgattgagtatattcaagcggactgttgtgatcgtcaggcacttaccgctgccattgaacatattatcactcagtataaaaatatcgatcttgtcatacacagtgcaggaagtattgatgatcgcagtatgtttttaaagacggaacagcacgtcagaaatattgttgaaagtaaggtcattgggtgtgaattattggatgaacttaccgcttcacttccagttaaacaatttattgtattctcttcaataacggcactattcgggaaccccggacaaacggattatgctgctgctaatcattacctcaccgcgtttgcacataaccgaaataagaaacaatcggcagggtctttagagcacatggctcgagca

SEQ ID NO: 128 - DNA, 6949 bp, Xenorhabdus sp.
  CDS (1647)..(2510)
aatccagttttattccgataaacaaaaacccgtatccctttttgcgcagaagaccgtgaccagttcgccttctttcaggcgttctgttgcatcaccacagcccacaacagcaggaatacccagttcacgggcaatgatagcagcatgacaggtacgccctccacgattagtcacaatcgctgttgcttttttcatgattggctcccaatccggatcagtcatgtctgtcaccagcacatcgccgacctgaatgcgatccatttcactgagattgtgaataaccttaactgtaccaataccgattttgtgcccgattgcacggccttccaccagcacactgccctgctcattaagctgatagcgttccatcacctgctgattggaacggactgtttcagggcgcgcctgtacaatatacagtcgaccattatgcccgtctttcgcccattcaatatccatcggacgaccataatgtttttcaatcagtagggcctgctttgccaattcttcgacttcattatcggcaagagaaaagcaattacgcaatgcttcagaaacatcttctgtccgaacctgctgaccgtgttctttgctgtctgcatagaccatacgtatttttttggagcccagattacgtcggactattgctgggcgattattttttaatgtaggcttatgcacataaaattcatcaggatttactgcgccctgcacaaccatctcacctaaaccataggcagatgtaataaacacaacctgatcaaaaccggattcagtatcaatcgtaaacatgacaccggatgatgccaaatcagagcgcaccatccgctgtacacctgctgacagcgccacgccgcggtggtcataaccctgatggacacggtaggaaatagcacgatcattaaagagagatgcgaagacatgtttaatggcaaccatcaccgcatcaataccctgtacattcaggaaagtttcctgctgccctgcaaaagaggcatcgggcatgtcttcggccgttgctgaggaacggacagcgaaagaggcatcaggctcaccttcagacagttgcaagtaagcttcccggatatctttttccagttgtgctgtaaatggcgtatcaatcacccactgacggatctgtgcaccagccttagctaattgattgacatcatcaacatctatttcatccaataattgataaatacgctgattaacaccactttgttccaaaaaatcattaaatgcctgtgctgttgtagcaaaaccattgggaacagatacaccaaggtcggccagattggtgatcatctcaccaagcgaggcgtttttaccaccgacccgattaacatcattcatgcctagttggttataccaaagtacattacatggggtgaggccattattggacattgaaactatcctttttacattcggaggtacaaatcggaaaattagtgctgctctttacagcaggaaatagcctagcacaatgtattgctatatatggaaaggtgaatcgatcaacccagcaatattatttttttacaggtataatccaaaacactatctgtagttgttatttgcaataaaaacgattcagctaatattttaatatattcacctacccactaataaaagaaaatacaatgatagagatcccattcccgcagaatcaggaaaatgagccactagagcgtagtgtctttttcatctccgacggtacagcaattacagcagaagtcctcggccatgctgtattatctcaattcccgattacgatgacgtcttatactttacccttcgtcaccaacaaaataagagccgaagaaatcagaaaccaaataaataatctttatcaggccacaaatatcagaccactggttttttattccataatttccagcgaggttaaaaatatcattaccagcagtgacggattttgtctggatattgtccagactctcgtcgcaccgttgcagcaggaaatcgggctggaaccaaaaccagagttacaccgtacacatggtttatctaaaaaaaacctgagtcagtatgatgcccgcattgcagccattgattatgctctggcacacgatgatggcatttcactgcgtaacctcgatcaggcacaggtgattattctgggcgtttcacgctgtggaaaaacccccaccagcctttaccttgctatgcagtttggtattcaggcagcaaattaccctttcactgctgatgatatggataacctacaattgccagctgaccttaaaccgtttcagcacaaattattcggcctgacgataaaccccgagaggctggcggccatccgtgaggaacgcagagaaaacagccgttatgcttcattacgacaatgccgtatcgaacttgctgaagttgaagccctatttcgtaaaaataagattaattacttaaataccaccaattattctgtcgaagagatttcagccaagattattgacagtatgggactgaaacggcgtatgttctgacccaaagaatcagcataattcaggtatcattaaaatttcatacaccagcatttcgcttaaattgatattaatgttttgttgaatttatcggaggctgagttattgtaatttccatcacgccagactgcgcctcaaaatgaagtagaattcgagaaagtatatgtacaaaacagatgagctacgaacccgccctattgataagctgataacacctaaaaccctttctgagcagtatccgatatcagaaaaaatacgccagaatgtgacgctgtcacgaaaacgaattgaagatattcttaccggtaaagatcaacgtttactggttattatcggtccctgttctattcacgataccgatgctgcccttgattatgcgtcacgcctgcaagtattgcgtgaaaaatatcagcatagtctggaaatcgtcatgagaacctacttcgagaaaccgcggactgttatcggctggaaaggattaatttcagaccctatgctggacggttcctgtcaggtcaataaagggatctcacttgcacgtaatttattaattaatatcaatgaattgggaatgcctaccgcgacagaatttctggatatggtgaccgggcagtatattgcggatttaattagctggggcgcaattggtgcaagaacaactgaaagccaaatccatcgggaaatggcttccgccctctcgtgtcctgtcggatttaaaaacggtactgacggcaatactcacattgcgattgatgcaatacgtgcagcaagtgccagacatatgttcctgtcaccggataaagacgggcagatgacaatttaccaaaccagtggcaatccctacgggcacgttatcatgcggggcggaaaaaaacctaattactacgctgaagatattactgcaacctgtcagaaactgcgtgaattccgcttaccggaaagactgatcattgattgcagccacagtaactgccagaaaatccaccgtcggcaactggatgtcgccagagatatcagccagcagcttaattctggttcaacagccatcgctggtgttatggcggaaagctttttagttgaaggctcccaaaaaatcatgttgggagaacctctgacctatggacaatcgattactgactcatgtcttagctggcaggatacagaagagttccttcatatactggccgaagcagctaaaaaacgttgttaaatacctcttctttagtatctatttttggcttctgtgcataatggaagccatatcctgttaaaaagcctttagattacccattcttccttatataaaaaaatagcttgaagttaatcatcatagaaacgataattattctcaatattagaataattattgttcatattggctatgaaaatactaactgactacccgtactaccacattacccctttgcaacagcagttccttttggcattacatcgtggttcaaccttaaacaaaatcttattttgacttaatcataatcctgcaaagaaggcatattcatgtcatgggattaaaaccactcgtatgttttaaaacaccattaaatcatggagataacttgcatgtcccggattcagccaccaaacctgaaattgtctgcattaagtattattattttaaccgggctgtcttctgctcacgcagccaccatttcagctgacaaaaaagatacagcagaaaaaagtaagcataaagacacgataacggtttatgccacaggcaatcagcgtgatagttttgaagcaccaatgatggtaacagttgttgaagggaattcagccagcagcaaagttgcaggtaatgctaacgatttactgcgtaaaatccccgggattaatgccgctgattacgggcgcgctaacgggcaggatatcagcctgcgtggttactcccaaaaaggggttttaatgctggttgacggtgttcgtcagggaacggataccgggcatattaatggtgtttttctcgatccggcgctgattaaacaggttgaaatcgttcgtggcccatccgccctgctctacggcagtggtgcattaggtggtgtgattgcctatcagacagttgatgcagcagatctcttacaggatgggcaaaatagcggttttcgtgttttcagccgtgcgggaacaggagatcacagctgggggcttggagctgctgcctttggtaaaactgagaatcttgatggcctgttgactttcagtacccgcgatgttggcaatattcactatggcggtggtgtaaaaggtcgaaacgatgaaaacatcggcaatgtgatggcgaaaggcacatggaaaattgatgatatccagtcaattggtggtgaattgcgttattaccacaacaaagctcatgagccgaaagatccacaggatattaatgaccatagcagaaacgtcttggctgatcgcacaacagcacagcgtgacatgcagctgacttataaactgaatccgtcgagctataactggctggatctgagaaatgatatttattattccgatatcgccatcaataccaaaacgaaagaaaaaggctttgaaggccgcagacaagaaactttcggtataaaactggaaaaccgttctcatttgagtgcaatgccttttgctgcacaccaatttacttatggcactgaagtttataaacaaaaacaaaaaccaagccgtgataatctcaatggatttccaaaagcagacatccgtttcgcatctggctgggtacaggatgaaataactattcgtgatctgcctgtttcagttgtcgttggtacgcgctatgacaattacaaggcttcaaacgataacaaaaataataagtataaagatattagtgccgacaaatggtcatcaaaaggcgccatcagcattactcctacagactggtcgatgctatttgcttcctattctcaggcattccgttctccgaccatgggagaaatgtatgatgactcccagcatttccctggaaacaattggaaacctaatcccaatctacgccctgaaagtaatgaaactcaggaatatggcttcggattgcgtttcgatgatttattgatctacaacgatagactgaaatttaaagccagctattttgacacaaaagcaaaagactatatttctcgtgctgtgaatggaaaatttacagaatcgatcaatatccctaaagccaaaatctggggctgggatgtttcaatgaattatggcactgactggttctcgtgggatttagcttacaaccgcactacaggtaaagatgagcaaacaggtaaatctattgaggctctaagccctgacactgtaaccagtacattagatatccctctttctgatacaggattctctgttggctgggtaggtaaattcactcagcgtactcatttcagaggggttaatggcgacaaagacgaatatagaaaaacaatcccacaatatgctggctacggtgtcaatgatttctatatcagctaccacggcgaaaaccagctaaaaggtgtcacaacttctgtcgtgctcggcaacgctttcgataagcaatattactcaacattgggtgctccacagagtggccgtaatgccaaactgctcatcagctaccaatggtaaataataaaagtactatttttaaactatacctcatttttttaaggagctagcaactgtgaatcagtcactttatgaacgttaccaacaggcaaaagcagataataaagccaaatatgcacgcgatctggcggcttatcttaatgtcagcgaaggagaattactgcacagtcgtgtcggtatcgacgcgaaacgtctgaacgttgatgctcctactctgctgcaagaactggcaactgttggtgaaaccaaagccattacccgtaatgacttcgcagttcatgagcaggttggtcgttacgagaataccaagttcagcgaacatgttggcttgatccttaatccacgtgaactagatttgcgtgtatttttcgatcactggagcagtgttttctatctggtagaacccgcgaaaaacggtctgcgtcacagcgttcagttctttgatcgtcagggtgatgcgttacacaaagtgtacaccaccgctaatacagatatggctgcatgggaagcactgattgaaaaataccagacagaagaaaaccctgctctggaagttcaaccggcaaaagtccctgaacatgcagaaatgactgaacagctgaaagtgcagttggatgaagaatggcgtgcaatgactgacgttcaccagttcttcattatgatgagccgccataatctgaaccgtcagcaaatcttcaattctgtcaaagatgatctggcttatcgcgtagataactccgctctgactcagatccttgaagttgcacacaaagatcaaaataaaattatgatctttagagcacatggaacgagac

SEQ ID NO: 129 - DNA, 7064 bp, Xenorhabdus sp.
  CDS (4187)..(7063)
  unsure (1)..(7064): unsure at all n locations
ggtatagttcgtcgtctgcatgttgctgcttatcggatggtattttgccggattacctatcggaccgggtatttatccaatattaaattaatgactaatatgtagtggttctaacttaatctgatctccattgagaggctttgtcctctcatttatcctcagtaaaataaccctcccaatctatttattcctgttattccagagttcggcaaagagtaattattcattttttatatagggtattttattttaaatggcgtgtttattttgaacgggtattttttttgaaagtatgattttttttaatggggcgatatattttaaagtctgcaatattgcagggtttatttatattacgccttgttgttgttaataaatgctatccagacgttataaaaacactcattattatttatgcccgcattcatttcgtgagttattcctctggttttcgatgtgatagctattttattacgcctgtttctaaatttaactgtcgtggttgaaagcatgactcacacttaataaagaatataaaagtatatgaggaaggtggtatgttcttaagtaaagaatcgttcagtgacgaggaatggaacgatcccaagtttcagttacgtaacttaattaaaacatctgaagggctggaaaaatgggtggcattaactgatggagaaagaaaagccatagaagcagttaaaggaaaatatctgtggcagagcactccgtattatgcttcgcttatggacaaacatgatgagaattgccccattcgattacagactattcctcatttaagagaaatgaacgtagcggaaaattctgataatgacccggtgggagatacagccaacctcaaaacagccagagtagtacataaatatccgaatagaattgttttactggtttcggatacctgccctgtctattgtcgccattgtacgcgaaagtttcataccacagatgtcggtggcacctattttggttctgatcttgccgcatcttatgaagaagacttcgcttatattgagagccaccccgaaattgatgatgttctgctgacgggcggtgatcccttaatacattatgacaagtttcttgaagcgattattaagagactgagaagcatcagccacattaatattatccgtatcggaacccgttatcctgtatttgcccctcaaagagtgacagaaaaattctgtcagatgctggaaaagtaccatcctatctgggttaacacacattttaatcacccgaaagaagtgaccgaagaagcggctgctgcctgtgatcgattactgcgacatggcatccctgtgcaaaaccagtccgttttattaaaagggatcaacgacgatgtagaaacgatgcggtcactactcaaggcgcttttgaggatcagggttcgtccttattacttgtaccattgcgataacgtatcaggtgtttctcacttcatgaccactctggagaagggacaggaaattatggatgcgatggtagggttcgagacaggttttagtgtgccacagtatgtcgttacaacgacattaggcaaattaccggtgaaccgggcacatgttaccgctcatgaagatggtcgtgtgacggcgaggaattataaacaggattctttggatattactgaatatatcaaaccgccctcagatttgaatgattatcccgctgaatatcgtaatagtgaaattattccctctaagactgtcgatttataaaaagagcgatctgtaggttatcggtttttaaaacgaaagattaagcattgtcatattaattaactgagatattcataatgatacaagagaatcctttttcatnccgcattgctggtagagcaaagaatattaatgcctcagtgacggtagggctggcagatatcgttgctaaattgaaaagtgaaggtcgtgacattattggattgaatgaaggtgagctggatttcagtactggggctgctattgttaatgacaccatccgggcattgatagatggcaggacacgttatagctggctcaacggtgaacctgaattaagagagaaaatctgccaaaaagtatttgaagataaccggattaaagcgacgcctgaaaatgtcatcgtaaccaatggctccaaacaagttatttatgaaatattacagacagtcattaatcccggtgatgaagtcattattcccgtgccctgttgggcaacatatcttgaagcagtcaaattagccggtgggaaagcggtattaattgaaaatattggtgttgatctggatgttgaaaaaataaagcaggccattaccgaaaataccaaacttatcattatcaatacgccgaataatccgaccggggctgtttactcgaaagctgcattacagaccctgtgccaaatcgtcaaagaaaaacagattttcatgttatctgatgaagcctatgaacaaattgtctttgatggtgaacatcatagtctggctgcccttgatgacaatgaatacatcatcacggtgcaaacattttcaaaaagctttgccatgacgggctaccgtattggttacatgatagcccaccctgaactaatcaacagagtctctgacctgcatggtcatatgaccgataatgtctgcacttttgctcagtatggtgcaattgcctcgctcgaaatgcccaaagatttttatcaggaaaggttagagatactcaaacaacgccgggatcgggcataccgatatacccgcgaacttttcgattgtgagcttcctgccggcgcattttatctgttccccaatgttgaaaaatacctcaatgatcgttgtcgtgatgccactcaattctgtgaatatctgctcactcatgcaggggtagccctgatcccggcagaagcctgtttgtatcgtggacacgtacgagtttcttttgcagcgcccatggatgccattgagcaggggtttgaacggatcgcaaacgtattgcgctatacacaatgaatttcaggatgcatcgcggcggcaagggagagaattcccggtctagatatctatgtgaccagggtgagtgagcgcagccaacaaagaggcaacttgaaaggcgaagtgtataattaatgaccataaggattaacaagaatgaaccaggctatatattccattgaattgtctaattcagaagttgatgagattcaggcactcatcgcaaatttacaagaacgttatcactctactgatgatcaggcatttgttcacagcttgcctgaatgggtcgagtcattacccacccgattacgtattgaagtcaaaaaattccgccatcagggttacccgctagctgttataaagggataccctgatatgtccgagtcgatgggggcaacaccgaaccattggaaggacgtttccaatacaaacggtcattatgattactactgctgtttgatgtcgagcttatgcggtgacgttgtcggtttttccgatttacaagacggaaaactggtgcaggagatcttcccaatccagcaagacgccggaaagcaattaggcacgggttctgtcgatctattactgcataccgaagatacctcactggactatcgtgcagattatctcggtttcatgtgtattcgcaatatttaccgcatccccaccagcgtgtcagttcccgatttttccaaacttagtgaaaaaaccgtcactattctcaagaaaaacaaattccgtatttttaacgatcgtccgtgtttgtcaaaagaagagcgggatgaaaattatacggtttgccctgtcctgacgggcagcggcgatcatattcatatgcgatatgaccctctgtatatggataaagccgcgttggataccgaagaacttgaggcggtggctgaactggaggcattagctgagtcggcggtatttgatctggttttaagccccggtgaaattgcctttatcgataattaccgctgtgctcatggccgtaaagcgtaccagcccagatatgacggcactgatcgctggttgaagcgtacccagattttaaccagattacgggattttaaacacctgtcgttacccggccgcatcaacgtgttgccttaaatttttaccttaagtctgggcactgaggggaatttttgttgcctgaaatcttgatgtatttgagtgatcttttttatttggtttaagagtatgcgtaaacacaatcaaaatgcaggagcagatcgttttgttgagcaatggcgtgtctgccttcagggacttgatactgataatgtccttattctggcgttactgaaaaaagcactcagcgatattgatgcaatacggtttaacgatttgcaatccgggcgtcagctaagctggcgccaattactgtgcagtattgcccgcatttatcgttatatgcatgaattgaacgttactcgtggtcagcgggtggtgacaatttcgcataattgctgggaattactggctattgaattcgcctgtcagcttaaaggtgctatttatgcgccggtatacgccaattattctgaggagatgatgacttactgtctgtcattggcagaacccgcattagtcatcacggaaaaggtatcacttgcacagacactggcacagcatagcccgtggcaggtgatgacactggaacaggccggacctttccctgattttgccggtattgacagggaaactgacctgatcagcccggataaagccgtcagtcatgaagctatcggagaggcgttactcagggctattacgacagatttacaggccacgcaggcagaacaggcattctgtttgatgtttacttctggttccagtggtaaaccgaaaggtgtgttgctcagtcagaacaatattctgtcacagcagcaggctctgcaaacattatggcatttcgatggcccgcaatcttttctcagttacctgccgtggcatcacagctttggtggattatttgaaaaatacacggctattttcagtcaggcgatgttacatattgataatagccggggcatggatattgaccggatgtgcactaatctgagtcagttaaaaccgacacgttttttcagtgtacccaagatactgacagtcgttgccaacaaaatgaaacattccgaggcgtttcaccgggcagtggcaccgacattgcagatgatcttctccgctgcctccaaattgcctccggatatcgaagactattttaagcattgtggtatctacgttgctgagggctgggggctgacggaaaccagcccatgcctgacacttaaaggcccgggctatgaagaacacaacagcgtaggccgccctttacccaatgtcattctcagtattgatgaagatagcggggagattttggcaaaagggccgaatgtgatgctgggctattatgccgatgaagccgctaaccagcgttgcttcaggcagggatggttcagaaccggcgatctcggcaagatgatcaagggtgaacttgtgcttctggggcggttagattcagtcaaaaagctgtctaatggcgaaaaggtatccagcgatgccattgaacaaagtctgtttgagaaaaccgatattatcaaccatgccattattgatattgaacaacgcccctacgctacggctttattgtttattaaccctgagctgtgtcgccagcgatttggtgagaattgcacactgcaacactcatcccgtttgcaggagcatattgctgaggtggtacaacagcataatcagcaggtggaggatagttcgtttaaattgattgcggtggcggtcactgaaacctcactgtctctggagaaaggggaagtcacaccgtcatttaaagtgtcgcagcgtactgtacgcgagaattatcaggctgtgcgtgatgccttatacgataccagtcagcctttccatctgaatccggcatgtcattcattcctgaaaattaccgaaaatcacattgtttcatccgttattcctcaagaggctgtgccaatacaaagaattaactgggaaacatttgttcacatcattggtcaggttcggggtcagaaactggccgaagatgatgtacaacgttctttaatggatctggggtataactccgtgaccatcgtccaattggctgacagtttaagtcaggctatgggccatgcggtgactgaagtcgtgttgttctccgcttcgtcaattcatcagctttggcagaggctggcagtaccagtacctacagtaaaaacatcctcagtaaaaaccacagatgaaagccttttgcacactgaggctagaatatcactgccgtctgaacaaaataatgctgaagtagcgattatcggctatgccggacgttttcccggtgcagaagattgcgatcagttgtgggaaaatctgctggcaggaaaaagccagttcagccgctgcccggaagatcgtccttttatggcgtcgctattagccgagtttgaggcgaatggtatccagttgagtggggcgttttgcgacgatattcgtcagttcaatcatagtttcttccagattacgcctaaagatgcccggctgatggaccctcagcaccgattattgctgatggtgacatgggaggctattgagcaggctaacctgagcctgaatgacctgaaagaaagccgaaccggtgtatttgttggtatcagccagaatggttatcgacagttgctacaggattatctcacggagacaggggaagaaggatatccgagcagcgcaatcaacaatcagaacagcgtatgcgctaatcgactgtcgtactttttggatttgagagggccttcgttaacggtcgataccttgtgttcatcatcgctggtggcattgcatcaggcacgtttgagtattgagcggggcgaatgcgataccgctattgtggcgggggtacatctacagctggatatggcccatttcagggaaatgcagcaattgagcgtattatcccatgatggcatatgccgcccttttgacgctaaggcaaacggaaccgttctgggcgaaggggcaggcgtagtaatccttaaacgtcatgatcttg

SEQ ID NO: 130 - DNA, 6350 bp, Xenorhabdus sp.
  CDS (2763)..(3362)
gaaataactctgctggaaaaacagatatttcataaaccgctgtcagacatctggcaagaaaccatcgactatttccactcaactcatcagcctgacattatcgccaaagcagaaaaacagccgaagaaaaaaatggcgctggtattccagtggtatctcggtcagtcgtcacgctgggcgattaccggcgatcccgtgcgcaatatggattaccaaatctggtgcggtgcggcaatgggggccatgaatgaatggctgaaagggactccttttgaggcggttgaaaaccggcacgtcagcgacattgccagacttctgatgaatggggcggcctgccttacccgcatagcattactcgaattactcaatgttgctgtacctgaacagataaaacagcatctgttgttgagtcacgggccatacagctcaaaacagtgtgttacagaacaaaatgttacagaacaaagcgtttcggaaaaaatcgttacaaaacaaatgcctgaccaaaaaatagaatctaatcaaaaaacagaacctgatcaaaaatcaaaggtgaggagtaaagaatctatggatgcttcaacaaaactctgtttggataactcaaaaagcttttataagaaatgctgggatctgatgcccggagggtcgcactataactttggcgatcctgagcgtccgttagtgatcccgtttaatcgcggggaaaaatcccgtgtatgggatctggatggtaatgaacatctggatatgttttgtaaattcggtgcattactggtcgggcatcacaatgaggcttacaacagctcattgatcgaatatatgaataaagtcacttccgttgatacctgtgatttggaagttgctgtctgtgaaacgatggtcagacatattccttgtgctgaaatggtgcgtttctgcctgagcggaaccgaagctgtacaaaatgcgctgcgtctcgcccgtgcttttagtggtaaaaaccgttttatccgcttccacggtcactatcatggtaatgcagacaatatcatgggctggcgtaagaaacaggatctgacctatccggtgccggagcagttcaggggagatctgctggatacactggggcgtgatcctaacgtgatgacagatcagtcttttatgttgccgtggaatgatattgatattctgacggcgacaatagagcgctaccacgatgaaattggtgcggttctgatggagccgatctgcattaatggcgggggtattttcccggtcgaaggctatctggagaaaaccaaagcactgtgtgaaaaatacaatatcgtgctgattttcgatgaaatcattaccggcgttcgtatcgggctgggtggagcacagaaaatactgggtgtgacacctcatctggcgacgtttggtaaggcgctgggaggcggggccatgccaatctcagccattgccgggcgtcgggatattatgaatctctatacccgcggcaaagttattcacgccggaactttcaacggttatccactcggtctggctgccattaaaaccactttcagcctgattgaacaggatcccggatgttatgaccggatgggcgacattatgcgccaaatttcgaatatctttgtgaaagccgcagaagctgtcgatttaccactggtagtacagggtatgccaacggcgctggtgtatcactctcagaatacaccggttatgtctactgaaggttacagcgataaagtcaaattctgcgacatcatcatccgtgaaatttccaaacgctatggcattcagttctctccattatcccgcatgtaccccaatctgctgatgtcacaggatgacgtgcgtttcttcgaagagcggattttcgatgccatggaaaatgcccgtaaagtgattgatatcgcttttaaagaagggatcaccggatgagtcggcagattgctgttgtcaccggagctggtgggggattcggcaccgcgattgccagaactttgctggatataggttatcaggtggctgcaacagatatcagcatacaaaaactgacgctccttaaggagcgtctcgggcagccggaatctctggcgatatttgaaatggatgtcactgatcccgcttctgttgagcaggcggcacaacagatcactgaaacatggggtaaaacgatcacggtactggtgaataatgccggcattattcaccggactttctgcctgtcaggtcagggactaccggaagtcgccaaaatgatagatgtcaacctgacaggcgcctttaactgcacatcgatttttgtccgttacatggcagcgcagaaatatggacgcattattaacatcgcctcgattgccggtatttggggcgcggcgggtggtgcggcctatggcgcatcaaaagcgggtctgatttctgccaccgaatcctgggggcgtgaactggggcctcttaatatcagcgtaaccgcgattgctccgggagtctgcaaaactgacatgctggagcagtttgtcaattcaagcccaatggaatcagcagcggaagataagatcgtacgttccattgtacctgtcggacgttggggaacatccgatgatgtggcggaagttgtcggatttctggcgagttgtaaaaccaattatctcaatactgcggtgatccctctggatggcggaatgcgcgtcggcaccatatgaaacctgtttaacccattaacgtagataacgtagaggatgaacatgctcaacaatactcaaaaggatatcaaaaacattctggtgactggtgcaacgggtgttatgggaggaagagttttacttgaaattctgatgacaactgatgcgaatgtgtattgcctgacaagagctgaaaataatcagcaggcactgatgcgtctggaagattttttatttacctacgatccggaaaaacgcagccgcgacagtttacatcgcattattcctgtattgggtgatattaccgaaacaaatcttgggctgacagaacccttttactctgaactggccggtaaaattgacagggtgatccattgtgctgcctggacaaatctggtggcatcttatagccgccttgctgccgtcaacgtgacaggaacaggccatgtcattgaattttgtctgcggggtgatatccccatgctctatacctccagtttcagtatcgtgggggaaaacctgtaccgtgatggctttgtcatgcatgaaacggatctggatgtggggcagagattcgatgacatggactatgagcgtacgaaatttgaagcagaacaggccgttcaccgtgcgggggaaaaaggactcaggtgggttattgtgcgtccgggtaacatgctggggcgatagtgccaatggcaattacccactgagaaataccagagtcaaaggtctttattatgaaatgatcagggcgctggtcgaaaccgggctgacttttagtgcaacggacgatttcgatattacccccgttgattacatcgcgcaggcatcattgtatgccattttgaatatcgataaatttaacggcaaaacccttcatctgacgacgcccaatccaatcacatacaacgatattgtcgctttcctgcgggaattcggttaccgcattgaaaccatcaaaaatgaagtttacatggaagcattggcacaaagctgcctgtatctcaatgggcaaccttatcgttcagtttttactgatttgctggcgctggttcatggtggtggagaaatgaatgaaacggccaaatatgccaccgagataacgacagatttactcagtggcagcggtattcaatgcccgccatcagataaaaaactgctttcctgttatgtgaactacctgattgaaaataactttattccatcacctcaacagcagggtgaacaggccgaaatccgctcattgtcagcgggcagcggttatatggaaaatttgtttgatgcggatttgtaataaaaaaatacggactaaaacggggtttacaatgattgaacaagatctctgtgtgacattaattcaaaccgatttgttttgggaagatgcagaaaaaaaccgggaacacatagaaggctacattacgcaactggttgagagtgatctcatcgttttgccggagatgttcacgaccggattcagtatgaagccgcaggctatcgcagaaacgatggatggccccagtattctgtggatgaaaaaactggctgctgagaaaaactgtgcgattgtcggcagtatgatcatcactgaaaaccagcaattctataaccgtctgttatgggtcaatgcagatggttctattgcctattatgacaaaaaacatctcttcactttcgctcacgaagatcacgaatataccgcaggaaataccccactgatcgtagagtacagagggtggaaaatcgccacgtttatctgttatgacctgcgcttcccggtatggtcacgcaatactaatgaacaatatgatgccgcactctatatcgccagttggccagccagacgctctctgcactggcgtaccctgttgcaggcacgggcaattgaaaaccagagctatgtcatcggcgttaaccgtgtagggcaggacggaaaccagctcgattatacgggggattccatgctggttgatccgttaggtgaaatcctgctgcacgaaaaagaaaccgaggcagtaaaaaccatgaccatctctcttgaccatgttcgggagaccagagaacgctttcctttcctgaaagatgctgatccttttgcttttccaccgtcgttttaatagaagcgctttaaaagaagcgtcttaaaaagatcatgtgaaaaggatcgttgtaaggcacgtttcagggctgtctggttacacaactgttttaattcaaagcgaatgtttttaattgaaggaagatggctaatggtgatttcaaccgagtttgagcaaattgctgcacgtttcccggaaaatatcgcggtgacacagggaaatgaaagtctgacctatcgtatgctgtcagagcacgtaactagactcagccaaccgttgcatgatcaggctggcagtcagttcgtcatgacattgatggaagagagtatttcgctgataaccgcagcattagccattatgaaagcaggcaaagtgtttgtgccattatcgccaaaactgccggaacaacgtcttgctacattactggcccaatttcgtggcgcaacgattgtgacttgtcgtcagtggttgccactgctggaacatttgtccgaaggttattctctggtgttggctgatgaagtgctggctgatgacattcaggaacaacattcaattattccgcctgtcagagtagctgaaaacgcattgcctacccggattcataacagtgacactcagcatcacaggctggcgtatgtctattttacctctggctcgaccgggcagcccaaagccatcttagggcgtgaagacagcctgctgcattttattcattgggaaagtcgtgagctgggtgtgacgcttgctgataaagtcagccaattgatcaatcagatgttcgatcctttcctgcgggacatgctgttgccattgttaaatggtgcaaccctgtgtattcctactgtccatgatatccgttattcaccgcaggaattgcttggctggatgcgtgaacagcaaatcagcattacacatctcattccttccctgtttcaggttttactggaatgcccacaatcttctcatgacctccagtctctacgctatgcggtgttgtcaggagaaatgttgaaaggttcgctggtggatctgttttatcagtgccggttaccgcaggctcaattaatcaatctgtatggaacaacggaaaccacactggcacgagtctgttatcgggttacagagaaagacagacagcggtcactgatccctgccggtaagcccatcgatgatactgttatcactgtagtaaatgagaggggagaaagtgttccggcaggtatggaaggggagatctggatcagtacgccctatatgagtgccggttatttgtcatcgggagctgaaaatcacgcacgttttatcacaccggaaaatggggaactggccggtcagccggtttaccgaaccggtgatctgggacgcattgatgaacaggggaatttacttctgcttgggcgaaatgattttcagattaaaatcaacgggcagcgccttgaaacagcagaaattgagagcctgcttgaacagcatcctgcggtacaacaggccattgtgcaggcatttgagcaaccgcagggcatcaggctagtggcctttgtccgtccggttcctgagataaccgtgacagctttag

SEQ ID NO: 131 - DNA, 11173 bp, Xenorhabdus sp.
  CDS (2)..(2014)
tagtaagggcatcacagcccccgatccgctggcacagcaacagctgctggaacagtgttgtgcaaatgctgatgtgaaggcgagtgatatcggttatttcgaaactcacggtacgggcactcatctgggcgatcctatcgaaatggcgggtattcatgcctgttttcacgttcaaaaagcgcagactccctgctatttaggtgctatcaaagctaatatcgggcaccttgaggctgcggcgggtattgccggattaatcaaactgttgctgattgataaacacagaatagcgccgccagtggcaggattcagcgagctgaatccacggatcacgctgaccgaaggacaacttgcgatcccgactagcgcccaaccgcttgcccccgaaaaaacgtgtctggccgtcagtgcatttggcatgggaggaacaggggcacatgtggtgatcaaaagccaccataaaagtcaaaaaaggcttgttgagacagagccagaaaaccagacgttgccttgcgtgctgagcggatacgatcaggcacatctgaaggcgtttgcctgccgattattggtggatgtgcagcaacatattaaacaaaagcaatttgtgcttagagatttttgccagacactggctcaacggacggtattgccggttgtttgtactctgggggttaatagtgctgagcaattggttgagcagctatccgcagtatccagaggcgaaataataggttatagcgccagtgaacatggcccatcaattgctgataccacaactgataaaacaacgatggcattagtttttgccggacagggaacgcaatcggtagcaatggcggctcagttgtatcgtcataatgtgcaatttgcccagtggattgatcagattgatcaattatgttcggagatagcacatgaaagtgggcaactcaaggtggaggtcagacaacttctgattgagcaggtagacgagcagataatcaaccgcactgagtttgctcaggttattttgtttgctttcgaatatgcgctctatcagtgtctgcgtcctgccatcggacgcattgatattctgcttggtcacagtcttggtgaatatgtggcggcctgtatcgccaatgtattttccctgaaagaagggctgaggatcatcatcaaacgcgctcaattaatggaagccagcgatccccgtggtgcaatgatgatggtgaatggttcggcggagcaagtcagtgagctgatagaacacgctgagctgactattgccgcagaaaacagcgaaaccaacactattatcagtggcacacgtgatgcgctggagcgtttccggcaaaaactggaacagcatgagcttcatgcccggtttatcaatactaaccgggcatttcattctccgatgatggggaaggcagctcaggaatttggggcgttcctcactgatattccgcttaaagtggcagaagtgccgattttgtcgaatctgacaggacaaccggaaacagcgtgtttcgctacagtcgaatactggcagcagcacatgttaggccgtgtctttttccggcgtaatctggagaatttagtggcgatggctgggctgaagatcattgagattgggcctaaaagtatgctcagcgtatggttgtcggagaaacaaccgcaacactttgcctccgcttatagcccttctcagaacagccagcaactcaattattgcgatttattggcggtattagccagcgactgtttatccggctcaccgagagaatggctgacaatgtattccccgttcacatttaatcccgccttattgccggccagaaaactactgacagaaacgtgttggtttacggaatacaccgccacgttagcgaatggcgtaagacaacagaaacagcctgaagaatatgagcagggcaatctgaacgatcatgaacctttcttcatcatgcagcagcaaattgactgtatgaacgccattttccaagcccaattagaacttatgaagggaaagtaacgtaatgacgcaactgccaaatgaactaaaacacgctctgcaaaattggctacagtcggaattagcgagtgagcatgtacctaccaatactgactttttggcgctgggtattgaatctctcacgttgattaggtttaaaaacaatattaaatcccaatatggcgtggatatcagcatcgggaaattttttaaaggattgtcgaatatcgataaagttgccagtttcatcagtgagcaggctcagcctgccgtggctggcagtgttaatcatgaaccgaatgtgccgctaactgcgccagagatgccaacaccgcagcaatcactggtagagccacaggcagccgacaataggcagcctgagccgatagttaacgaatctatggttaatcaatctgtagttaaccaatcagtggttaaccagtctacagttaacacacctgtcgttaatgtgccgatgactcctgtccgtgaaaccaaactcgatattgagactaaacagggcattatggtggctcagttaaatgctatgcagcaactgtttcagcaacagctggcggtattgcagaatatcaggggaggaaccacgaattttatcacggcgaatcaaccgtcagtatcagcattagccccggtattatctacagccccaatagcaccaccagcaccaataacatcaacggtgcctacagcatcaaataccgctccattgaccagcactcaatcaggcaaacaatctgttgagatccccgatcatcacactgagcagcctcagcctgaggtggcaaagccagcagcttcatcaggtgaaaaagccaaatttacctataaaccagttgtgctttcagagcctgtgcaatgtgatgcggaaacaacagcgtttattcagcaatacaatgcgaaaacaattgcgtcaaaaaacactatccagaaatatcggacagcgctttgtgataaccgcaatgcgatccaattcaacagcaaactgaaagaactgtgttacccgattgtggggaaaacggcaaaaggggcgcattttactgatctggacggtaatgtttttatcgatatcgcgatgggatttggcgtcaacttttttgggcataaccccgattttatccaacaggcgttgcaaaagcgtctccagcacggttttcatcttggccctgttgatgagtctgcgatggttgttgcggatctcattaccgaaatcaccggcgttgaacgtgtcgctttcaccaattcagggactgaggcgattatgcttgcctgccgtgtggcgagagctgccagcgggaaacaaaaagttgtcatcttcaataatgcctatcacggccattatacggaaatcctctttatgggcggcataaagcccggagagcagttcccacaatccagcggtattcctgataatctgggacgggatattgtggtgcttaattatggtgaacagcaaagtctggattacattacagcccacgggcatgaaatcgccatggttatggttgaaccggttcaatcacgcaatatcactttacgaccagaatcgtttattcagacgttacggaaaatcaccgcacagcagaatatcgtcttgttatttgacgaaattattacaggattccgttatcacgccagaggcgcccaacattactatcaggttaaggcagatttggtgacttatggcaaagtcatcggtggcggcctgcctgttggtgtgctggccggagatgctgtagtcatggattatattgatggtggtttctggcaatttggtgatgcttcttacccgcctaatgagaccactttctttgccggaacattctgtaaacaccctctgtcaatggcagccgcagaagcaacgctgttacatatgaaagcacaagggccatcattacaagctgatttgaacgacagaacaacagggtttgttaaacggcttaatggtttatttaccgcggcaaatagcgggatagaagttgcgaattttggatcacttttcaaattcagccagaagaaaaaccatgaactgtttttccatcaattactgatgaatggggtttatacgtgggaagggcgcacttgtttcctctcgacggctcatgacgataatgttctggaggcgtgtttcaatgccttcgaaaaaacggttgaaggaattaccactgcttctcgctcttcttctgctcgtccgcaggataaaccgattgcgccgaaaatgcaggaaacaacggttttggctgaacccagaatgcagaaaaatctggcgatggcgagttggtacgatccggcagcctcaaaatcttacaatgaattcattcagtgtgtgattaccgatgaattgcagcctcatcgtttgaacagcaccattgagtatctattcaatcgtcaccagcagctacaacaggttttttgccctgaaacgtttaaaaccataacgggacaatttgactatcatgctgccatgcgtgttgaacagtcccccttcgattcacctgagcagttttctcagtggcaacaagcctgtatggatgaagaatttatactcgatcgcgggccgatgttcagagtacatgtagcgcaggttgatctatcaaaaccattatggaatggaacttctttagcgcaatacgcatcagatcattgccgggtggatatcatctgtttggttgcccatcatacggttgttgatggtgtctctttggatatcttcatcaatgaattagttgctgtttatcatggggccagtgatttgccacctgctgcgcaatatcaggattatctggggcggctggcagccttcaaaaacacaccagattttattcatcagaaatcattctggcataaatatctatctggctggcagaaggatttggctaatttacccgttacagtccctgtcgaactcactgaagaaggtgatgtgctggctacggggggctttcatctggagaaattaccggctgaactgacggccaagctgttgcattacgccactcaacatcgcgtaacaccttacatactgatgtataccgcctactccatttttctgggttcggtacttaaacaatcccagttcgttatggcgacatcggtggccgggcgtaattttgataacttcgataatttgatcgggttaacgaccgcgatgttgcctgtccggattaataccagcaatgaacagcagcttttcagtgagtatcttgacctgacctgtgagcaattgttggaggttctttcccatcaggatgtgaccgttgatgatctgacagtgcaaagtaacagcctgagcaaccgttcagaaatgctgacccgttatctcaattacgatttcaatttcagcccccgtaaactgaggcttaatgatagtggtagctggtcggtattactggacaatcctaaacgtttcattgtggggcaattgtctctggatgtgttccagagcgaaaatgacctgtatctgcactgggagtatgcggcacaggcctacagcaaggtacaagttaaaatgctgtccggtcaaatggcgcaattattggactatctggtgagtgcaccagaacagaatgcactgactctggctgatattactgcttatctaaaatcactggatgcgccttcgattgccataggaacagtgcggaaggattttctgtatcaggctccgatccatgccttgtttgagcaacgtgcttgcgatgaaccacaggcgtgtgcattagttgatacccgttcgccagaaggggtgaagccactttcatttgctgagctgaaccgtcaggcaaatgcgttggctcatcatttgttacaccaaggattacagccagaagaacctgtttttgtcagggtgcgtcgtggtattcctttggcaatctccgtgttagccatactgaaagcagggggcgtatatgttcctgtcgataaaaaattaccagtgactcaggtcgaatatctgctctcaatactgactccgcgatttgcctttatcgatgaagattatgacaccttcagcaccctctctcatgtgcaatatttcaatttttacgatgaagagacgctgttacgtcaatgtggcgtggatgaaattggagtgagtgagggagattcggcgttactgaaaaatcccgaaaaagtgattccagcaggccagacggcttacattacctgtacttcaggcagtactcagaaacccaattgtgtgatgaactctcatggagccattgcccaccactgtttgatgatgaaggaatatctggcgattggtcccgaagatcggatgcttcaatttaccgatttattctgggatattgttctggaagaacttttccctgtctggagcgctggtggtcgggttgtctttatgggtgatacaccgccaagcactttctctgattttaatcaattgctgattgagcaacagattacgctggctgatttaccgtcgacctactggcaaggctgggtggaaagtttagacgatccggcgatggagtatccctctcacttacgacgtattttagtcgggacggaaaaagttgatccacagacactgaaaaaatggcagcagcacgttccgaaaggcggaattttctccaatgcttatgctcagactgagacaaccatcaccgcgacggattcggtaatcactgctgatacatgggtcggtgaaacagttccgctgggcaagccattagcgaatactggtttttatgtgctggatgaagccgggcagccagtgccccgtggcgaacccggtgaattgtatattggcggcccgctggtatccaaagggtattacggtaataacaccctgaccgctgccaaatatgtggctgatccgtatattccgcgcgaagcctgcaatcatgcctcgccgcgcatgtataaaaccggtgatttggtcagcatggatgagcagggatgcctgtcattcctcggtcgtaccgatttccaaattaaggtacgtggctatcgcattgagccgactcagctggaaagtattatcggccagtgggatggtgttgagcaggttgtactgacaacaaacagtgtcattgatccacgtattccgccggcggaaacaaaattactctgttatgtgaaaactcaggcggataaagcggaacaaaaagtgctcagtgagcggatacgccagtatatccgtggtaattttgctcattatatgcagccacatgccattatttatctggctgacttccctaaaaccaccaatggcaaagtatcgataaaaagatttcctttgcaacctgacctattcccaaataacgcgttacaacacagttcattacagatgcatgttgccgaacgtgtcacgcaagcgccatccccggtggatcttagcagcacagcgggtcgtttgctgatgactcatcttggacagcatggtttgaatatgaatgaaagctttgttgcgttgggcggagattcgttaattgcgatcaaaatcctgtccgccttgcaaaaagagtatggcatgacgctgagactaccggagtttatggcctgtgaaaccttggctgatctgattgggtggattgaatcaatgctggctgagagcagggttacaaccggatctcaggcatccttaccgaataatcatgcagaaatggccgggcaaaaagtaaaacccgtattacaggcccgtagccgaaaaaagaaggtaatggttgaatgaaggggatcaatggtttttatccgctgtggattggcattgcggtgtcgatttttggcagtgagctgaccgaatttgcattcgggctgtggttgctggaaaagcaaatgtcagtcactgcctacacaaatatgtatctggtattagtgcttccggcctttttactgatgccgttagtcggttatgtgattgatcattatgataaacgtaaggtgttattgttcacagagggcattgcgggattagctttggcgattgtgcttatcttcaatcactttggctatctcaataacatcgtggtttatctctatatcgcattgaccagtgtgttgacggcgttacaaattgattgttacagcacgctggttttccggctggtaccggctgcttcactgaatcgggcgaattcattgggcagcctcagcgattcattaccacaaatgcttgccccgatcatcggggcgtttctgttctctcattatggtttggggattgtgctgacgctcgatctgatgactttcatgatcagtgcctttgctgccggattattgttcagggtcagcgccgtgcagtttctgccacatgatgatggcacgctctctaagctgaactggaaagctatttttcctgatatcgggtgtgtccggttggtcagggcatcgccggaaatgacttatatgattgcgtacaccttttttaaagccattctggtcgggggaacgctaatcactattgtgccttatttcaccacttatttttctgtcgcagatgccggttacatgatgtctatcggtggtgtctccatggtgatcgtcagccttatctcagcatggcggccttctatattaaaacgtatgccgctattcactctggagttcctgttcgcggcgggttttgtggtattgacccagataaagaatatttatgtcgctggcatatgtattgcgcttagctttatcacgatgcggataagcatcattaaaatgcaaacgttatggcaaacaatagtgccgaaaatatatcacggccgagtcttcgcactgcgtaatctggttaagacattcagtagtttcattatttatctcatcaccggaattgtattggatctcttactggctcaagagggtggatgggcgatttgggggcagggtaatcctatggatctttactttattgggattaccttactgatattacctcccttgcttatctcgacacgcaggctgttagtcgctatagggggagaataatatgctcagaataggcattatcggtacgggggcggttgcgtgttacttagcccatcaatgtaaacaacaagggtaccaggtttttttattgtcttcacgcggtacaagacatcaggcacatccgatcagccaaatacagctgttcgatgagacaaaaccagaatacgccgcgagtgtggatctcggtagcattactattgatggacatcttaccgactacagtgattttttggctaaagagtttgatcaactgtatgtgtgcagtaaaaccgtttccaacctgcatatttgtcagcaattgtcccgccataaacactgtcttaaaggcccggtgattttatttcagaatgggtttgccaccgaacggccattcattgatgaggctctggatgtcacgattatccgaggggtgctcaatttctcagtgactcagcacgggaaacaaaaactgaaattgaggttcctgaaaaccagctatcttggtgtccctgggcagatcaaaaaaatcaaagaacggtcagaaacggacattttagcggcgttggatttactcaaccgcgtgggcattcccttcgaaggctgtacagatatagagcataaagcatttgctaaaaataccctgaatgccgcggcttccgtgtgtgggttagtccgttccggcgtagaaaccgcgatgcgcaacagcagttcccgaaccgtgatacaggcgattgttgatgaatgtacggctattggtgagaaagccggatacgtcagagatagtgaaaattttcgtcgtcagtccatgggatatttgatgtcgattcctgattttaaatcctccttggtgctggatgtacttcatggcaaagaaacagaagctgaaaccctgctcgcttcttttatcaatctcagccaacgaatgggtcttgcggtgcctaatctggatttcgtttatcgttatttcgatttttacaatacctatgtaacccaatcttatacattcacagatatgactctggttaaaggagatgcgtaatgagcggaacaacagtaagctcgcttgatggtggtgaaggcgttctgaataacgtattttctccttatgctgattattttatcgacatgcttagtcagcgtaattcttttattgcaacgcaacccgttgggatctatgaaagccagattaaacattatatttgtccggattatttcaagaatgaacagcaagaattgtggaaaaaaatccctcagtttataacccctattcagtcactggaaaatatcggcgattttattacggtagattaccaaggccgtgttcctatgattgtgagcaaagtagacagtgatcgctgtgctgtatttgaaaatgtgtgcccacatcggggagcaaggctggaaaaccagacggaaggatgcaaaaaagcttttgtttgcccttatcatagctggtcattcagccatcaggggcacttaattgctgcgcgctggcgggatgccttccccgaaataccagaccaataccgttcactgaattcaattaatgcccgacaaagattcggtatgttgtggcaaatgccgagcgatcctaaacctgatttttcgctggataactggtttgctgccattgaagatcaaatgacagccatcggttttgaacagcatcaactgctgaattcccgcgaaagaatggtgcaggctaactggaaattactgatcgaaaattttatcgaatactatcacgttcagtctttgcaccggaacagtctggcacccacattgaatggtcaattgtactcgctggattcttttgcccagcatggccgtatcctgactccgctgaaaaatctggcacaggttcgccagcaaactcctcataagatacgccgggaaatggttgcgacttatttactgttccctaacgtgattatcggggtgcagccttatcatgtttttgtctctttttaccatcccgtatcggctaatcaaacgtggtcgaagaccttcaactttatccataacgcagatgaagagattaaggaagtatgccagctggatgtggagtatttggcggaagcgttggaagaggattacgaggccatcgaacaagtacagaagaatctggaagtatccagtgctccgagcctgttatatggtgaggctgagtctctcatcagccagttgcaccgcaacttagcggcgattttacatccaaatggcaggaaggaaagtcaggca

SEQ ID NO: 132 - DNA, 25590 bp, Xenorhabdus sp.
  CDS (11084)..(14323)
  unsure (1)..(25590): unsure at all n locations
ctaattctgggagagttcaatttccctacaagggatgagcaaactttcgctccaatctacacttatgaaggactgggacatactgtcatcgcttacggactgtggaatctctataacaatgcgtggctgagtggtgatctccactattcacatataaattacgatagcctgatccgtaatattgagcttggtgaagctacccgtagagaaattggttcaacattgggtaaacaatggggtgtccgcattactgccaactggaatattcctgttaatgaagtcatcactaccagcccgattgtgcagtttatctgggataaaggtgatgttaacggttatcgtgaacacgaaaataacagtacatccatgcacttttctggtcagagatatacgtctgaaattggtacactgggctggcgtgtagacactcagttaggtcgctttaatccttatgctgctgttcagtttaatcgccagttcggggatctcagcactaaaatacgcagtgctattaatgccaccaaaacttcctttgtagtggaaagtagtaaacggagcaaaaactggcggcaatatacccttgggatgaatatgggactggtcaataacctacatagttttattactgtaacccgtaatgaaggtagcggtgaggagcctgattataatttcagtctgggaattaatgcaatattctaagatttattacctttcaagttgcagcgttatcagctgcaacttgaaatacgtgaataattcagctaacaaaatattcgttttatattgtgggcaatgctaataatagcgttatatcaaaatataaatatatcttaataaaattacgaatgcttatgttgttttttgcgacgatagcgctcatcataatttttcaaccaccaatacttatccgtaatatgctcccgtcctccaagactagcgccacccaaccaaataagtgcaccgacaaataatcctaccagtgcaactcccgcaaaaaattcagattccttaatactaaatatatgactgagcaagacataggccagactaataagcatccccgccatacctaatcccataaaaatattgcccagaataaacgcttttttacgtcccatagccaacctccaatactttttgtgaacgtaatttgtttacaaacgaactcaaaagcacgaaagcggatgcctcctacttattatagccatagtattaaaaaggttattgcgccagtgatcacaagctgtacaaattttaacttatttttaatactgacatcctattacctaatatcataatcaattttgtactcaagctctgaggcaggtaaactaggcctctttttttaatacattaatgccaataagcgaaaccaaactgtgagtaacataaaattaatcgttggtctggcaaaccccggggctgaatatgctcagacccgtcataatgcaggagcatggtttgtcgatttattagcacagcgccataaccagtccttaaaagaagaaagtaaatttttcggttataccgctcgcattaatatgaacgggcaagatgtccgcctactggtgccaacgacattcatgaacctcagtggtaaggctgttcttgccctggccgggttttaccgtatccagccggatgaaattctggttgcacatgatgagcttgatctcccgccgggtgtggcaaaaatgaagctgggcggcagtaatggcgggcataatggactgaaagatatccagaacaaatttggtaataatcctaatttccatcgtctgagaattggtatcggccatccgggtgataaaaacaaagttgtaggatttgtacttggcaagccaccggtcggtgaacaaaagctgattgatgatgctatcgctgaagcattaagctgtactgatattattatgaaagatggcatgagcaaagccattaaccgcctgcacgcatttaaagccagtgcctgacgggagtacatggcacgtgatgctattgcgtgtataatggcgccaattttatataactcaccgacaggttatgccctatggcttttcagccagacaaagagcatcttcattgttggtgtataagtaatcaaaggtgataaatttatgggattcaaatgcggtatcgttggcctgcctaacgtcgggaaatctacattattcaatgcgctgaccaaagcaggtatcgaagcagcaaacttccctttctgcactatcgagccaaataccggtgttgttccgatgccggatccacgcctcgacaagctggctgaaattgttaaaccacagcgcattctgccaaccacaatggaatttgtggatattgccggtctggtaaaaggcgcgtcaaaaggcgaaggtctcggtaaccagttcctgaccaacattcgtgaaactgaagcaattggtcacgttgtacgttgcttcgacaatgacaatatcattcacgtttccggtcaggttgatccggctgctgatattgacgttatcaatactgaactggccctgtcagatctggaaacctgtgagcgtgctatccagcgcgtccagaaaaaagccaaagggggcgataaagacgctaaaactgaattagccgcgctggaaaaatgtctcccgcatcttgagcaggcaggcatgttgcgtgctttagatctgagtgcagaagagaaagccgctattcgttacctgagcttcctgaccctgaaaccaacaatgtacattgctaacgtcaatgaagatggttttgaaaataacccacatcttgacaccgtgcgtgctattgctgcaaaagaaggctctgtggttgttcctgtttgcgcagcaattgaagcggatatcgcagaactggaagatgaagaccgtgaagaattcatggctgaaatggggctggaagaaccgggcctgaaccgtgttattcgcgccgggtacgaactgctgaatctgcaaacctatttcaccgcgggtgtgaaagaagtccgcgcttggacaattccggtaggcgcaaccgcaccacaagcagcgggtaaaatccatactgattttgaaaaaggatttatccgtgcccagactatctcatttgaagatttcatcacctataaaggtgaacaaggtgcaaaagaagcgggtaaaatgcgtgcggaaggaaaagagtatatcgttaaagatggcgatgtcatgaatttcctgtttaacgtgtaactatccccttccctccttccacttcagtggaacaactcgtaactgacgagttttaatataaaggcggcgttgatatcataaacagattcagcgccgcactaaaaaatattaccaaaaccctctttttactactagccaaatatttaaccctcatatacatttcgtcttgcaagttattttttttcgccgcttaccattttataaaaatactctgaataatgaagtcacatttaccaaaggtggagttactgcaatgaaattccagcctgatatgaataacgatacattggtcaatggtgactcagtacttatcccgatcccgtattccgccgcaactaatattcgctggaacggttaagggatgggcaaaagccttgcttcaagtacttgtgtccatcaacaaatcgaggaattgcaaaaagagcttggtgaattaaatatatgtagttttagtagcgataattggagccctgactggaaatatacagatgcttatcaattacgcaaattaaaaacagcatacttaggtttagttgataggattggtaatatatttaactaatactctggcaacacgattaatttattccggaaggaactctttccttccagcttttcccttatctatcttatattcaatagttcccgcattaagcccaggaaacctcattaatggtttaagtaacattcatgttaactatattacagtaagataatatcaaatccgccaatctacagacattacctgataaatggcagctctcagttacattcaggaacatttcaatcaaataaaacatgaagattaaccataaatgactgctatgaataagttatttaggcaagaagcattagataataaaaaatccagatggacgggtaaggcaatattaatagcaaaagttcccgcatgggttatttgtgttgcttcaatcgtttttctgactattttatttatttttattacttttggaaattatgcaagacgtattaatgtttatggcgaagtcatcactaatcctcatccaataaatatttcagcctctcaacaaggctttatcttaaaatcatttgttaaagtcggagatatcgtaaaaaaaggccagaaaatttatcaggttgatatcagccaagtgacagaatccggtaaaaccagcaccaacgcacaaaactccctcaaaaaccagctaacacaaataaacaaaatcattgaaaacctcgaacataataaaagcgttactttagccagccttgaggaacaaaaaaatcagtatgagctatcgcatgaaaagaataggattattgtagaaaacgcacgtcaaggcgttgaatttgcaaaagaaaatatgaagaactataaagtctaccaggaacgggggcttattacaaaagatcggtttaatagctacggttattcttattaccagcaacaaaatatgtatcaaaacctctatagccaatacatcagcgattcattaaaaatcaccagtctgaatagtgacatcatgctgcaaaaagccgattttgataaacagatttcacaatataaaatccaaaaggatgatttagaacaaaaattaactgaaatgaatgtcagcggatcgatatttattacctctcctattgatgggcggattgaatccctgaattttaccgatggtcaaatggttgtcacaaatgataatttagttcaggtaagcccagatgatgtgaaaccaacttattatttaattttgtgggttcctaatagcagcttaccttatatcaaaaaaggcgatggcattaatatacgctacgatgctttcccatttgaaaagtttggccaattttcaggggacatcaataacatttcttatattcctgctactgctcaagaaatgtctcactacagaagctcaccagtaaatgtccccggagataaaaccgaatcatattataaggttctggttaacctgaagaaagaacagttcaattataacggaagaaaattatatttatccaacggaatgaaagctcagtcgacctttttccttgaaaatagaccgctttatcagtggatgttctcaccattttatgacatgaaaaaaacattatcaggccctcaaaaatgaataaaacctcttttgaaactatcaccgaaagattaaatctaggattcagaagaagagttcttaaaattttgcaaactgaagcggccgaatgtggattagccagtttagcaatgatatttcattatcatgggctacaaattgatttatccagtctacgcagccaattcgggatttccacccgaggcgtaacgctgacgacactgatcaatattgccactgtccttaagttcaaaaccagagctgtagcactggatcttgatgagcttcaagcactaaaaacaccctgtattttgcattgggacatgaatcattttgtcgttctggttaatgtaaaaaaaaataaaatcactatccatgatcctgcattcgggcaacgtgtgatgacttttgcggaagtatccaaacactttactggcattgcattagaagtgtggccaggcagtgaatttgttccgataaaaaaacaaaataaattacgcattatctccctgctgaccaatattcagggaattaaatcgacactgagtaaaatatttttcttatctctggttatagaagcaattaatatactcttgccggtcggaactcaattaatcatggaccatgtcattatcgctcaggatcatagccttctgaagattatttgctgtggtttactctttttcatcttatttagagtcagtgtatccacattacgtagctggacatccattactatggaagcatttgtggatgtacaatggaaatccggtgtatttgatcatttaatgaaattacctttagcatactttgaaaaacgtaaattaggtgatattcagtcccgctttggctcactcagtgtaatacggacaactttcactcaaaatgttattaacagcattattgatactattatgctggttagtgttttcattatgatgctgctttatggtaactggctcgtttgggttgtattagggtttactatcatttatatcatcataagatttataacctaccaatatttcaggcagctctctgaggagcaaatagttaaagatgccagagccaattctcattttatggaaacattgtatagcattaatacattaaaggccctggggttatgtgatagccgggcaaaatcctggttaaacctgaatattgatacacttaattcaaataccagacttaacaagataggctccatttttaatattattaagacttttatttccacgagtgagcaaattatcattttgtggttaggagcatcattagttatagataatcatatgacacttgggatgtttgtagcgtttaattcatatcgtgggcaatttgctgacagagcaagtaatttaattgatatggcaatgaaattacgcatgttaaacttacataatgaaagaattgccgatatcgtacttactgatacagaaaaagaaacgccagatagggaacttggtttttcaggaaaagcggttaatttaaccatccatgatttacattatcaatatgataatttatcaaagccgattatttctggttttaatctccatattaatgcaggagaaagtatcgccattgttggaccgtccggggccggaaaaacgacattaatgaagctcatgagtggtttattagagccaaataagggtacaattctaatgaatgggcttgatattaatattattggtttaaataactaccgaaaatgtattgcctgtgttttacaggatgataaattactttccggttctatcgcagaaaatatatccgggtttacccactcaccagatgtacacttcattcaggaatgcgctaaacgtgcaaatattcatgatgatattttattgatgccaatgggatatgaaacactgattggtgagttaggtaatggattatcaggtggtcaaatacaacggctattgattgcaagagcgctgtatcgtcgcccaagcatcctatttatggatgaggcaaccagccatctggatttagataatgagtcatatattaatgagtcagtatcttcattaaaaattacccgaattatcattgcgcacaggccctcaactattcaatcagcagagcgtgttatttctatctctggctctggggctccctaataaccccatctgccagaattgataatatcccagagtaatctctggtgagaaaaggttttttactctatagagaataatttgtggtctataaaaaatcacccactctaataaaatagaatgggtgactcttgccatatgaactatcaattaaatagcatcaataattgagtctacgaattctacaccttttttcatagctcccttaatatgctctcccgtctctttagaaataacaccaaatttttccaaggcgtctattatgccttcacctattttttcacccataccaaaaaccccttcagcgatctctttcccgccagcaccggtgacttgctccatttctttttgatttaactctttcatatattacctcattataattaggatacttacttcaacgattaaaacattattagccttaaaaaccacaatgtagaattaatactcttattcatagtttcatctctgctacgtcattaccatatatcactcaacattaactttcattaaaccgttttgctattaatatagcaattatcacattcttaactatagtaaatagactccatgctttactcataaaaatatataattaaaaataagaaccattatattgttaaagttaatattgaatttattatttatttccaatgattatctaatcataaactttaattgtaacttattacatcgaaaatttattgtgatcttcatccattaaaacattagaaattttaatttaactcaaaaatataaacagagtatatacttaatgaatttcataaagcagcacaataataaaaaaaccacgccacctctcagaggatcttggtttgtttgaataacataaaaaaccaggccctctaatcaaatagagagactggttcagatataacatgcactcgaatttaaaaataagacttattatcttttatagcaaaaatacaacttagaaatcacaggatatgaaaaatgactccttctaaaacatcttattttccttttatttcttatgtatgattacctaacaccatttattactatcacgtaccttaccagttacattatgcagttaacactctagagaattactatttccttgttcaaaataaaaataaatcatcaactattgatttttattaaccaaactagaatcactctcaatattccatcaatcattcccacctacgtttctctgatacattatattcatattatgagtgatgttattgtgtaactaagcgtgactatttatccatgttcttattaatcattcttactaacaagatccaacagcctccaccattggaataacttctatctattaagaaaaaagaccacctctaataattaaggaaaaacccgttatatgtgaactgtgaaatttatcacggtttaactttattcatattttcattcataaatcttccttgaattttcaccagaaaaaaataaccattacgggtctcattggctggtgtatattttttatattacctataacctcctataatggtttagtttatgactctaattgtttatctttatcgccaatcttggatattgctgcttctatcaacaatatttgcattgatcagtggattttccggggcgtcagtagtcggtatgattagccagggaattacaggaacggttaatctgacttcatttatctggaacttttttggtctctgtattcttttttttgttacgaaaacactatcagaaattatgttgtcacatttgactcaggcaaccatttattccctgcgtctaagcctgagtaataaaatattacgggcaccttttaaaaaattgaaccgctttgggaaacatgggttgctggccgttctgactaaagatgttgatgtgtttatccactcttttatgctagctccaactgtttttggtaatatcacacttatcattgcctgtttcggttatttagcctggatttcatggcagctatttatcattttggctattgtctgtctggtaaccgcttctctcttctattttttggaaaaacgtcctatacgcctgatggaagaaatgcgtgagcaggtagataagatctacctcaactttcagcaactgatcgatggcagcaaagaactgaaactcaatagacaaaaaggtaatgcgtttattgacaaagttatttcccctgctgcactaaaatttaaagagatctgtatcaaggcaaacaataactatgcctgggtactgaatgctggctctgtgatcttctacattgttatcggtctgatgatttttgttattcctatctggctgcctcaggaaccggcaactttaatgacggtaactctgattgttctgtttttgtctggccctatcagtgaggttatcggtgcaattcctgaattaaggcaagcggaagtctcactacaaaaaatgaagcggctggatagcgagcttgaagaatctttgtatatacagcaggctaacaccccggacccatttttaaccgaaaaaccattatctcttgagttaaaagatattattcaccactacaccactgacaaagaagatcgggaatttaaactaggccctatgagcatgactatttctcagggtgaaatagtttttattatcggaggtaacgggagtggaaagacaacacttgccatgctattagtcggtttgttcgaacaagaatccggctctatcatactgaatggcaccaaaatggatgaaacaaataatgaacattatcgccagtatttttcggccgttttctccaattatcatctattcgaccaactactaaataccggcacgaatgttactgaaaaagcaactcactatattgaagctttgaacatgggtcacaaagtcaaagtaattgatgggcaattttcaacgactgatctttccgctggtcagagaaaacgattagctttagttgctgcttatttagaagaccgccctatctatctatttgacgaatgggctgcggatcaagaccctgtatttaaaagaatcttctatactgagttattgcctgagctaaaatcccgtggcaagactgttattgttattagccatgatgatgcatattttgatattgcagagcgtgtgattaaattggaagatggacatattaaggagataaaaaccagtagtcatcatcctagctaaaaatgatccagatcaaaaaaatatttataataaatatatcctcgcccattntaagagcctcattaaaacaggcttttttttttaaattatgtattattatttgaaatgctctttaatattaaaaattaatagcagcaatacgaaagacaccggggctctaataaaattagatatacaataacattgcagtcactctgtaaaataagtttatttaatatataatcctttaccttaaattcaataataaagacaagaaatagtttatataaagatgaaattaattcataactttcctagaaaactccactcatattatcgttattattttttttattgtgtaatactttcgccacattaattttctcattagaaaatatatctctctgaaatttatttagccaatgtctttggctttaattctgttccattttttttgttttatcagttctgaaaattttgtttttccatatgcccataaaaggggagctataaaatgaatcatcctgaaacattgaaaccatttgctttatctgaagcacaaagcagtcgttggtttcaatatcaaattaacccggcccagagggggcagaataatagtgcattttgtgccagagtcagaggattaactgctgagaaattagaagaagcacttaatcatctgataaaacgccaccctatgttacgggctagttttggtcaatatggcggtaaactgggatatcaaatagcagaaaatgcaattgttacaatcaaaaaacatgatgcccgggatctggatgcagaaacgcttcaacagctagtccacaatgactgctggtatcccttcgatctcgaaaatccgctgcgtatttatgttagttggtatcaatgccatgatcaggaatgtgtcatggtattaacctttgaccatattgccgttgatggctggtcctattggatattattggaagaactcggcatacttttaaccggacaggaattacctcctgccgcggaacggagttatcaggattatgttacctggcaacagcagtggcttaatagtaacaatgcaaaaaaacaacagaaattctgggttgataatctcagtggtgagttaaccgaattacaattacccgtcagcagcaaatcaagcgacagtgctccctcctttgtagcaaataaaattacggttgctcgtaaactccccgatacactggccgcaaaattaattgcactgacaccaaaatatcataatagcctgtttgcaatttttctggctgcttatcaactcctgctacatcgctatacaggtcaggatgatattctggtcggctctatcatgcccggtcgtagccgctctctctggggcaaagtcgtcggtgaatttatcaatccggttgccttacgcgcccagatcaagggtgagatgacagtacaggaacatatattacaggctgctaaaagcattcgtcaggcaattgagaatcaaaaatacccgtttgcgaaaatactggagcacattaaattacagcgcaatgcggatacccatccagttttccagacaaccatgactttccagcaacccagatatgtcagtaacctgacatcgttatggatggatcagagtggtaccaccacagtaggctggggaggcgcaaaactccgctctttcccatatccttattatgctgaaatgcctgttccattaatgatcaatctcattgaaatcgatcagcagattaattgcggttttcattacgataccaagctgttcgattctgagtttatcactcagctaatggacaattttttcactttattagcagctatagcagatgatgaccagcaggttattagccatttaccattaatggacgagcaccagcttcagcaggtactcagtgattttaatgcaactaacgtctcctacccgaaagatgctctgatccaccagctattcgagcaacaggctgaccatacaccagaagcgatggcgctggtttatggcgacagtcagctgacttatgatgaattaaatcgccgagccaaccaactggctcattatctgattgggttaggggtgcaacccgatgaccgaattgctatttgtgtagagcgcagcccggaaatgatagtcggattactgggtattctcaaagccggagccgcatatgttccgctcgacccggcctatccggctgaacggctggcctatatgctggaagatgccgctcccgtcgcgctgctcactcagtcctccctgactgaccgactggaaaatgccccgacaatcgtgctgctggatgacagcaattcatcagcctttaacccgatgccggatacgaatcccgatcaccgtacaattgggctgaactcgcaccatcttgcgtatgtgatctacacctccggctccgccggaaaacccaaaggggtcatggtagaacaccacaacgtcatcaacctgcacatcgggttacagttgatgctcgatctcgctccgtcaagtcgcgtagcgctgaatgccagcattgtttttgatgcctcgttgcaaagctggtcgcaattgcttgccggtcatacgctggtcattattccgaacgctatccgtaccgatgggccacagctctggcgttatttcgaacatcataaagtagatatgtttgattgcactcccgtgcagctgcacgggttgttaaacgcgggtttaggcaccagtaccggttatcagcccaaactggcattaatcggcggggaagccattcatcctgccgtatggtcgcgtttacagcagataaaaacgacccgttttatcaatgcctatgggccaacagaatgtactgttcaagccactttctgtccggtggatagctccctgccacttcccagtatcggcaaaccggtggctaatacccgaatctatattcttgaccctaatggccagcccactcctctgggagtcacaggtgaaatttatatcggtggttccggcgtgtcccgcggttacctgaatcgttctgaactgaccgcagagcgctttatcgctgatccttttgtcactgacccaaacgctcgtctgtataaaaccggcgatctgggacgctggctgtcagatggtaatatcgaatatctgggccgtaacgattttcaggtcaagatccgtggattccgcattgaactgggtgaaattgaagcccgtctggctcagtgcgcgggggttcagcaagtcgtcgtcattgcccgtgaatatgatacggcagatacgcggctggttgcttatatcgttcctgactcagacatcacaccaggcatctccgaactgcgggagcagttgagtagtagcctgcccgaacacatggttcccagcgcctttgtcatgctggaggctttcccgctgacagtaagcggaaaactggatcgccatgcactgcctgctccggactactcatcagtcagttctcaggaatatgcagcaccgcaaggggaaaccgaagaacaactggcagatatctggcggacgatactgaaaatagaccgggtcggtcgtcatgacaacttctttgaactcggcgggcactcacttctggtgctgcaacttcagtccaaggttaatgaaatttttgaggttgacctttccattcaacaattgtttgcacatccctcaatcagtcagcttgaagagtgcattatcaacgctcaattaatgcaatttgacgcaggatccctacagggtctttatgaatcgatggaataaatctggctctcgaatggtacttaacaatgaataataatgaattaatttctttaccattagctgaacggaaaaggctacttgagttagccaaagccgccaagctctcccgtcaatacacgcaaaaaactgagatcctcccccagccacgcaagggtgatatccccttgtcctggacacagcaacgactctggtttctgacgcagttagattcatctgctcaaacggcatatcacatgcctgtgggattacatctacagggtcagcttaatcagagcgcattacaggcagcgctggacaggattgtcgcccgtcacgagatcctgcggacgacgtttatctccactaacggaaccgcccggcaagttatcgggcaccccgacagtggatttgctttgacgtctgaggatatccgccatttaccagagccagaacaacaggcagccgtcgaaaagcgtgctcatgacgaagctgtcagacctttcgattttatctgtgggccattactcagaggtcatttattgcatttggctgaagatgaatatgttctgttattaacacagcatcacatcatttcggatggctggtctgtcagattattaattcaggaactttccaccctttatcaggcttttagtcaggaacaaccggacccattgcctgaattatctcttcagtatgctgattacgtactctggcaacagcaatggttacagggcgaacggctcgaaacacagttaaattactggcgggagcagttacaggatgctcctgaattactcgaattacccacagacaaaccccgtccgatacaacagagttataaaggtaaccgtgttgagctggcatttcctgctgaactgagtgcgagtttgaaaaatctcagccagcgtcatggaacgactctatttatgaccctgatggcgggctgggcggtattactttcccgtttcagcgggcaggacgatctggtcataggaacacccattgtcaatcgtcagcaacctgagctggaatcattaatcggtttctttgccaatacgctggcattgcgtattcagttaagtgataacttaagtgtcagtgagttgctgacacaggtgaaaaagcgtgcactgggcgcttatgcacatcaggatttacccttcgaacaacttgttgaagcgctgcgacctacccgcagtttgagccacagccctatttttcaggtcatgctgactcttgataaccaatcagaacaaaagcagtttgagttagcaggattaaaattgagcgaacttcctctggtcagagaaagtgcctactttgatttgactctcacactctatgacacagaaaacggattagtcggtgatttagaatatgcgcgggatctgtttgaacacgccaccattgaacggatggtggaccatctgcaaaccctgctgacggcaatggtggcggatgaaacacaacaagtcgccgatttagcgttgcttacaccacagcaacgctcacagctcctgactgaattcagtacgaaagaagtcacctacccgcaggatctgttactgcaacaacttttcgaacaacaggtaatacgctcacctgagtccgttgcactggtcagtgacgggcagcagctcagttacacggaactgaaccggcgaaccaaccagctggcccatgccctgattgccgccggcgtcaaaccggatgacagggtggcgatttgcgttgaccgtagcccggatatgattatcggcctgttcggcattctgaaagccggcgccggttacgtgccattagatccggactacccgacagaacggctggcttatattctgtctgactgtaccccgcaattattgctgactcagcaacacttagccgatcgtctgacgactgatatccctgtttggatgatggacgataccgattatctgaacaccgcagcacagcagccgattcataatcctgacgctcactcactgggcctgttaccacaccatctggcttatattatttacacttccggctctaccggacagccgaaaggggtaatgattgaacatcgtcaggtcgtcaattttgttcatgttcaacgtgaaataaatgaactgactccaacggatcgggtgctgcaatttacgtctgtatcctttgataccacggtatctgatatttttgccacactggcgaccggtgcaacgctggtactgcgcccggcacatctgcgtattcccgacaagacattcggtcagttcctgcgggatcaggccatcaccgtgtccgatttacccaccgcattctggcacttatgggtacaggaaatggcggccggtcgctgcggtttcagcccttctttacgtctggtgattgtaggcggagaaaaagccgaattacgccatttcaatacctggcagtctttgcctgaaacacaggcctgccgctggataaactcttacggcccgaccgaaaccaccgtgattgccaccgtatggaaaccggaaaaccgggcactctgcctgaaccagaacgtgccgattggttacccgctgactaatacccgactctatattctcgatactcagaggcagcctgttcctatcggcgtggccggcgagattcatatcggaggattaagtgttgcccgtggctatctcaaccgtcctgatctgaccgcggagcgctttattgccgatccgttcagtccgcaaactgatgcccgtatgtataaaaccggtgatcttggccgctggctgccagacggtacgattgaatatctggagcgcaatgattttcaggtcaagatccggggattccgtattgaactgggagaaattgaagcacaactggctcagtgtgagggcgtcaaggatgtggttgtggtggctcgcgaagaggaaaacggcaataaacgtctggtggcttatctggtgccacagccgggagttacgcttgatttgcttcagttgcgcgaacagttaagcagccgcctgatggagtatatgctgcccggcgcttatgtcattctggaggccttccccgtcaacccgaatggtaaactggatcgcaaagccctgcctgcgccggacagttctgctatcgtccagcgtgaatatgccgaaccgcagggagaaatggagcaaacactggctgatatctggcagacactacttggtctggagcaagttggtcgtcatgataatttctttgagctgggcgggcattcgttattaaccgtgcaggttgcagcccgtttacgggaaaaactgaacattgaagtcaccttgcaggatctcttcacctaccccacactggcggatttagcccagtctctggggaatgccacccaatccactcagtcggttattctgcctgcggatcgccagcaacctttacctctttcctgggcccagcagcgtttatggttcctcgcgcaactggacagcgctgcgcaggcagcctaccacattgccggcgggctagaattgcggggccagctaaatcaggccgcgttacaggccgcgctggacaggattgtggcccgccatgagatcttgcgtaccacgattgccgttattgacggagaaacccgtcagattattggcaaccctgacagcggcttttccctgatatcgcaggatctcagcccgttatccccggcggagcagcaaatcgcccttaaagcggcagagcaggccgaagctgaccagccttttgactttacacaggggccgttagtgcgcgcccaactgctgaaaatcagtgatgaataccatattctgctggtgactcagcaccatattgtttctgacggctggtcactgaatgtgctgatcaaagagttttcgacgctttatcaggctttctgccagcaactgcccgatccgctcccccgcctgcccattcagtatgcggattatgccgtgtggcaacagcaatggttacagggcgacaaattagcacagcaggtgaattactggtgtcagactctacaggatgcgcctgtattactggaactgccaacagatcatccccgccctctggagcagagttactgcggagatctggtcgttttcaccctgccaagtgagttaaatgccggcttactcgccctgagccagcggcacggtaccaccctgtttatgaccctgctggcaggctgggcgattttattgtcccgactaagtggtcagcaggatatcgtgatcggtacccccgtcgccaaccgccaataccgtgaactggagccgctgattggcttcttcgttaatacgcggccgttacgggtcaggctggaagacaacccgacggtgagcgcgttgttagcgcaggtcaaagcccatgcgctggccgcctatgctcatcaggatctgccctttgaacagttggtggaagcattacaaccgccgcgcagcctgagtcacagcccggtctttcaggtgatgatgggactggataatacttccggttcatcagaattcaatttaccagacctgaccatcaaccatctgcctttagacagaaaaacaacccagtttgatgtgtcgctgtccttcagtgagagcgaaaatggattagtgggtgaactggaatatgccagcgatctgtttgagcacgccaccatcgaacggatggcggaacacctgcaaaccctgctggctgcgatggtgacggatgagacacaacacgttgccgatttagccctgcttacgccacagcaacgcacacagctcctgaccgaattcagcaccacagaagtcgcttatccgcaagatctgttactgcaacaactcttcgaacaacaggtgttacgttcgcctgagtccgttgcactggtcagtgacgggcagcagctcagttacacggaactgaaccggcgagccaatcagctggcccatgccctgattgccgccggcgtcaagccggatgacagggtcgccatttgcgttgaccgcagcccggatatgattatcggcctgttcggtattctgaaagccggcgccggttacgtaccgttagatccggactacccgacagaacggctggcatatattctgtctgactgtgccccgcagttattactgacccagcaacacttagccgatcgcttaacgaccgatatccctgtttgggtgatggacgataccgattatctgaacaccgcagcacagcagccggctcataatcctgacgctcactcactgggcctgttaccacatcatctggcttatattatttacacttccggctccaccggacagccgaaaggagtgatgattgaacaccgccaggttgtcaattttgttcatgtccagtgtgcagccaatgagctgactccggcagatcgggtactgcaatttacttccgtttgctttgatacgacagtcgccgatattttcgctacgctggcgaccggcgcaacgctggtactgcgcccggcgcatctgcgtatcccggataaagcattcagccagttcctgcgggatcaggctattactgtttccgatttgcccaccgcgttctggcatttatggatgcaggaaatggcgaccggtcgctgcggtttcagcccttctttacggctggtgctggtcggcggagaaaaagcggaattacgtcatttcaatacctggcagtctttgcctgaaacacaggcctgccgctggataaactcctatggtccgactgaaaccaccgttaatgccacgatgtggaaatcggataaccatgaattctgcctcaccaacgccatgccgattggctatccgctgaccaatacccgcctctatattctcgatactcagggacagcctgttcctatcggcgtggccggagagatccatatcggaggattaagcgtcgcccgtggctacctcaaccgccctgatctgaccgcagagcgctttattactgatccgttcagtccgcaaccgaatgcccgtatgtataaaaccggtgacgtcgctcgttggctgccggacggcacgattgaatatgtggagagtaatgattttcaggtcaagatccggggattccgcattgaattgggggaaattgaagcccggctggctcagtgtgacggagtcaaggatgcagtggtagtcgcgcgtgaagaggaaaacggcaataaacgtctggtggcttatctggtaccacagcctggagttacgcttgatttacttcagttacgcgaacagttaagcagccgtttggtggaatatatgctacccggcgcttatgtcattctggaggccttccccgtcaacccgaatggcaaactggatcgcaaagccctgcctgcgccggacagttcagccattgtccagcgtgaatatgctgaaccgcagggagaaatggagcagacactggccgatatttggcagagtttattgggagtagaacatatcggacgccatgaccacttctttgagctgggcgggcactccttgttaaccgtacaggtcgcagcccgtttacgggaaaaactgaacattgaagtgaccttgcaggatctcttcaaccaccccacactggcagatttagcccagtctctggggaatgctatccaatccactcagtcggttattctgcccgcagaccgccagaaacctttgcccctttcctgggcccaacagcgtttatggttcctcgcccagctggacagcgctgcacaggcagcctaccacattgacggcggactagaattgcggggccagctgaatcaggccgcgttacaggccgcgctggacaggattgtagcccggcatgaaattctgcgtaccacgattgccgttattgacggagaacccagccagattattggcaaccccagctggggcttttccctgatatcgcaggatctcagcccgttatccccggctgagcagcaaatcgcccttaaagcggctgatcaggcctaagctgaccagccttttgactttacacaggggccgttagtccgcgcccaattgctgaaaatcagcgatgaacaccatattctgctggggactcagcaccatattgtttctgacggctggtcactgaatgtgctggtcaaagagttttcggcgctttatcacgccttctgtcagcaacagcctgatccgctcccccgtctgcccattcagtatgcggattatgccgtatggcaacggcaatggttacagggcgacaaattagcacaacaggtgaattactggtgtcagaccctacaggatgcgccggtattactggaactgccaacagatcaccctcgtcctctggagcagagctaccgcggagatcaggttattttcaccctgccgcatgaattaaaggcaggcttactcaccctgagccagcggcacggtactaccctgtttatgaccctgctggcaggctgggcgattttactgtcccgactgagcggtcagcaggatatcgtaatcggtacccctgtcgccaaccgccaataccatgaactggagccgctgattggcttcttcgtcaatacgctggcgttacgggtcagactggaagacaacccaacggtcagaaccctgttagcgcaggtcaaagcccatgcgctggccgcctatgctcatcaggatttaccttttgaacagttggtggaagcattacaaccgccgcgcagcctgagtcatagcccggtctttcaggtcatgatggcgctggataatacttccggttcatcagaattcaatttaccagacctgaccatcaacgagctgctcttaaccaaaaaaacaacccagtttgatgtgtcactgtccttcagtgaaagcgagaacggattagtgggtgaactggaatatgccagtgatctgtttgagcacaccaccatcgaacggatggcggaacatctgcaaaccctgctggcggccatggtggcggatgaaacacaacaagtcgcggatttagcgctgcttacgccacagcaacgcacacagctcctgaccgaattcagcaccacagaagtcgcctatccgcaggatctgttactgcaacaactcttcgaacaacaggtatcacgctcaccggagtccgttgcgctggtcagtgacgggcagcagctcagttacaccgaactgaaccggcgagccaaccagctggcccatgccctgattgccgccggcgtcaaaccggatgatcgagtggcgatttgcgttgaccgcagcccggatatgattatcggcctgttcggcattctgaaagccggcgccggttatgtgcccttagatccggactatcccactgagcggctggcgtatattctgtctgactgtgccccgcagttattgctgacccagcaacacttagccgatcgcttaacgaccgatatccctgtttggatgatggacgataccgattacctgaacaccgcggcacagcagccggttcataatcctgacgctcactcactggggctgttaccacaccatctggcttatattatttacacttccggctccaccggacagccgaaaggggtgatgattgaacatcgtcaggtcgtcaattttgttcatgtccaacgtgaaataaatgaactgactccaacggatcgggtgctgcaatttacgtctgtatcctttgatacgacggtatctgatatttttgccacactagcgaccggtgcaacgctggtactgcgcccctctcatctgcgtattcccgacaaggcattcggtcagttcctgcgggatcaggccatcaccgtgtccgatttacccaccgcattctggcatttatgggtacaggaaatggcggccggtcgctgcggtttcagcccttctttacggctggtgattgttggcggagaaaaagccgaattacgccatttcaatacctggcaatctttgcctgaaacacaggcctgccgctggataaactcttacggcccgaccgaaaccaccgtgattgccaccgtatggaaaccggaaaaccgggcactctgcctgaaccagaacgtgccgattggttacccgctgaccaatacccgactctatattctcgatactcaggggcagcctgttcctatcggcgtggccggcgagattcatatcggaggcttaagcgtcgcccgtggctatctcaatcgcccagatctgaccgcggagcgttttattactgatccgttcagtccgcaaaccgatgcccgtatgtataaaaccggtgacctcggccgctggctgccggacggtacgattgaatatctggagcgcaatgattttcaggtcaagatccggggattccgtattgaactgggagaaattgaagcacaactggctcagtgtgagggcgtcaaggatgcggttgtggtggctcgcgaagaggaaaacggcaataaacgtctggtcgcttatgtgatcccacaaccagaaataacactggatatcattcaactgcgtgaacaactgagcagccgcctgatggagtatatgctgcccggtgcttacgtcattctggaggccttccccgtcaacccgaatggcaaactggatcgcaaagccctgcctgcgccggacagttcagcccttatcagccgtgaatatcaggctcctcagggagaagcagaacagcagctggcagctatctggcagacactgctcggcctggaacaggttggccgtcatgataatttctttgaattaggcgggcactccctgctggttgtcaatttgattgaagaacttcgccagcgtgaccttacactagaagtcagtacggtcttttcttctccgacactgatggcaatggcatcacgcataacggatacaacaatcagtgacaatgtcactttcatggttccgcctaatctgattactgatgacagccattccatcacaccggacatgctgccgctgatcacgctgacccagaataatattgaccagattgttgccaacgttcctgatggcgtggcgaatattcaggatatctacccattagggccgttacaggaaggtattttgttccaccacttgctggaaacaaaaggcgatatttatctggataatctgctgatgactttcgacagccggacacgtctggatacattcctgctggcactgcaacaggttattaatcgtcacgacattctgcgtagcgcatttcagtgggataatctgccggagccggtacaggtggtttatcgtcatgctcccctgcccgttaccgaactggagctatgcgccggtacggatacagcgcagcaattacgtgatgcgaccgacccgcgccagatacgcatggatatcaccaatgctccattactatccgccagcattgccaaagatccgcataccgaaaactggcatctggcattgctttaccatcatctggtttgtgaccatctgtcactggaaatgatcttcaatgaagtgcagatattacagctcgggcaaaatgagcctctgccgccttctctgccttatcgtaactttatcgctcagatccgggccgttccggttgagaaacatcaggactatttccaccagcttctgggcgatgtggatgaacccactctgccgtttaacttacttgatgtgcaggggaaccatgatgagcaccataagatagaggaagccggtctggagctggatgataagttatcgcgccagatacgcgactgtgcccgccagcagggtgtcagtgctgccgttctgttccatgtcgcatgggcacaggttcttgcacaatgcagcggacgggaagatgttgttttcggcaccgtgctattaggccgatcactaaaaggtgcagatacttctcaggttcttggtatgttcatcaatacgctgcccgtgcgcataatattgcaggagcgtactgcacaacaggtggtacaggaaacttatcaacagctcagcacattacttgagcatgagcagactccattagccatcgcccagcgttgcagtggtattcaggcacctcagccccttttcagcagcctgcttaatttccgtcatagccagcataacgatcaacaggctgactcagccgtatggcagggtattcagacctccggtagtgaggagcgcagtaattacccactatcattggatgtcgatgattttggtgacggctttgccctgactgcacaatgcaaccgccagattaatccggctcgcattaacgcttatatggataccgcactgaaagcgctggtaatggccttacaggaaatgccggaacaggatattcattccctcaatatcctgccaccagcagaactcgctcagctacggagggctttaacagcggcaaagttgagtgcc

SEQ ID NO: 133 - DNA, 31366 bp, Xenorhabdus sp.
  CDS (2523)..(3392)
acattgaaaagtacgaaaggtagtgaaaatcagcagttatgaggagctgctcgataaattttttttcatttttggcacgccaaagcgtggacgagttacacacctccgggaacagccagaatgatgaaacactggccgcattgccggaaacattgcataggtggttaaagaaaaaaagcggtgatgaaaaaatcacctctcccatgagtaaacggagtttctggccgaaatatccgttcgatcactcatcaccgctttacattataccaaagagggaaaatgccgggttgaatgaaaaataaaataatttaaagggtatattactaacgagaaataactgtggagaatataagttatggataaaaaagaagattcattcataaatgcactaaaagagatgatggcaaaagccgtgatgttaggtttgtcgtgctctgaaaataaaatgcaggttagtattctggatgatcagaatattgagactgtatcgaaattaatttcgctatatgaatcgacaaataattttttagttattgcgggaatagaaaaatcagctgatgaaatactcccgttgtataaagaaattatatctcaactcccggaagagagagtctgatatggttaacttagaagagattaaagattttctcagtaaggaagtgaccactgctatgtatatgtcagccgatgaattagaaccggatgctttattttcaggctatggtttggagtcaattacgttagcaaaaatagtggcaaatattaatgaaaaatttctgattcacctttccataaaggatattttaccgtatcagagtgttaataaggcagctaactatattcattccatacttgaggagaaagtctcatgacaagatcatattcaaattatgactatgtggatctacctgaaaaagaacgtctggaatatgaacgtatctttttcttaagaaactttttttcaaaaccagatttgtttcagaacgagttaaaacaagctgaacaaaatatggcatttacattaccggctttagaatctggctactcagaaatagaaacttatgaggtaggcgagctgacttggcagaaactggctcaaatctatgcggaagatattcgtcctattgtcattaaagggtttgcttcatctttcccttgtgggcagctttggacgccagagtatttcagggataatttcggagattttcaactttggtattcgacaacagaaaaattgtttgaagaaaatggaacctctctacgtgattatattaatggggtattaaagggggatatcagccgagcctatcttgagaacttaagtgatatatttaataaatatccgattctgcatcaacaaattggtattgaccgcattgatcacttcttaggtgattttgcctcataccacaaaattgcccagcttttcataggtggcccggggacaggtgctgtttaccattgtgcaaatgagttgaattgcttcctgaatatttatgggcgtaaagaatggatatttgttcatcctaaatattctgcagctatgtatagttccatgtttaataaaggtatttttgtaggttcatttgtcaaacataatgcaccggtaagatatttagaagaacatcaaccgctttataaccgaatccctaaattgagaattacattagagccgggagatatgttaattaatccaccgtggtggtggcatgcaattaataatcaaccgccagtttccattgctatcgcttcccgctggaagattgaaatgccttaccagcatcagaatccgctctatgagtttgttcaatcccaaagaatggaaaggctgacgctggaagggaagaaaatgtctgataatgatgttgttgtacctgacagtgaattacgtaaaaaatatgtctcttataaagagatgggatgggttgggaactgattgctaaaagtgacatgtctttgggataaaattcagaaaccataatattataaggtttattattaatctaaagactgtgttgtgtgagatagccacaacgcaaaaattaacgaacaaggtagcaatctaatgaaagaatttcagagtcaagaagtccactcagtatttgaacattatcctgagcagcatcaaaaattattattaacgataagagaattaatatttgatgtcgcatcaaaaacggagggagtcggttcaattactgagactctgaaatggggtcaacccagctacctgactcttgaaacgggatcgggaacgactattcgattagatcgtttcggtcattcgcatgtggctatcttttttcattgccagaccactctggttgatacattcagaaccctttttcccgaattaatttattcaaagaatagggctattgttttagatccggaagatgatttaccaacaaatgagttgagtatatgtattgaaatgtcactcacttataagttgaggaaaaaaagataataatttcattttaaaaagcaggatgtgaacaatgaaaacctgtactgtcgtaatgtttcccggacagggagcccagtttcaaggcatggggcgcaacctgtttgataaatatgaatatcacatgaggctcgcacaacaagtattagggtattcactcgttaaggtgtgcgaaaatgaacccaatgtgcttaacaaaactgaattcacacagcctgctctgtttgttactaatattcttcattatttagatggcttggagaaacatgggacggaagctgaaatttttgtgggccatagtctgggtgaatattgtgctttgtttgccgcgggtgcttttagttttgaaacagcgctatctattgttcaagaacggggtcgatgtatggctctttgctctgagggagcgatggctgccgttattggtcttaaattagagcgggtagaatttttattagcggactctgaatttcctgatttaacgatatccaattttaattccccaacacaatttattatttcaggttctcaatctgaattatctcaatttaggaagagtgtattaaaggcgaaaggtatttttcatcctttacaggttaatggtgcatttcattcgaaaagaatggaaagcattgccagcgaatttaaaagcttccttgaaagtgttgagatttattcactgaaggctcaggtattatcgaatgtaacagcggattattatccatgcaataaccgtgatcaactcatcgatttattagttaaacaattatcgcaccctgtgcgttggcaacaatgcatggaaaaactatattctgataaatttatttcaagtaaacctattgttggttttgaatatggaccaaaaccggtggtagggccattagccaagaaaatactaggtgagcatattacactgatgaattaatacattgatctttaatttaattggtgatggtgaattaatttttatctcagtaaattttatttttaaatctattgtttgcacgtgggttaatatttttactctgtgcgaatgggctggttttctttaaaagaaatcattttttattgtttgccagaatacaaataggagagttattgatggaatattctatcattggcgtagctgcacaattttgtggaggtttgtcattgtctcattattggcagacgttggttgaaggcggctctttgatgggagtgatcgacgaagaacgctatcaacttaataatcgccaaacgccggttaagtgggggatcaaggaaaagatacgcggtatgtttcttgaagatattgatagctttgacaggcatatcttccctctctcgggttctgcaattatgtttgcagacccacggcagagattatttctacaaacctgctggcaacttcttgaggatgcaggattagccgcatcaacgctagcaggcaagaaagtgggagtatttgttgctcaggatggctggtatttaaattcttatgtcgacagaattccagatgaacataaggaaagtcaggagtttattgtgccaggaaatgatccctgttttctggcaaatcgggtttctttctttttcaacttccatggcccatctattgttgttgatacaacctgttcaagtgcttttgtcgctttggatatggcatgtcaggcactggaagacggcgattgtgactacgctatcgtagggggaatttcgctgttcttaaatccctggaaagcgggagaaacaacagccacaccgtttgaaaccagcggagaggatattcacagtttttctgaaaaggcttcaggatacagaacttcagaaggatgcgcggctttacttttgcaaagaaacagcgatgaagtaaatcagcgccatcatgtttatggtgtcgtgcaggccagcggccataattctggtggtaaaactaattcatttgcccagcccaataaagaacaacaaatcaatctgtttcagaccgtattaaaaagagcgaaccttttgcctgagcagattaattatatcgaagcacatggcgttgcatcccaaatgggagatgcgattgaagcgaatgctttggtggatgttttcgcccgtccgcagaacgcggcaccctgctatgtgagtacggtcaaacccaatattggccataaccatgccagctccgggttttacgccatcatcaagggattgatggcgttcaggtataaccagatccctttgattcgcggattggataaagcgacgttgaatgccggcattccatccgatactcaggggattcagttcctgacagagacggttgactggccacaatctgagggaggaacaccccggcatatatttttcagcagttatgggttcagcaacgtcaatgcggctattgtcctgcgggaacccgataactcatctgccaccaaaataagccctctggtggaaacggtaacagaaaagccggtattggtttgtctgtctgcaaaaagtgatgaacagctttaccaacaggtagtcaatctgtgtaagacggtcagtgagccggattttactgagaatttcaatctgcatgaacttgcttggacacttagcacaggaagagaagcgtttacgcatcgttgggcaactctggtttcgtcaacagaacaactccggtgcgtattagaagcgtttactgaatcgccggaaaaacaatactcaacaatctatcagggaatattggcccaaaatgtacgggaagaagtattaacagctcaacgcgctgaacttgccgtggcagcaaataatgggtttccggtaacgtcattagaaactgttgcgagatgctggattaccggtgttgatattgactggatgcagtattggggagatgcggaatggcggcgtattcctttacctacctatccgtttgcgaaaacttgctattgggtgcctaaaggtgaaattcgcagcctatcgtcacaggaggtctcgtctcagaaaggagccagccaatttatccatccgtttgtccaccaaaatacttctgattttgcggaacagcgcttcagcaccacattttccggtgaagaattctgcctgaaggggcatgtgattcacggtatccgcgtattgccgggagtcgggcatttagagctggcccgcgttgcgtcacatcactctttcggctcaacaccgaattcttcgtcagaagtgaaggaaaaaaccggactggcgctgaaaaatgtcgtctgggcgcagattatcggtgtcattgatgaacctcagcaggtacatattcgttttatcaatcatggaaatggtgaagcaggttatcaactatatagcggggcagaagaagagacgatccataacaccggcgtagcgacacgaaaagcactcacgccagcacctgtctatgatattgacaacctaaaatccagatatctgcaaaacgcatactctcctaagcaatactatgacatgtattacgcgctgggcttatacatggcacctgactatcagggcattgaagaactttatgtggggatggatcatgtcttggcaaaactgtcactgcctgaatctttggagccaaccagagatcaatttgttttgcatccctgtttaatggatggggctcttctctcatccgtcgggcttttaatgcgttttggcgatctcaatcggcccattccacctaaatgtttaatcccttttgcccttgatgaaattgaatttcatgatgaagaatcccaattacactgggcctggatcagttatagctcagacagcagtgcttcggatcctttcccgaaagttgatgtcgattgttgtgatattaacggcaaggtgtgtattcggttcaaagggttcagttgtcggggattgggtgcgcagtctgcgccaccggcagaggaggcaccttatttattacagcctcagtggaaaaatcaggcgttgcctgctgatactgcattacgcgctgccacaaaacgcatcgtgttcctgtgtgaattagagagtcttcaatctgagctgttgtttaggtcagataccgacacatgtgaatatattgtattgcccaaaattcttcatgatgaatcgccgttaaaaaggcaacaaaacgttattacactctgtaaaaaaattgatgatctgattcagcattcccccacagaacccgtacttattcagttggtattaccggaagcccgtccggaatatgccatcgtgaccgcgctattaaaaacagcctatcagaacaatgccaatctgcttagccagacgatttattgtgatgatgaagatgggcttattgagaaattgtcagaggaaacctcacaaataaaatatgacaccgttctatggcaatcggaggaacgctgggttccacattggactgcctggacgcctgaaagtgattctgtggacaatttaacgcctccgtggaaagaaaaatctgtttacttaattgtcgatgaggatggcagcatggggcgtgcgattgccagagatattacaacgcataccgattcagctattgccattgttttgagtgaaagtgaaaagaaccaataccaaatcacaatagcatcaaagacgacaacgattaacgacagtgttatttgtcttgatacggtcacattagcggcacttgttagccgtattgagcaaaattttggcgcattgcggggcgtatttttctgtgtggggacacactttgcaacaaattcacagcatacagagaaccaagccttaacttcaatacttgaacgttatcagggactgtcacggctggagaaagtcactcagggggtgtcgcttgatttctttacagttctgacctatcgggatggtgtattaggtagctctgggtatcctctgttttctgcctattgtgctgcggtcaataactttgttcgtcacagtcaacagagtcctgaatcagcacaatatcaaaagcaaacactgtcattgatcctgcctcaatctaacggaacaaatgagggggaatttattcgccatatggcgcttcagtctttatatcaggcactacatgagagattcagtggtgaattgatgctgatggaaggcggaacaatagagcgtttcagagcagaaatgctgggaattcgtccttattatgaacctgctttctcgtcaactacagaaaataacgtcaactcactggccagtcaggagcaggcatcatccgatctcgaacctactgcggtggatttgattaagagggttgtgagcaaggcggtaagccttcctttagccgaaattgatgaaaatgctggcatggaaaaatatggaatagattccattttatccatcaagatgacggaagcactggaacaggatttcggtgtcctgccgaaaaccctgttttttgaatatctcaccatccgggaactggcggcttattttgttaagcatcatcgccttgttttactggaaggggcacaaaaccactcacaaaacaaaaacgttcagacatcatcaatctcagaagattctcgcctgtcagtacaaccgtttcccggtagaacagacaaaacagaaaacctttttgtttctcagacaggcgaggtagcgaataccacttccgagtcagatgatatcgccattgttggtctggccggacgttttcctcaggcaagaaatatgcgtgatttttggcagcttctgagagaagggcaggattgcattaccgaaatcccttttgagcgctgggatcattcgcgttatttcgacatggataaaactaaacgaggcaaaacctacggcaaatggggcggttttattgatggtgttgatgaatttgatccactgttttttaacctctcaccccgcgatgcgcgtgtgatgagtccgcaggaacggttatttttacaatgcgcctacgaaacaattgaggatgcgggatatagccacagaacactaggttcccgtgattggacacggctaccgaaaaagacaggcgtatatgtgggggtcatgtatggagaatatgagttttatagcatagaagaattggcaaaagggaacgtgctggagcagtctatcgtgacgggcagtttcggctcaatagccaatcgggtatcgcatttctttaatatcaatgggccaagccttgcggtcgataccatgtgttcttcctcactgacgtctatttaccttgcctgccaggcactcagacagggggatattgagatggcgctggcggggggcgttaatgtttctattcatcctaataagtacttgattctgggtcagtctaagtttttgtctgatgaaggacgatgccagagttttggtgagggaggaaccggatatgttccgtcagaaggggtgggagcggttttactgaaaccgttgacgaaggctattgcagatggcgaccatatttatggtgttatcaagggtatcgccgttaatcacggtggtaaaaccaacggttacactgtccctaaccctatcgcacaagctgaggtgatttctcaggcgatccagtcttcaggggtgtctccgcgtgccattagctatattgaagcacatggaacagggacttcactgggagatcctattgaaatagcgggtctcagccgggcatttcagcaatgtttacaggataacgacacacaggaaagcgcattctgtgcaataggctcagtaaaatctaatatggggcactgtgaaagtgcggcgggtattgcaggtgtcgccaaagtactcatgcaaatcaagcaccggcagttagtgccttctttacatagccgtgaattaaaccccaatattgattttgacgcctctccgttttatgtgcagcgtgaacttgcagattggaaaagaccgctgttgggtgagctaggtcaaaacaaagaagagcaatcagaacatcccagaacagcaggaatttcatcattcggagccggaggaaccaatgctcatttggttgtacaggaatacattcctgctaacgacttaaactccatcaataataccgactggccaaaatgggctgttatccctctatcagcaaaaaatcacgaccagcatcgtgaattggcgcaaaacttatcacagtatcttaaagagcaggcgaaatggtattcagaggtgtccaaagcagaatatctgcatagtcttgcctataccttacagacagggcgggaagaaatggaagagcgggtcacctttatggttgattccctttctgccctgattgatagcttaaaggttttctccctgtcctgcttaccctcagcgcatttctggatgggacgagtagaaaaatctaaatcagcaaaacagctaatgacacccgtttatgcaggaaaagataagcaggaagaagaatacgagcagttacagcaaatcgccagcgcctggactcaggggcatgacattgattggcaggggtattatcaatcccttcctgtacggccaaatcgcctcagtttaccgacttatccttttgcccgggaaagatactggatacctgaaccggaagctcagatagccgattttgctgttgcagtggaagagatagattcaacgaaagagatgacctcgacggtgctatatacatcgggttgggaacgatgtgatattagtcagagtacgacgtatgcaatgaagcccaagcatactgacctatttgtcattgggaatgccaatgaaacctcactgacagagctggctttgttaactagtgtggataacgtacattatctccgtacagaaaatgaccttcatactgatagcctgcattcaagctctttatctgatcttgttttgcgattaactaattattgccagcagcgaatccattccggtcagggattaccgacattcattgcggtttttgcaccatggaaaaataacggattaccttaccgcgctttattgggggcactcagaaccctcagcatggaatttcctgtggtacagacgaaacttattctggatgcggcactggataatgcagatagtgaaactttcatccggcatgcagaaaaagaactcctttctttagatcaactttcatctgctgtgtgctatcaggaaaaagaccagcgctttgtctggcgtcaaaaagcggtagaaccgacagacttaacgaatcttccttcgttgtttactcatgaatgcaggacgatttggattacgggtggtctgggaggattgggataccagattgcacaatatatcggtacaaaaacaggcgcacagcttgtgttatcagggcgttctgttcttgatgctgataaagaagctcaactggactcactaagaaaacgcggaataaaagccgaatatgtgccatgcgatgtgaataactacgctgcactggaaaaaaccatgctgcttatccgccagcgttttggtgctctgcatggcgttatccattgtgccggtgttatccatgatgctctgactatcaataaaacagaggaagaaattgaccatgtgatcgccactaaggcatcagcggcttgtctgctggatgaagtgactcaacacgaaccactggcattttttgtcatgttctcctcacttgcctctctgggaaatatcggccagatagattatgcggcggcaaacgcctttctggatacatttgctgaatatcgtgaagatttagttcagcagaagcaaaggagcggaaaaagcctgtcaattaattggcctctttggcaggaaggcggtatgaacgtgacaccgagagtagcaaaacacatgtttgatacctttggtatcgtcccgttggatacaaaaaccgcactggaaatactggaaattgcgattcgctcaccgttctctcagtttggtgtgatgaaggggaatgagcaaaagattaaggattacctgagattatctgacgattctttacctgttacaccgctgtctgtatcagatcacaaagattcggatatcacatttaatgataagaatatggattctgttaatccgagtgagtcagataaaagtgagtcaggtaacttgtctgccgccattgcggatattgcagccggaaaattatcagaactactgggaatgcgtagcgaagccatcgatattcaccggcagtttggcgattatggcatggattctgtcggactcattgagctggctgagtatattaattctcgttttggcgtcactctgtcacaggcgagttttctggagttcaacacattaaaccgtgtggcagagcacctgatacaactgttgccagagccgagcattccagtcccttccgacattttgccttctgacacgtcatcttccgacataccagacgctgtcagcacgccttcttttgccattgtgggctatgactgtacatttcctggtgcaaaaaatgcacatgcgtactggcagaatattgtccaaaaaaacatttctattcaagggatcacgcaggagaaatggcagcaacgccatattctcactccttccgataaagaagatgcggtaaaacgcatgcagttattcggttttttaccggatatcgatcagtttgatgctgaattttggggtattgatgccgaaacggcaaaacagatagatccgcagcaacgcctgcttatgcagtgtatctggcgatgtgttgaacatgcgggttatgacttggaagacttcactcagcgtaaagttgggttatttgttgccgctgattccacagactacaaatccctgattaaggatcattctctgattaacaacatcgaaggttgtggcgggttacaggcgggcctcagtctgggcatgatggtaaatcagatctcctatttcttcaatttcaccggcccgagtgaagtggttgataacgcctgcgccagtgtgtttgttgcgctgcaaaaagcccggcaggcgatcctacagggtgattgtgacgtggcggttgtcgcgggggttaaagtcatccttgattttatggagttttatatccgggatcagggaggcattctcagccagtcaggaaaaatggcgccttttgactacacggcagatggctatatccggggtgaaggtgtgggtgccgtcatgattaagcctctggaacaggcacatctggaacgtgaccctgtccgggccatcatccggggtatcgggatttctcataatggtcggagtgctttttcgtcgatggcaccgagtgttgagaaacaggaagagaatatcaaaaaagcctatcagacagcggggatcgatcccttgttctgttgactatattgaagcccacggttctgcgactcaatttaatgatgtcagtgaagttgcagcttttaaaaaggttttttcagaaaatcagaccgattcacatcgttgtgtcatcagcgcagtgaaaggcaatattggtcatctggaagccgcttcaggcatggcctccctgattaaggtgattcttgctatgcagcatggcgtcattccaccgattgcttctttctctcaattacatccttcgatttttattgagaacacgcccttgttctttccgcgtgagccggttctgtggcaacaggccagttcagacaaaacacagccaagacgggccggattgaactcgattggaatcacgggagttaatgcgcatgtcattttggaaacccctgaacagcgcgaagtgccggttttctcccaaaggaaagaacacgtccttattcctatttcggcgaaatctgagaaaaccttaaaggtgtatctgagtcagtggctggattatgtgcatcaagaaaaattagccggtcatgataaccccacgacgttaagaaatctggcttacagcgcccagacggggcgtgcggatatgccgttccgcacggcgatcattgtcaatgatttagaaaaactcatcgcaacgctggagtggatgatcacaggagaaaacggaacgccgccagcgggggtggttgtgacgggtgttgtttcttcaaaaagccgcttccccaaaaagcaggttgcattttccaccacattgcccgtgttgaaacaactggcggacgattgggtcacaggtgcctgtatagactggcgggcttttgcgcaggggcacggagtttacgttgacattcccggttacccgtttgacgaacagcgatattggttcctatagggaacccatttttagaaccagaaacacgcaaattcacgccgttatccaagagataacggcacaacaatatattggaaaaggaagtaaaaagatgagtgaagttaatgaaaaaaataatttattggactcattgaaaaccatcgcaaaagaaatattgcagcagagcggtgatattagtactgaggcacatattcaggatctggggtttgattctaaatcgctggttatctttacggataaaatttccggtgtgctggataaagaggtacatcccggtgtgttatttgagttcaccacgctggagaaatttgctgattatcttatgaattatcagacatcagcagcgaagcgatttctaaccgccttatcctcacccacattaacagaagaaacattaactgcgggaaaggtgtgtctttctcaaggaaatgaaaacagctgtcagaaaacctgctcctctaaaaatacgaatgatcttgcctatatgacgggaatgacccggggcatagaacaaaacatcccggtgattataggggggggtattgcaggtatgctcatcagctatcagcttagtcaggagaagatcccgcatatcatcgtcggtaagccggaaattggtgatatgccaaaactgggtgaatcaatgaccgaggtagtcagtattgaatttgcccgccgttttaaaaatctgtcccgacatttctatcccaaagagttcacgccattttttatgggggaattagttgccgggttacggttccattttttcgaatcgctggcttcgcttttcatggaagaagatattcctgaacattttattcatatcgacaggctcggatttgataaggcgctgtatgaagagactgttgcggcttctgaatgtacttggattgaagccttagtagaacatgttgaatattctgaggacagtgacaaagtttcattacttcatctgtccgatggacagattattcaaccttcttatgtttgggattgcaccaaccatgtccgtttattagggcgcaaaatcgggctttcctataccgagctggacagccgccgacaggtgatttttacccattattatcaaaaagcgggtagtaaactttgtgattccaaagagcttccctggatgcacgcaacatcattgctgagtgcagatgaagagttcgatcagctgaaaggcgtttcctggctaataccgctaggtgattatgtctccgttggtatcagtatgctgcctgacgatgtgagagatcgcacagcagaagagattattgccttgctgacaaaagcctaccagagacggggattagattactcagcacatttcacctgccgtcgggaaatagtgagcctcccgacccaacatttcatatatgaacgatttaccggtaagaactgggcactggttggcggaagtgggatcagtacatggtttacctccggctcaaatttaagtatcgcgaccctgatgtcctctatcgcgccaaaaatcattcagtcaccggaactctacggtgaatattacaccacgcatgtccgtggttttgcgaaaacacagacgatttatgatgctttcatggaatcaaatattggctccgtggatgcgcttaagtttttaagtggcgtggttgaacaggcaagaagtcgtatcacgtctttcttcctgcttgatgaaatagagggaaaatccagcggtaaagtggctcgtgagctttggcaggaaaataccgccattgataaggaatacttcgattttctgagacagatagccactcatgcccgtcccgaagatcgtcagcaacaaactgatttgatattccagaagctcatgcagttagagtcaatggaacatcaggtacgactgccttacttaaaagacagcaaagtaagacaggaaaaacctcaattattcatatgattatgtaatggatggcatttctatgaccgataaaatgacttggctattacaacatccgtatgcagagtttgttctgggattgaaagcggcatgggaagatgatctgtcttctgacgcctttaataatctgtttgctcaaaactgtgtgtgccatatgcagagtaacgagttaaatgatgctcaggcgtttcagacatttattcagtcagtcaggctgaacacggctaatttaaaacttatcccggaaagcgtgattattcaggatgatattctgcatctctttcaccgttggaaagcggatcgctggcatgatgagattatttccggtggcgaatattcaaatttttgtcagatagcaatacgcatcaatgacggcaaaatcgttgaattatggcaacaggtgcaggactttctttttttggttggcatgccgctttctgaagcatgtttgtcttaccctgcctggcaacaacgtgtgttggttaacaaagaaaaggagggtttgcatgtagcctctgatgaacagtccatccgaatgagtgagaaggctaaacagcttgttgattgtgtcttcaatcagggttcattgcgccacattgacagcctgctacacccggagctggtatttcataatggcaatgtcaccggtcatggaattgctgaatggaaaagttttatttacgcattgcgaacggcaataggaaaggagggagttacactatttgatgagttatttattcgcgatgagaacactttaacgttatttgtccgaatggaattaacccaagcctctccctttgttttatcccgcctgaatggcatgttttgtgtattaaagctggagatggacgaacaccgcatcacgaaaattcaaacgtatcctgagaattacttgtttttcttaggcattgattttcctcagcatgaaacgcgtcttaaacagctttttcggggaaacaggctacctttagagataaaatctcagccgaaacatgaagccgagataaaaatgccaccgttctctgaatctgttcggaatgagcaagtggcgattgttgggattgcagggagttttccgcaggcggattctgttgatcagttctggagaaatctgcttgaagaaaagtccggtttttcagcttttcctgaagatcgtccgtggctgtctgcgggaacaatcattcgttctgccgggtttattaatgatattttccggtttgatgaacagtatttccagatcccaccagccgttgctcagtatatggatcctcagcatcgtttgttgcttgagattattaatcaaagcattgaagacagcggtcatgctaatcaggacgtgagcggcgatcgtactgcgctgtttgtttcagctttagctaatgattacgaaaagctgctgagagataagggcgtagaggagaatttctactattgggctggtaatgagcctgccatgtcatcgggtaggatagcccgattccttgatattcaaggccctacccaatttattaatacagaatgcacgggaggcacaacggcattgctgggagcgtgtgatttgattcgctcagggcaggtcgatcaggctattgtcagtgcaagcagccttttcctgcatccttacggttttattgcgcgtgaggatggaattttgtcgtccgcggcagcacctgaattgtttagcaagcgaagcaaggggcaactcaggggagaagcggtcgtctctgtgattgttaaatcattgtcgaaagcacaacaagatggagatgatatctatgccattatcgctggtggcgcggcaaataatagcggaaggacattttccctcatttctgccaatgttgaacagcaggctaaaaccatcagtaaagcctggcaaaattcgggggtatcggcagatgatttctccgtaattgagtgtaacgcatccggcgtcagagcaggagattttacagaaatcaccgctctgaaaaaagttttcctgccccatcagcatattcatctctccacggtaaagggagctatcggacacactgaggcggtttccggtctggtggcactggtaaaagttctgctgcaattgcgtcatcagaccattatcggcactcagggactcagcgagattgatgacagcttagggttagagggttccggactttatctcaatcatcatcatcaaaaatgggactccactatacgggaaggagaggcgttacccagaattgccggtattaattcatttgccggaggtgggtataacacccatgtcgtggttaaggaatttatcaggcaagaaaatacgagcgttaagcaagcaacgatgccggtgctagtcccgctatcatcgcactcggaagcctcgttacgcgatcatattgtgcagataaaacgatatttacaggaacggcagttacagaaacaggaggttgatttagcgcgtttggcattcacgttgcagtcccgtgaggcacggcaatatcgggtaattttagaagtatcccacttatctgagctgacatcacaactggacggcgtacttaatggcgatattggtattaagaataccgaggcgattcagcaggaagacacattaagatcagtatccccttcctgccttacagatgaaataaccacggaactgatactgcgttggttaagaggtgaagaaccagactggtcatgtttatggggaaataaacatccggtacgcctgtccggtttgccggttcgcgcatttttaggcgctatccatcgtccgccatttttcattgatgcatcggctacgctatcaaataatgcgctgaaatcctgtcaattccgggtcagcacggctgagtcttatttgcatgaacatgtggtcaacgggcaaatgatgcttccgggtgtggttcatcttgaatttgtacggcatgcaacgacgttattgttgccagactatgcagctaaaaaacaattgagcttacacaacgtaggttgggcgaagccggctatcaagacagaagcagaaactgcattgatgctaacggtgaatattaaatcagagacatcaccggaagaaaaaaacaatattcattttgatgtgacttcaggagatagtgttttaggaacagagacgagtgaagaagaacaccggcaccctgattctttgaccgtcggcagtatcagtttctcatcattacagaacagcacttctctggatattaaacagtgtcagcagtcttgtcaggaacgtcggttaaccgccgcacaatgttacagcgtgcttgaactgcttggtattcagattggcaagaaacatcgtgctattcaggaaatcacaatagggaaaaacagtcacggagagaccgtagcactcgcaaggctggcttttgtagctgataaagccccgatgtacgagttcgcccatcaatctatgccgttcaaatcaaaaccgtttatgtactgtcctgccgtgatggatggtgcgctacaggctgcttatctgggattgctgacacaagaagatctcaaacagggcgtaatcacaccgcttccttttgctgttgatgaaatccggtttatccgacaggttaaaggtgaggcatgggcatggatgacaaacgtagcatcgcctgtatcaccctcgttcatcaagaaaatggatctcgttatctgtgacaataacggtgacatttgtgttgagattaaaggattttccattcgggaattacgggcatctgtaacaccttctactgtagtgcaaacagacatttcacagatagaacatgcgcaaaatcagccgaggcccgaggacataattggacagctaaaagcgataataggtaaagaattaggtatcccacccacacggttgcggacttctgaacctttagataaatatggtattgattcagcgattgccatacaactggttgcgattttggagaaaacgtttggttcgctgcctaaaaccttattttatgaatacaaatgcattgccgatatcgctcagtatttggctcaaacagttactcaccatgcagataaatccctcctttctttggatcagaaaaaagaatctgatttagccaatcaagggcagaatatccctgataatcggctgaacattgccatcatcgggataagtgcaaaatatccgcaatcagagaatattgctcaaatctgggacaatctgaaacagggtaagcgctgtattagtgagatcccacagaatcggtgggattggcagaattattatcgcggagacagtcaaaatacgcacctcagcaaatggggaggctttctgagtggcgttgatgaattcgatttcgcatttttcgatatctctgaaagtgaagccgcggcaatggatcctcaggaacgtttattcttgcaggaagcgtggaaagcaattgaagatgccggttacacccctgaaacactggccgctgatgagaagagagaaaaaaatggcataaacgcagtcggggtttatgtcggttcaatgtacagtgagtatcaactgaatgacgtaacatccgatgacctgaaacaaccgattggattagtcggcagtcaggccagtattgctaaccggctttcttacttcttggattttcacgggcctagtatgacgctggatgccatgtgtacctcttcaatggttgcgatacagcttgcctgtcaggatctgaaacaaggacgtactcacgcggctatcgtcggcggcgttaatttgacgcttcatcctaataaatacttaacccttagccgcagaaaaatgctgtcttcatcgcctgagcttaatagttttggtgaaggcagtcatggttatattccgggagaagggattggtgttctggtattaaaaagattagaggatgccttaaatgaaggtgcgcacatttatggcgtgatccagggctgcgcggtgaaccaaaacggaagatcaaatggatttggtgctccggatccgaaagcacagcaggtagtgattgagcaggccatgacagaagcaaaagtcaacgtggatgaaatcagttacctcgaagcacacagcacaggcacacgatatggcgatctgattgaagttggtgcattaacaaaagtttttcaaaaacgagcagataatcatcatcctgcatgcttgataggttcgggaaaaccgaatttcggtcattgtgaagctgcggccggagttggcagtgttattaaagtcctgcttcaaatgcaacataaaatgattgcgccaacactttatggtgaaaggctgaatcccgatattattttcgaacagacacctttctctgttaattcaacattaatggaatggaaacagcccggcagggaagggatgagcataccgagaatcgccggaatttcttgttttggtgctggtggaaccaatgcccaccttattctggaagagagtacatcgcctgaactgtcagaaacagggataaatcttccctgtgccattcttctttcagcgaaaacggttagcgcattgcaggatcgcgtgaaacagctgtatgactttctatcactgtatcaatttgagaacagcactcacgaaactgaacttttgctgatgcgtttggcgttgaccttacaaataggccgggaaaatatgccggtacgtgtaggttttctggtgcaaagtttggaggatttatgtcagcagcttaaacagtgtgaatgcagcaatgaaaatatcatcgtactcagcagtatcgatcaatttgaagaacgtgaatggcaggaaaaaattaatggctggctggtggaaaataaccaacgtgaattactctatgtttggtgcaaaggtgcaaacatcgaatggcatcaggtatatcgggagcagttgcctgaacgtataagcctgccaacttacccatttgaacgtcataaaattgaattaaaagcgattgaaacagtaccgtcattatcggccagcgtacagacagcctatttatacggtgaggacggattcgcttttctttccaatcggacgatgacgtttcgggaaaaagctgaacaatttgttatcaagacattggaaaacattatcgagcataaagtcccgtctgcgaatactccattttcagacttgcacctgacatcattgcatatcgtccgttttctggatttttggcaggttgttttcggggtatctctccaatttacgattttttatgaacaacgaaatgtgagatcgctggttgatgatttgattaccagcgaatggataacagaagaacaactgttaacagcggcagaattttttcgctcttcaacagaagaaaacgcagcgcataccttcccgctttctgaactgcaagagtcatttgtgattggacgtgcgctctccacgtatggtcagcgtgtgggcagcacactttattttgaacttcatattgcacaggccataccgattaagcaaatcgagtcggcctggaatcatttagttgatcatcatgagtcgctgcatacagttgttaacaacaattttcagcaacaggttctggaagattatgcttattactcctttccagtcattgatttatcggagtattcagattcagaaaaaactgattatctgacaaacagccggacaacgctaaattgtaaggtgtttgacttagcgtgttggccgtatttcgaaatcaacgcattgatattggatgctgaacataccgttgtacaaatcgtcttggatgaagtgatcgctgatgccgtcagtgtctttttgctggtagaacagttacgttatatgtcagaagatcctgattatgaattacctgcaacctattctctgaagaaatacctcactttagttgaacagattcgcaccggtaaacattttcagcagagcatgcagtattgggttgataaattagagaatatcccgccaggacctgatctgaaatatcttccggcacaatatcctgtagcgcagacggtgcattgtttaagtgcagaactgccttctgaattgtggtcagccataaagacacaggctgacatgttgtcctgttcaaccggtgcgatgttgctgagtattttttgtgaagtacttcatcaggttacggaacagtcacgttttagtcttaatctgactaacttcaatcgattagccatcaatcagcagatcagcgggctggttgggttgttggccaatagcaatatttttgtttcagaatgggaaccggaaaatacgtttcagtcacggatcattgcctgccagcagcagctggatagagatgccagtcacagctttgtaggagcggtcaatgtactcagaaaattacgacagaatccggctaaacgtgcagatatatgcttatcggtggtttttacaaatttaatctctgctgcatttcaacaacccaatcctgaggatggctggtctgttcaacatatgatgaatacaacgcctcaagtagcgttagatcatcatgtcttcgaggttaacgggcggttggtctaccgctggtatgtcgcccatgcgttattggaacaaggttcggtcgttgctttgtttgacctttatcgtcaaaaactgattgaccgtgcgcagtctatttcagaaacctctgtttcaggtgagcaaaaaaggcaggatttagagagtttagagaaagaaaaagcacagagcagcttttttcctctgcttggcattcagaaggccttatatgctgggcaaatgatgcccgtaaaactgggtggaaaaacctgttgctgtcatcttgagtttgatattgatgtgcttgatatttcccggttaacccgtgcctggaatgaagttgttgcttatcatccggttttgagaacgcattatctcgcttcattgcatcagaaggtgttggataacatagcggattatacaatcctgaccgatagtgtgatcgggacagaagcaatatttcatcagcgatgtcatgcaatacgcaatgaaatgttgttgacacgttattcagcaggagaatatccggggtatcgcctgcgggtgtgtacgcttgaagggcaaaaaaaccgactgtttatcaattttgattttgttctgattgatgggaaaagtatttttctgatacttagccaattgtttaataaatataaatcagaaagttatcgattatcgacacagaacatcacatttcaggatgttgtcctgcattataagcatcaacagaataccgcaaactgcataacagcgagggattactggcatgataaattctcccggatgaaacaggggcttaatggattagcaccattagcccatcagacatctcttcccgcaccattgacacaggtattatcttattatcgtcagatacaggcactggctgaaaagctgagtgtttctgttgacagtatcctattggcagctttcggtttcacgcttttaaactggaataagttaaaaaccggatcggatgaacccattaccatcgcagtggtttcctgggacagatatgctggggtgcctgaaaccacaacgggggtatttacccgtcttagctgggtaagtttttcagagacagatcaaaccccagaacagcttattctccgggttcaggcgcagctggataacgatcggcatcatgacgtcgttgatgaactggaaatagcagcgcattaccccgatctgcattttccgatagtttacacttgcctgctggcctacggtcccgattttcctgaacctgcctatagcatttcccaaacgccgggggttgtcttagacaatattcctactgtactcaatacatcctctcttcgcctccagtgggatgtactggaaagcggccggaatgaattttcctctgtctttcaacaatattgtgcttgtctcaaaaaatggttttttacggatgaaatgctcaattttgggcatcaggggaaagaccttgctgattatgatgtgcggaactctgcaaccgtggacggaatgccatcatgatgaggagaaacaggggaacttctatgggcgagaaatgtaatgttagtgatctcaatgaattcattgagatattaatggctgagcattcggttgatttcaatcatgacctgtttgatcaggggatgacatcaaaatcaatcatgcaggtgctgattcgtattcgggaacgttttgacgttaatcttgaccttgatgagtttttgcatacccccacaatggcccgcttgagccatttgatttgcaggcagattgagaacaatcagcaggataccggaaaacctgtcgtaacaggcggttctttacagcagcttgagcaattaatggcaggcaaagcgctaaaaccaaatcaggatttatttgagcatggctttagttcgctgaatgtcatggagctggttttggctgtgaagaaacagtttgatgtagatattgaactggaggcattgctcgcaaagccgacgttagagacgctggccgtgctgattgatcaacaaagcggacaaccggtagctcggtgtgaaccgcaatctgttttgccggtggcggatgaagaaaaagaattgtctgtactttcatcgttaacagaaaaacaggcattcagagaaagacaattcaacattcgtcaattggatagcaattttgacactgtccgtgccaaaaaactctcatctgaggagtttcagcatcactataatacccgacgcactttcagaacatttgacgatgcgccaatgccaaaagacagcgtattgggatggctgagtgcactcaacgccatgcttattgacggcagtcatcgatatctctatccatcggcgggcggaacctacagtatccagatttatgttgagataaaacccggcagagtgggaggattttcaaccgggttttattactataatccggttgaacacaagctggataaaatttcatcggatgaattgcctcacaacagccatttttactataacagaccctattatgacaatgcgcattgctgcttatattttgtggttgagtacgatggtattcgtcctttgtataaagaaaaaagtgacttttttgcagcgattgaagtcggtgccattgtccaactgcttgcacaaaaacaggcgcactacccgattggttcctgcctgttatccggcgttgatgaaaccgctttagctggcgtgctgaagctcaaagatagccagagaacacttttaggcatggcgtttgggctggtggagaaaacgcagtttcaggaacctgagaacagcagtactgagatgccggggcaggacattgccattattggcgtacaggggaaataccctgatgcgccggatattgaaacattctggaataacctcaaagatcagaaaaattgtttttccagagtacctgataaccgttggggatcaccggagtgctctgaacattggggaggattttcccattcaattacagattttgatgctgacttttttggcatttcaacgacggaacgggaacggatatcggctcaggaagcctgttttttgacaagtgtttacgagctgctggacggtgcgggatacaacggcgaaaatttgctgagtctggggccgcgtgtaggcgttttctccggtgtgatgtggaatgatcctgacggttcagccgaggaaaccgggatatcagtagagtcagccagccgctctacattctcatccatcgtgaaccgggtatcctggtttttcaattggactgggccaagcctcgccgtagatacgagttgttcttcttcactaacgtcgatctatcttgcctgtcaggcgattgcacagggtgactgcgatgtggcagtagccggtggcatcaatctttttgcccacgccacccattttactaacctcaaacgatttaacatgatttctgaacgttgcgatgctcaggcgtttggagaagaagcagcgggaattatcccgggagaaggggttggtgttgtgttgttaaaaccactttctcaggcggaagccgacaacgatcatatttggggggtgataaaaggaggcagtattgcccatagtggcagagtgtcgggctatggtgttccttcaacaaaacagcagagtgaattgctcaacagcacattacagaaaacaggctatgatgcagacgctgtcgattatattgaagccgcagcagccggcacggtattcggtgatgcttcagaaatccgcgctatacagaccgcctttgcggaacgtcatacacctctgtttgtcggtacgctaaagccgaatatcgggcaccttgaatctgcctcagggatatcacaattaacgaaagtcctgttgcaaatgaagtatgggtatttattgcccgtcatgccctataagacgctgagtccactgataaaactggataacagcccggtcagtattgtgactgaacagcgtcaatggcagggaacccggcaacatcccaaactggcgatggtgaatagctttggcagtacaggctcttatgccaacctcctgctgcaaagctaccatccttcagagcagtctttgcagaatagctcgaatatcagcctgccggaattgtttgttctgtccgcgaaatcaccggatagtctgcgacgctatgcacaatgttgggtacatttttttgaatcggcattgaaaaataaccgggaaataccgctgcagcaactatttgccgtgacccagtcaggacgggagcactttaatcaacgtttagccattcctgtcagctcagtatctgagctgcttaaaaagctgaaacgatggattgcagatggcaccggaaccgatatttatcaaggtagcatttcagatgctggcatagccgaacaagagagtttgttcttcaatccagagcagaatcataaaattgcagatgcgtgggtaaaaggccaatggcagaactggaggcagtttcacagggatgaaccgcttcccaaaatgccactgcctgtttatccgttttatcaatcgcatcagaactcgccgctcatgaccacgcaaccgagtgagccagcgattgatcatcacctgtcaacaggcaaccttccaccgtcacaggacgcaggcgagagttctctcagtatgaaagaacttctgttttctctgattgcccgcatattgcaacaacctttagaacaaattgatggcagcatgagcctgtttgcattgggaatgtcatcatctcaggcggtcaaattcgtacggatggtagaattacagacgggtatgagtcttccgattgcgatcctactggagaaaaattcagtgactgagctgtcagattatctgacggcgcaatatggtgaaatacagtatggtgaaatacagacgaatgacatagcgacatccgaatttcaggaacccattcaggccgtacagactcaggcgaacaatgttcctgtttctgtcgggcagacaagaaaaccggaaacctatccgttatccgaaggtcaacagggcttatgggttctccataaacacgcgcctcaaaatagtgcctataactgtccggtctgttttcgggtcaatggccggatagatccgtatttatttcaacaggcgttagatttactggtcaggcgctatcccatactggccacgacggtattcgaagaggaagggcttccttatttattcaataatccccaaagtgcattaagggtgaatgttgcaacagaactgtcattgactgagaaagaacttgaagcctatctgtcggagaagatcagccagccttttgattttgacagcgatgccctgttacgggtcaacttgctgtatctgtctgaaaaagaaaccatcattttattgtgcgcacatcatattgttgtggatgctatttcagttaatccaatggtttctgcgttattcaacttttaccaccaattatcagtggataagccacctgtcgttgagacagggaaggacaattggtacgactttgtaatgcatgaacaggcacttttgcaaagtaacgaaggaaaacgtcggttagattattggaagaagacactggctgacgcgcctgtttccaccaaattactggcggacagttcatacctgaatgttgagaaatataaaggtgaaacactgactcggacgttatcctcccatttatccgcaaagttaaaaaccttcgccggcacacattcagtttacctgtcatccgtttttttgagcttgtttcagttagttagccatcgttttacccgacaggacgatattgtcattggtatgccgacagatgccagaacagaagaacatcagcgggaagaggtcggctattatgtttatcctattcctgtccgcagccagctttcgcaggatattagctatccggagtatctgagaacgttacaacagaccgtactggatggtttagcccatgctttaccttttccggtgttggtaagaaccttaaatttgactcagagtatggatgattcgcctctgtttcagatggcttttgtctatcaacaagctatgccgcagaaggaatctcaggctttaggtaagcggatatcagcagaacatttaacgcaatattctcagaccggagaatatgagtttatgttagaagtcgttgaagcagcagaaaccttcacactaaacgtcaaatacaacccgtctttatatcgtcaatcaaccgcactgagcgtggttgaacacttagtgaggttattgcaggaagttattgaacagcctgcacggaaactcattgatttttccctgatggatcaaaaagagtcagtgcaaatctttgaagaatggaatcgtaccgccgttaatctgggggaagcgtgttgcgttcatgaactgtttgagcaacaggcagcaaaaacaccggaagcagtagccgtgatatttgaagatgtcaccttaacttatcaggccctcaatgtaaaagccgaccaactggcgtgttgcttgcaggagctgggcgttgaagcaggaacacgggtcggtatctgcatggagcgctccgtggaaatgatagtgggtttattgggtatcttaaaagccggtggggcttatgtgcctcttgaacccggttatccttcccagcgtttggcttatatcctgaaagattccggggcttcagttgtattaacgcaggagcagcacaaatcgatttttacccacttcaatgggaaacttgtgtttttaaatgcccggcgcaccgaattgcattctcaccatgttttgccgaattcagtgggaaacacgccggataacctttgttatgtattgtatacatcaggttcgacaggaacgcccaaagggtgcatgttgccgcattccgctatcgtcaaccggcttcgctggatgcaggataaatatcggctgaacgtcacagataatgtcctgcaaaaaacaccctatagctttgatgtctctgtgtgggaatttttctggccattaatgtctggtgcgacactggtttttgccgttccggaaggccataaagatcctgattatcttatcaggctgattagagaacagcagatcacaacctgccattttgttccttctatgctgaatgttttcatcaatacgcgaggcagcgataaatgtgtttcattagcgcgtatttttaccagcggagaagcattgccgtatagcgtactggagcgtgtcaatcagaaattgcaggtcaaactccataatctctatggtccaaccgaagccgccattgatgtcagttattgggaagcggaaaaacggaaagataaaaaaacgctgataggcaaacccattgccaatactcaactctatattgtcgatgatcgtatgaatcttttgccggttggcgcaccgggggaattattaatcggcggtgccggtctggcaaaagggtatttaaatttaccggaactgacggcgaattgtttcattcctcatccgttctcctgtgatccgacagaaaaagtctaccgcacaggcgatcttgccagatggtcagtggatggcaatattgaatttttgggcaggattgatacacaagttaaggtcagaggattccgtattgaattgggagaaattgaagaatgcctgaaaagttgtgatggagttaaagcctgcgctgttcttttaaaggaagatgcgcacaccggtaatttcattagtgcttatgtcgtgttgtaccaaaacgtgacgctttccatcaaggaactgaatgcttttctgaaacagcgtgtaccggattttatgattcctgcacagataaatatattggatgaattgccggttacaagtaatggaaaactcgacagaaaagcactgtctgcattagagacaatcccactatccgataaagagtttattgcaccatcttctgctattgagcagcaactggcagatatttggagagatgttctaaatcggacgcaaattggtactaacgataatttctttgaaataggaggaaattcgttaactgcaatcacacttctgtcccgagttcaggatgcctttcctgaaaataagctgtctttaatcccattttatcaggcacccacgatcacagaaatgatgccctatttatccggcatgggaagcgcagaagctgcaaatgcagaaaaggggtttttgtcgttgttgcaccgaagtcaggaagaggagcaaataacgctggtttgtgtgccttatgcgggcgctgctgcgacggtctatcagccattggcacaggcattagcgcaaaaaaatgccggctattcagtgtatggcgtcactgcccccggtaatgcatttggtagcaggcacgaagaaactgatatggattacaacatgctcgctgaattgtgcgctagagagatagtggaacacgtttcagggaaagttgccatttatggtcactgtgttggcagttatctggcactggagattgcccgcaggctggaattaaagggaactttagggcccttgg

SEQ ID NO: 134 - DNA, 31366 bp, Xenorhabdus sp.; identical to SEQ ID NO: 133
  CDS (3569)..(12673)

SEQ ID NO: 135 - DNA, 31366 bp, Xenorhabdus sp.; identical to SEQ ID NO: 133
  CDS (15506)..(24427)

SEQ ID NO: 136 - DNA, 896 bp, Xenorhabdus sp.
  CDS (2)..(895)
aaaaaacaggcaagagcgggtttccgctattttgtcagtgattacggaaataaccgggttacagccagaaaatatcgatttaaaaatgcgtttttctgatatgggaattgattctattgcgatgcagggaatcacgcgggaactcagtcagataacgggaatgatgataaacagtgtagttttggcgcaaaaccctagcgtacatgctttggtagaatatttgagtcaagatgctgaaaaatcgggtaatgaagacgaccttatacagaaaaaaactgaacttcatgcctcttcaccaagagattttgatgaaaaagatgttggcgttattggcattgacttgcgtttgtgtggtgctgaacattggcgtgatgcgtggccattgttcagccagaaaattctgatgcctgaaatttaccctgaagcacgctggcagatgttaccggatgaattaaccagaaacatcgaaagagaaaagatacagggatatttcatgaaggacagtttggctttcgactataaattttttggcctgtcccgacgggaagccatgttgatggatccccagcatagaatgttgatggaaagtgtctggtctgcaatcactgatgcgggttattcgccggaacaatttaatcaacgaaagacggcggtttttgtttgtattgatgcgaatgattacgcattaattgctgaatttgattcatcaattgatgagttctcagttggtgcatcaacaccttatttgtcggccaatcgattatcccatttatttgatttcaaaggtccaagtgaaacactgaacgttgcttgtgcgagtgtttattccgctgtcgaaaaagcaaaggcattaattaattcaggcgttgtgatcaagcagttgttctttagagcac

SEQ ID NO: 137 - DNA, 2082 bp, Xenorhabdus sp.
  CDS (1)..(999)
agaaattatatcacccccaatattgcggaagcagccagagcgggtgtaacaacctatgcgattggcgctgtcattaaaaccgccaccattggtgaaaccagtgccaatactgcaaaatttaatttacctgacaggcaggtgccgctccgcgttttattggctaaagaggacagggataatctggccgtgttgcgtaatatgtatgtcagcagtacatcaggagttaatgtcccgattaaatctgttgcagatattaccttcagctcagggcctgatgccatagaacgcatatccagacaacgtaaggccgtgattgaagcagaccttgacggtattgctatcggaaccgcattagagcagattaatcagttatccacgctggaaaaattaccgccggaagtcaaaaggattgagtatggtgatgttgaatacatgaatgagatgtttgaacgctttttcaccaccataatgctcagtatcctgatggtcttggctatcctgattattctgttcaaagatttcttacagcctgtcaccattctggttgccctgccgttcgctatcggtggtgctattatcgctttgcttctttataatgccacgattgatatgcccgttatcatcggttttttaatgttgatgggcattgtcagcaaaaactcaatcttactggttgagtttattctcgaaaaatcccgctctggtatgtcacgtaatgatgccatcattcaggcagggaaagagcgcgtcaggccaatcatcatgacaacaattgctatgattgccggcatgatccctttggttctgaccagcggtgcagataccaatttccgtgctcctatggctatcgccgtcattggcgggttactcagctcaactttactcagtttactgtttgtgcccgttatttatagctatatggatgattttaaaaattatatcattccacgtctcaggaaattgtcatcggtaacaaaagacgatcttaattatcactgatatgaatcgatctgattctgtacccagcctttggaggaatataaggtgaaaaaacagaccgaaaaacagcgggaaaaacgtaagcatattcttgatgccgccatctcctgttttatcgaaaaaggatttcatgcaacatcgacagcagaaatttgtaaagcggctggcatgagtcccggaaacctgtttcattattacccgaccaaaaatgccattattgaagctattgcagaagaagatagccatgactacgatgagattctggctgcctgttatgatgaaaattcagtgaccatgactatcgaaaaattgctagcaaagctggtagagctctataacgaacccggctatgcccggctcagtatcgaaattattgctgaggccagccggaacccggctattaataagatatttatcgaaaatgaaaaaaaagtccgcgaacatttaacccggctaatcagcaaaggcattgaaaatggggaaattgataaacagattaatgctgaacaggccgcttcctggctgatgatcaccgttgatggttccatcggcagacaaatcatggaacctgattttgcttggcagcaaagtcttgattcttttacctatatgatacgaaaggtttttatgccgtaatccccgtatccatgtactgattaagggaatgaccttaatcagtacaaatggttccttttctgctttatctgtttcacgatactttattaaccactattgttatacccaatcctgataatctctcctatcaaccagtagcgacacgcgcccagctaaggtatcattgccggctatattattggtacacgccctttatcaattgaatttatggcaaaagaacaaactgatcgcaccacactggatttgttcgcagatgaacgcaggcctgggcgacctaaaacaagtccgctgtccagagatgaacagcttaggatcaataaacgtaatcagctacgccgggataaagtcaaaggacttcgccgggtggagctaaaacttaatgaagatgccgtcgatgcactgaatcatctggcaaaacagcgcaatatcagccgcctttagagcaca

SEQ ID NO: 138 - DNA, 2319 bp, Xenorhabdus sp.
  CDS (1019)..(2065)
atgatattgccattaatgaagcctatgagtaccttggaaaaactcatgagttttatattaagatttttgatcgcaattcacttgacaaccaagggctgaaattagttgccactgttcattatggtaaaaattacttaaatgctttttggtcaaaaaagcaaatggttctcggtgatggtgatggtcagttcttcaatcgttttacctccgctattgatgtggtagcacacgaactaacgcatggagttattcaaaatgaagttaatctctattatgcctatcagtctggtgctctgaatgagtctatttcagatgcatttggcataatggtaaaacagtatgccaataatcaaaaagcggatgaatccgactggttattgggaaaaggaatactgggtcctcgttttaacccagagaataaacctgatattgccttacgctcatttataaggccgggtacagcgttttccaacgacaggcaggttgctcatatggatcaatatgaagaactaccaattacactggataatggaggagttcatatatattcagggatcccgaacaaagcattttacttactcgcaattgcactgggaggttattcatgggagagagcaggaaaaatctggtatgaaactttgttagataatcgtttatcttcatatgccacttttgatgagttcgctacattaactattaagagtgcagaaagattatttggcaagaatatcgcacacattaccagagagtgctggaaacaagttggtgtactcttgcctaaaaaaacagcagctaaaatattaatatagtattattgcccaacataaaattaatttcattttaatcatacaattaatatcaaatagcctatttaagctctttgttatatttatagattaataaaaacaaaacaagaaaaaagcatttaattagtagaaaaccttgtaacttaggctaataatttaattgggatcccaaaaaaaatacacagcattaaaaaataaatcggggtatcattatgtacaaaaatacgatacacaacattattcctccaaatttattcgaatatattattaaaaattgcgatgaaaataataaggctccaatattaaaagctttaaatcacacttataatttaatgaattattatgctggcataggaagttcatcactgatatataatccaggagatgatgagaatctggatagaataatctatgatgccgaaaatacagataagtatccaggtacaaaaacaatacggactgaaggctcttctgaaagtaaggatatttgtgttgatgaagcttatgaacatcttggtataacttatcaattctataaagaaatttttggccgtaactcaattgataataaaggacttaagttagtcgctacagtacattatcttgaaaattatgcaaatgcgttttgggcagacaaccagatggtttttggtgatggtatgaaatcgtatcttaatcgcttcacatcctgtattgatgttacagcccatgaaatgacacacggtgtcactcaatatgaagcaaatctggactatgcctatcaagcaggtgctctcaacgagtctatttcagatgtattcggtattatggtgaaacaattttcgaataatcagaaagccggcgaatctgactggctgattggtcaggggatcttcgggccaaaaatgaaccctaacaatgatccaaatcttgcactgcgttcgttcaaggctccgggaactgcgtattcagatgatgatcaaataggtcatatggatcaatatgaagatcttccattttcaaatgacaacggcggagttcataaatattcaggcattccgaatagagcattctacctgttagcaacggctttaggagggtattcatgggagcaagcaggtaaaatctggtacagcactttgacagataataatctgtctaacaaagcaaattttgatgattttgctaaattaacggtaagtaatgcctgcaaactctttggtaaaagtgtttcaaaccttgtcactgatgcatggcatcaagtgggtgtcctgcgctgacgataaaataatatttttggtacaggggttaggaaaacccctgttgttatcggcatatttatttctatattcttttttatcaggctatgattttttctaacctgaacagtttcatcttaattaaccccaattctgtttaagctgtcactggaatatcttcttcttctgagtagaaaactttcagtgatggtttcttctttttatgacaataagcaattaacgccgttacagcagtcaacagaaacccttttata

SEQ ID NO: 139 - DNA, 26355 bp, Xenorhabdus sp.
  CDS (21342)..(24491)
aaaaaacccgcctcggcatcctgcatatccgattcaggcacacccgtattgatgtctccacccgatagcagtaataggctgccaccttttttagcaacttcctgtcgtatggaatcgactaccgttttctgagcagccaatccgtactctccatgatcattctgccaaaagtgaccatgatgatcattggtatgcaagatcgtaatatcgtacgttttatctttttcccaggccgaagccaccatcggtgacaaagccagagaaacaacaagggtacatactgacgctttaaatgaaaatttcatcggatatctccatgctcctaaataaattgactgcatgactgttattgtttttcaatggcgttaaaacctgcctcatttcaaagaaatattacttttttatgacaagaaatatggccggcacaggcatatattcaacaacagaacggactagcggcacagcacttaatgccgtattttttcgatcaagattacataaataagctattaaatagagtgttgttccatttttttgcgataggcatcaaattataccaagatcagcaaaggttttattggaaagtgaatatgcattaaggtgtaacaattaaataaccgttcaacaccatacaacacaggtgacattggtgacgaaatgaacagaaataaacaaaatagtacaattccacaatcaggctcacaaaaaagaacacagaaaacggttttctctattcttagtgcaattagcctgtctcatcttttgaacgatatgatccaatcgctgattctggcgatttatccactattacaatctgaatttacgctcagttttatacagattggaatgataaccctgacatatcaggtcacggcgtctttattacagcccctcatcggcttatatacagataaacaccctcagccttattcgctacccgttgggatgggttttaccctttccggattgcttttgctggcttatgctgaaagttttcctatgatactgctggcagcagcactggtcggtacaggttcatcggtttttcacccggaatcatccagagttgcccgaatggcttcgggtgggcgtcttgggttagcgcaatctttatttcaggtaggcggaaatctgggaagttcacttggcccactgttagccgctattttcatcgcgccttacggtaagggaaatatagggtggttttctctggcagctctgctggctatcatcattctgttacaagtcagtcaatggtacaaaatgcagtatcgtacgacttcacgtcacgcctccaatacaagatttgagccagtttttcccagaaaaatcattgtccgttcattcatcattctactaatactgatcttttcaaagtatttctatctgaccagcattagcagctactatactttttatctgatccaaaaatttggtgtttctgttcaaaatgcacagattcatcttttcgtttttttgtttgctgtcgccgcaggcaccatgattggtggtcccatcggagataaaatcggtcgtaagtatgtcatctggggttcgattctgggtgttgcccccttcactcttctcctgccttatgcatcactattctggacaggtatactcaccgttattatcggcctgatactggcatctgcattttctgccatcctcgtctatgcacaggagctacttcccggcaacacggggatgatagcaggattattctttggattagcattcggtatggggggtgtcggagcagccgctctcggatatatagcagataaaaccagtatagaattagtttataaaatctgtgcttttttaccacttcttggcattttcactctattcttaccaaatataggaaataaacataataaaatcagtacgaaataataaaaaatattcattatttattatcatttctctttgtaaacatgagtaaataataaaaagatctacataaaataccattacaatgctctttatgtagatcaccctcatttccccaataaagtatatttttcaagcaaacattttaaattatttgtaaaattaataattacccaatctgataatacatcctattacatttatccaacccagaaggagacttgatggagcattcgacacctctcatcacgactattgttggcggttttctcctcgcctatctgcttggcatgcttgcacagcgcctgaaaatctcacctttggtaggttatcttatggccggtgtgcttgccgggccttttacaccaggttttgttgccgatacttctctggcgcctgaactttcagaaattggcgtgatcttactgatgtttggtgtcggtctgcatttttcactcaaagatttattagccgtaaaatcaattgcaatcccgggagcgattgcccagattgccgtagcaacgctattaggagccggcctgtcaaaattactgggctggggtttattcagcggaattgtctttggcctctgcctgtccaccgccagtaccgtagtactgctcagagcactggaagaacgccaactcattgacagccagcgggggaaaattgccattggctggctgattgtcgaagatctggcaatggtgctggctttggtattattgcctgcctctgcgggtattttagataaccataatactgatatcggccaattacttctggaacttgccattaccgtcggcaaagttgtcgcatttattttattgatgatttttgtcggccgccgtctgatcccatggctgctggcaaaaacagccagtacaggctcgcgcgagttatttactctggctgtcctcaccatcgccttaggggtcgcctatggtgcagtggagctgtttgacgcctcatttgcactgggagcattttttgccgggatggtactgaatgaatcagagctgagccatagagccgcacaggatactttacctctcagagatgcttttgctgtgctgttttttgtttcggtcggtatgttgtttgatccaataatcttgatccagcaacccattgctattttaggaacgctgaccattattattatcggtaaatctgtcgcagcactgttgctggtcaggcttttcggccactcacgacgtacggcactgactatttctgtcagtcttgcccaaattggtgagtttgcctttattctggctggattaggtgtcactttaggtgtgttagatggtgatgcacgtaacctgatactggcaggggctattctttccattatgttgaatccgattttgttcagcctgttggatcgctatctggaaaaaacagaaacgatagaagaacagatactggaagaaacattagaggaagaaactcaaatccctgtcaatatttgcggccatgcgattgttgtgggatatggcagggtcggtcgcctgctttgccagcgtctgcaggaaaaacattttccactggttgctattgaagatactcgtgcccgatttgaagagctgggagaaatggggattagtgctgtgatggggaatgcggccagagaagatatcatggcattagcaaggctggattgtgcttgtgcgctattcctgactatcccgaatggttatgaagccggcaaaattatcgagagtgcaagagcaatcaggccggatatcaatattatcgttcgcgctcattacgatgatgaagtcacttaccttacagcacgtggcgctgatcatattattattggcgaacatgaaatcgccagggcgatggctgattcactccctgaatccacgcctgactgcccgatagcactaccatcagcattttcaccaactaattcatcagcagcataataaattgattaatagggagtatcccaaaaattccaagggggatactcctgaatcagaaattaacgttcccagtaagactcttccagactatcttccctttctggtaaaccgcgtgtcagacgtggagcatgttgactcaatacctgatagctcactctgttcgcatacttacacacctgagccagagaagaatacgtcaggcaggagcgcatatgtttactcgaattagggacattcatacgatgataactattagccgtaatatcatgcagtaaggcagacagtgcgccatctccagcaccattcgtattcataattttttcaggtcctcccatatatggctcaatatgagaatagacccgcataggattctgacaatcatcctgacgcatagcacgactgaattcaaaacgattgaattcagcaatcgctcccggcaataatgggtgtaatgtctgacgcttggactcttcttctgtataaccggccatatacaaccccgccgggccagccgtacacaatacgaggtcgacccaattcagggccatatctgctgccaacaaaggatcactaaaaccggtcagttccagagcttcatcttcattcatggcgaccacagagacattctctgccagaaaatcgcgccaccactgaggatcgtccgcaataacatattttgtacccagtgtcagaacaactggcacattatgtttcttcgcgtattcaatggctttcatggttgcttccggcatcggttcacctgatttacagcgtaccagataggccgtgattactagtgctgatgcctctgcaataatatgctcaggaatactttccggtttaagctgattcattagccccggactgatggcaaatgtcctttcaccattttcagtgatcagagtaaaacagcgaccgattgggccatcgacgccctgaagatgattcaaatccatccggctggaagtattacaaagataacaataggcatagctgccgatttggatgttattgcacatggtgccaagcaacacagatttgtcatccgccagcacagaatagttatgcagagtattaccaatcgttccacccgcaaattcatggctgatgaggttattatctgccagttcattgtagagcgcttcagcaacatcatcttcaataactaatgaatgtccctgactcaggttataacgttggataaagctttcatcaaccttcgcttcaatatctaccaatatctggtcaataccaacaatatatgctcggttattctcagtatccatcatctctttgatgggctgaagcagagggtctctcagactgacaggaaaatagtgtttagatttgcgtttaccggggaatttcataattgattgttgctatggagccaaaacatgcgccatattagcataatcccactatgaaacaaaaagcacagtattcagtattgatgaaaagaaacagccaatgtgataacacactggctgctaaagttcagtgattatgaaccgctgagaattaaactcagctcataagcttcaggctgcttgcttctgacggctacgcaccatatggcgcatcagaacaaacattactgacagaataaaaccaataaagccagcaccaatcagaattaacaaacgcttaggtgaatctttcgccgttggctcgtatggctcctgcatatatttgaatggctggaaatcaagcttatcaatatttaccgcttccagatttttgatataaagaagacggttacgtaagtcaggatctatcgttgttgcatcggtaatgccttctgtgatctgcaatttacgttgcaacgcatcagtacccagagcgatggaataatccgggtcatccttaacgactgcaccaccactagagactggtttcttaatacccgctgaattggcaatagaaattgcatacttcagtcgttcaatatcggtagaacgcatattggtgatacggtctaaatcaatatcatacatttttttcgagtaaaccagtttctgactcaccgcatcattcagttcatcttttatctggtcacgaacaacagaggagataaatttgatgtaaccagacaataatttgtatgaatcttctgctgtccccgcactgaaagaaagcgttgtttcataaaattcatcatctttatcttttttattaggtacagacgaagagatatttttatttacaatctgttcaatcagacttcttttagcctgtgccgtaatatcttcgctactggcaagcagtgttctgaagtaatcggtatctaccagatattcttcacgcagtacacgggagttatagttttcaataaaacgcttaaatagtgaatactctgtaatctttggatcaagactaagaacattcagttctgttaaaacattttttaatggctgaaactgttccagttcaggttgcaccactgccgccgtactggtccatttttgtggtaaaaatgacgcaacaccaaagccaatcactgcaaaaatgaaggatactgcaataatcaaatattttgactgaaatattacggagaatagttcaaacagatcaatttcatcatcttgctttggatgataatagtctgcatgttcctcataaaagtctgtatgcttaacgggtttattactcattatctctatgtccaatccaaataattttgcttctcgttattccctgccagattactgtcccagcttacgttatatgttgattttgaagcaatattcaaaaaaaatcacacaatcggcagaatacacaccgactaactataagcaaaaatatccatatctgccaatgtcctttcagtatgaaacccagccataatccataactgccagttattcgttatctcatggcatcattgattaattgcatgaatagtgaaatatgcgcctcattatcgttaagtgctggtatatattcaaactttttcccgcccgcatctaaaaaaatagctttattctgctgcttaatttcttccagtgtctccagacaatcggctgcgaatccgggacacagtacctgaatatgctccacattctgctctggcaacagggctattgttttatccgtatagggtgctaaccacggtaaacgcccaaaacgcgactggtatgtcatcataattctatctgccggatagtccaacaattccgttagcagtttagttgtcgccagacagttctgtggataaatatcccccatttcagccagacgctcagggataccgtgataggaaagaatcaggcgatcaggttgaccatgcttttcaaagctctgttctacagtttcctttaatgcggcgatatatgccggatgctgggcgtaactgcggataaatttcaaatgtgggatagtacgatatccctgtaatattttgctgagactatcaaatactgccgctgatgttgtacttgaatactgaggatacaaaggaagtacgatgagatattcaacaccctgctgtagtaatttatcgactgcctgagttaatgaaggtgaaccataagtcatccccagctcaacaggtatattacccagtttttcacttaatcgctgtttctgacgtttgctgtaaaccaataaaggagaaccttcatctgtccagatttcctgatacagcctggctacacggaaagaacggaaaggaagaataaagccatacaacagaggcttccaaatcaatggcggaatatccacaactcgccgatcacttaaaaactttgccagataacgccttattgcagcaggtgtcggcgcgtctggtgtgccaagattaactaatagcacaccataattacgattactcattattcaacactccacccattaaagtgacggataattcaggataaaactcggtgatagtcacatacacacaatggatttcaaggtgcgtcgcggcggcaaggaaacgcatccccgggagcatagataactatgtgaacgggggtgagtgaacgcagccaacaaagaggcaacttgaaagacgaagggtataatacattttatgggggggatctggtacggaaaggtgaaagtcaggcggtattcacaccgcctgctctatgcttcaggatcaaattaatctgaaatctgtcgcacaactatctattcgggatactaatacctcagggcactaataccccagagccttaacccagaatgcgggctaactcttcactgacttcagcaacctgacgggttccatcaagtttgaagtagcttgtattacctgcctgtgcttcttgctgatagtaagaaaccagaggtgcagtctgagcgtggtattcaaccagacgtttacgaaccgtatcttcctgatcgtctttacggacagtcagttcttcgcctgtaatatcgtcacgattttccacttttggtggattgaatttgatatggtaaacacgacctgatggggcatgtacacggcggccgataatacgatcaacgataatttcatccggcacatcgaattccagtacataatcaacactgacacccgcttctttcatagcatcagcctgaggaatagtacgtgggaacccatccaacaagaacccgttacggcagtcatcttgtttgatgcgctctttaaccaaagcaataaccagctcatcagtaaccagtttgccattatccatcagttcttttgcttttaaacccagctcactgcctgcttttactgcggcacgcaacatgtcacctgtcgaaatttgagggatcccatatttctccatgataaattgcgcctgagtccccttaccggcgcctggcgcgcccagcagaataatacgcatcgcgtaaatccccttgctatttgcttttcgtattttttaaagaaaacgaaccaccataccactggaatgatagtcgctcaagaaaacaggtaaacgttttcgcgcttatcaaaaaacaaaccacgctccattttccgttgaagcgtggtttattggcataatttaaacgatattacgcgctttcagctaataataattgattcatacggcggataaactggtttggatcatccagcgttccacgttcagcaaacagagcctgttccagtaacaactcaatccagtcagcaaactggctgtcatcctgaatttcagcagcctttttaaccagattatgatccgggttcagttcaaaattatagctgacttccggtgctgactgccctgccgctgcaaacagtttcgccatttgagtggtcattccgttagcatcagtggtcactatcgccggtgtatcagtcagtcgatgggtcagtttgacttctttcacacgctcgccaagcagtgtcttcacacgctcaacgaatggttccagttttttatcttcttcttcctgatctgctttgttttcatcagccagtttatcgagagactcatcagctttgctgactgactggaatgattttccgtcgaattctgtcagatagctcatcatccattcatcgatacggtcagataacagcagaacttcaatgcctttcttacggaacagttccagatgcggactatttttcgctgcagcataactatctgcggtaatgtagtaaatcttctcctgaccttcggtcatgcggctgacgtattcttccagagaaacagtttgtgaagcactgtcattatgcgtagtcgcaaaacgcagcagcttagcaatagcttctttatttccgccatcttcagcagggccttctttcagaaccagaccaaactgctgccagaaagactggtattgctctgcatcatcttttgccagtttatccagcatttgtaatacacgtttagtcagtgcgctgcgcaggttacgagtgattgaactgtcctgtagaatttcacgggaaacgttcagtggcaggtcattggaatcgatcagcccgcgaataaaacgcagataatttggcatgaactgctcagcttcatccatgatgaagacacgctgtacatacagtttcagcccgtgtttatgttcacggttccacaaatcccatggtgcctgagaagggatatacagcagactggtatattcctgctttccttcaacacggttatggctccagctcagaggatcagcgaaatcgtgggaaatatgtttataaaattctttatattcatcatcgctgatttcagctttaccgcgggtccacagtgcctgtgccttgttgattttttcccatgctacagtaactgaatcatcttcttcatttttagtctgggtttcaatttcaacaggtaaggcaatgtggtcagaatatttgccgatgacagaacgcaaacgccagtcattcaaaaattcatcttccccttcacgtaaatgcagggtaatttctgttccacgttctgctttttcaatatcagcaacagtgtaatcaccttcaccggttgattcccagaatacgccctgttccgtcgccgcgcctgctgcacgggtacgtacagtcactttatcagcaacaataaaggaagaataaaaaccaacaccgaactgaccaatcaattggctgtctttagcctgatcagagccgatagattcaagaaatgccttagtaccagattttgcaatcgttcccaagttatcgatcacttcatcacgggtcataccaataccattatcactaatggtaattgttttattctctttatcgaaagccagacgaacacgcagttcaccatcattttcgtacagctctggcgctgataatgaacggaaacgtaatttatctgccgcatctgatgcgtttgaaatcagctcacggaggaaaatttctttattggaatagagagaatggatcatcaactgtaacagttgtttgacttctgattgaaatccacgggtttcctgatctttcatgctcatttattacctcaatctaaatccagttcagatatgtaaaatcggacgatggtaatcagatggggataaaacttaagactttcaagttcagggaataagaagaatgtgaaattaattatttagactttaaaaaacaattagttatttaatatattatggatggaggcgggtttcgcaacaccatccattgggattttccattaaaaaatgggggtatgatcacaaatcagtaattctatggcgaccagcaagggaatgggacagtgttgttccgtctaccatttcaagctctcctccaacaggaacaccatgagcaatacgactggcagtcacaccatattgcgaacacatttcagcaatatagttcgcagttgcctctccttcgacagtcggattagttgccagaataatttccgacagcgtttcagaagataaacgttcttccaaacgatccaagccgatatccataggaccgatgccatccagcggcgataaatgccccataaggacaaaatagcgccccgcaaactgacccgtctgttcaatagcgtggatatccgccgggctttcaaccacgcagatctgaccgttttgctgacggcggggattggtacaaatcgtgcactgttcctgttctgtaaacgttctacagtcctgacaatgaccaatctcagacatagcacgtgtcaatgcctgagcaagccgcataccgccactgcgatcccgctgtaaaagatgaaacgccatccgttgtgctgacttgggaccgactcccggcaagcaacgcaaggattccatcagggattcaagaagagggctggtttgcatcagaaaggcatcttaaagccgggtggtaactgcattccgctggaaacactagccattttttctttttgagtttcttcaatacgacgggccgcatcattgaatgccgcagcaatcaaatcttccagcatatctttatcatcttccatcaggcttggatcgatttcaacacgacggcagttatgtgcgccattaatagtgaccttcaccagacccgcaccagattcaccagttacttccagatttgcaatttcttcctgcattttctgcatcttatcttgcatctgctgggcctgtttcatcaaattgcccaaaccacctttaccaaacataattttctctctttgctgtagacacagtatcaatacacactgcggggttaaacaggccggatactttcttcatccacttcagcatcaaacaattgttgaagtgtttggatcgttttatccgaaataatggattggcgcgcttgtgccaatttttcttcatagatggcttgtcgccactccagcggtgtttttactgctggattatcatcttcaataatactgagttcaataggttttccatgcaattcagtcaacgcttccgataaagatctctgtgccgaagccgaatttaagtgacgttgctttgaacgcagatgaagacagaactgattttcattaatctgctctttaaatgcattcaaggctacctgctgaaccagtttaggaatattcagattatcaatttcagccgcccattgatcccgctgtctggattcaatagccagctttttcaccaattcaggtgttttttcatattcaagtgctgatttgatagcttttggtgttgtaacaacccgcttttcttcaatgtttttagcacgccaccgataagcctcttgttttaccggtttaacttcacgtgccttgggaacaaaagactggggccgttgttcggccaccgcaaccaatcgctccagtgccgaactcgccggcttcgtcttaacagacgctgccggctcagccttttttggaggagcacttccttttgaggaagtgccttcctgccgcgaaagcagattttttgcctgtagtaattttgcagtcgggctatcagcaactggctctaacccctcccttggggccattctctgtttctgggcagagggctgtttatctgccataccagattcagggctgacagaaccaaaattatcagaaactggctgttgctgaggaggcatgaatgctatacccgatgcgaccggtatctctgcgttattagagacgggtatttcttcaattatcgtttttggatgaaatgccagagcacgtaataacgccatttcaacccccatcctacgctctggggcataggggagatctttacggccagttaataacgcctgataataaagttgtaaatcgctgggtggcattgatcttgccaacaaccgcaagcgcccttctgttgaagaaggttcaatctctggttgctgaggcagcaactgaatcatcgcaacacgatgcagcaacgataacatttcgaccagtaggttttcccagtccataccacgagctgcgacctgttccactaaagtcagaagtttctgtccatccgcgcgaaccagagcttcaaccatttctaaaggctgttcatcatccagcgttcccagcatctggctgacaatatctgctgtcagttttccgccaccaagggcaatcgcttgatcagccagactcaaagcatcacgcatactgccgtccgctgcgcgggccaatagctgacgggcccgggcttcactctctatttgttccgcattaagcacatgttccagctggcctgaaatctggctgacatcaagtgctttcagatggaattgtagacagcgcgaaagaatggttacgggtaatttctgtggatctgtcgtcgccagcaaaaatttcacatgctccggcggttcttctaatgtcttgagtagcgcattaaaactatggcgggacagcatgtgaacttcgtcaatgaggtaaactttgaagcgccctctggctggggcatactgcacgttatccagcagttcacgggtatcttctacttttgttcgtgacgcagcatcgatttcaatcagatcgacaaaccgcccctgctcaatttcgagacagttaacacactgcccacaaggcgtttttgtgatacctgtttcacaattcaggccctttgccaacaggcgggcaatagtagtcttcccaacaccacgtgtgccggaaaaaaaataagcatgatggaggcgctggtgttcaagaccattagccaatgcagtcaacacatgttgctgaccaatcacatcagaaaatatttgtgggcgccacttacgggcaagtacctgatagctcatgaataccggggaaattgaacacgactgcctatcatgctagcacagcctcaccatagtcggcgaggctgatgtatcaattatgcaaaaatcagggcaatcaatacaaaaacaagagcgatcagtggcctggaaattcaacaagggtgtagctatcaatgccctgatttttcaggcgttctgtgcctcccaaatcaggaagaccgataataaaggctgcttctgaaacctcaccaccaagacggcggattaagctcacagttgcttcaatcgtgccaccggttgcaagcaggtcgtcaacaacgagaactttatctccggctttgatgctatctttatgaatttctaatgtatcagtaccgtattccagagcataagtttcacttaacgtctctctgggtagtttgccttttttacggacaggaacaaaacctaccccaagacgcagtgccactggtgccccgaacaagaaaccacgagcttcagtaccgacaattttggtaatacctttgtcctgaaaatgggctaccaataaatcgatcgtcgcctgatatgcaacaggattatccaataacgtggtaatatcgcggaaaagtatgcccgctttcggataatcaggtattgtttcgatactatctttaataaattgcagtttttgtgcgttagcggtcataatcaatgccagccagttaaaaaatgaaaacgctaaaatctatgcaaactaccgggaaaaagcaacaacaaagcaagttgtcgcttaatttttgttgatatttatcaagcttatcctcagctgatccctgcgtatcgttaaacacaacgcgggtcagatgaaatagcattcaaccaaaagattatcgactataacgggatactgatgggtatacaaaatttattagatgtgcttgaaaaacaaatcagtatgctagcggccgaattatcttccctgcctgatataccattttcaattgcccgttttgatcaggcgttattccacagccatacgaataaactcagtggctatatgctggaaattcatcagaatatggatcagctgaaaagctgcgtccgggataatcgcactgtacaggttaaatttctctctgaacgtttagtgatgcaaatagaagcactgaaacgggaattatccacgcaggttctccgcaagcaggaagataaattcgggcgtcagtcacaagagcaggatctttatcatcgtctggccgaacatcaggattatgaacgccgtttaatggcaatgattgatgaccgagaattacagctggctcagaaagctgagtccgtcgataaatataaactgcaaaaagagatcgccgctctggcaggaagactggctcgttgtcgtcaggcgttaatgcgcatagaaagaacgattgaaaagcaggaacattctgattaatgattagaggaatcccccattatgtcactcaaaaatgcgccaccagagatcaagcttgcagttgatctcatttacctgctcgaatgtaatgatatttcccctgaaacggctttggcagcattagatatcgtcagacaagatctacagggcaaattaaaacaattacctcaacaatctgaggaacattcctgattgtacagcccggaatgttccccttttatacccgtcatctttcaaactgcctttttgttggctgcactcgctcaccccagtcaccgtttttataaacatacggttacctatgctcccggggactcactcccttgccgccgcgatgcaatttgaaatccattgggtatattatgattatttaaggtaagaacggcttatcatcaggcataggaggttcaccagtctggtgctcagaaccacttatcgaccttttaacctcttgtaggctattgccctgaccgttatgcaaataaacttccagttgattgaaggcaatattaatatcattttcccggcataatttatctatactgcggtttacctcatcgactgtacggctgcgatctcccagttcccttacataaagcctcaattcatgatccagcgtgctggcaccgaaactcataaaataaacctgtggttccggttcactcattacacgatgattacttttcgccgcctgtagcatgacttctttcaccttatcgagatcggaaccataggcgacaccaactttaataataatgcgcgtgatagtgtcagaaagggtccagttgatcaggcgttctgtcacaaaagcccggttaggaataatgacttctttgcggtcaaagtcagtgattgttgtagcccgaatacggattttactgactgaaccggaataagtccctattgttacggtatccccgatacggacagggcgctcaaataaaataattaagcccgaaacaaagttggcaaagatttcctgtaacccaaatcccaaaccaaccgaaagtgccgctgccagccattgtaatttattccacgaaactcccagtgtgcccagcgcactaattccgccaacgccgatgattaaataagtcagcgttgtcttaatggcataagaagaaccctgttgtagctgtaagcgggacaacactaatacttccagtagccccggcagatttcgcatcatcacccatgaaatacccagcattgcgactgagagtgccaaatctttcagggtaacgtgttgcagaatatttccctgatcggttgtcgtgctgtattgccacaggtttattccatcaaggtaagagaagaccgtcaccagatcagaccaaatccagtaaaacgccataaaaaagatcaaaaacagcaccatggtcgttagacgtaatgattgctgattaatcagctccaaggccattggcggttcttcgataacttcaccttccgcaccttcttttgcctgtgcctgacggcgagacatggcccggcgatatgcgatacggcgggcagcaagacttaatccacgtaggcaggattgatagcaaatatgccagagaagcagcaaataagcgctgtaaagccagcgttcagacaagcgtaacgtagtgtaaaaataacctgacaccatcagcactatcagaatcagtggtgaaaaagtcaacattgtcaccacgatcgtgcggatcatatgcgaacttttttcacgccatacctgacgacagaacggaaaaacaaagataaaaacgaagagcaggcaaatcaacaccgtacattgaccgataacatcatcagccaaacgaagcggatgcttaactcccagagttacccaaaacaaaatcggcagtaaagcgactgataatctgaccagatttttgcggaataaggaacagacttctctatcgagtgaaaaatgctgttctcctatcccgcctctttccagaatttggtaactggaaccatagacaacccagaataaagccaaatgactggagaaatcccatatcattcctcccagttcatcctctgacttcgaataccaataacctatagccagaataataaacgccaatggcagcgtttttatcagcgtcagaaccaaagccagtggagtatgtagctgactatccctgcgtagctgccctatttcagctgaaattttcttcaaatgtgcgttaatactttttgtctgccaacgcagaaacaggcctaccagtaatagaggaatgacaaaatggacagagttctgcaacccggaaataatccctctgatagtaaagtgcacactaaagtgagtcagctcttcatgagctaaaagaggcaatgatttcagccagacccagttcatcggcttattactgttaacccagaaaatctgttgggcgagcgtctgttccagcgattgtgtcacattcaacaattcctgttgatccatctgtaaattaatcgcttgtgtgatctgctgtcctaactggttattcaattgattcagcaactctcgacgaatttccagcaattgccctatcgcattacggatttctccaacagcttcctgagattcattttttatatcattggcatgttgattcagtagttgattaatataatcgtccactaaataaagttgatcacgctgttgtgcgatttcaaactgctccagccgtaaatcagcaatcttcgtaggtaaatcctttgtcaggacagtttggggaacctttagctgttcctgaaacaaaatacgcgataacaataaactaccgcgtaacaccttaacctgttcttttaaatcacgttcagactggatagctctgtctaaaaaattcttcacctgaatttttttcttcaccagctgattattatcccgtgtcgccgctaccagacgctcactgaattcacggttcaccataatttcttctctgaccagcggattagactgaatatggggactggtatcgtctgaactctgagcttctttggcggtttcctccgaatcaattagatgctttccattgaccatatcctgaataaactggacatgccgctctaattgttcaatctgaaaggaggtataatcgcgctgtagctgtagaagggtttgcagctgtgtatttgcgcgcaaagctgatttttgatattccttttgctgcgtcaggaaagcttgctctacctgtaataattcaatctcagtatggcgaacgtccgattgctccgtaacagcattattaagcaaattacggagttgctgtaatctttggacattattaaacagcagattttgtgtccgttcaggctgtgtttgcaacccaatcagttggctattgtagttagcgagattatcctgcgctttttgtaaactgttaagtgtaacactctgtttagattcaagttgctttagtgataaagtcgccagattatgcttatattcatcctcattttgttgggaattatttttcaggctcgctaattcagcggtgagctgttgtgacttctgaggtaattgttgtaaattttttgccagctgctcagaatcctgctgaatcttctcgatcttatcaaagaaagaaagtgctttttccaaatcagcgatcgaggctctctcttcaagagtatgctcattacggtccgttaacaccttaagctggttctggatatcatcacgtgttggtacatcattgctgaacgcagccgaggcagggtgaagaaaaaacaacagaaaaaaaagcaggctgattaggcccagctggcgaaaatataatatatcgggtcttttattgcatgacaggcccgttttgttgagtaagacactcaaaccgcggttaaattgaaccatgaattaatctactcatcgtttacagataatggaatgatagcactgaagtatcggcaattctgctcgttaagaaagtgccatcaccataatgtatagatgtatagcctttaccgcttaattgtctttttattggtttcacttactcagaacgaagctcttcaatgcgacgcaagtgacgactatattttagggtgtcaataaagccatccaccagagattcagattgtgcctgaatattaaaactctctggtgcaaataaccagttttcaagcaacccggtcattaatgcccttaacatgatagctgaacgccttatatcaagatcataaggtaactctcctgactgaatacacataaccaacatgtcttctattttttgataatcagaaatacagacttctctaatctgttcagctaatgaagacatttctccaacaaactcacatttatggaaaaatatttccattaataaacgattttgagaatcagtcgtcattacttttagtagaaaaattaatatatatctcagtacgaggagtggattattaggatattttgcctgatactctttctctaacgcgtctattttgtttgctggcattttgcacacagcaaaaagcaaatcagttttatttttaaagtgccagtaaattgcacctcgcgttacacccgctgcaaccgcgatttcagacaatgatgttgcagacacaccacgttcagaaaaaacctttatcgcggcttcgataatgtgttggcgggtttcgttagcttgctgtttagtttttcgtgccattttcatgccataaactttgtttttgactcaaggctgatttacatacattcatgtatgtttgtactatagcaccgctcattaatgaagtaataatttcactcgttaacgctcataaagctcgagagtttacattgaaaaattgaggtttacttatgctaaaaaacagaggggttttgcctctggccacattactggtactttcaggcagcttcattctctcaggatgtaacgataatcaaaatactcagcaaagggctgctggcgagcaggctcctgaagtcggtatcgtgacgctcaaagctgaacctctgacagtcatcactgaattgccgggcagaacttcagctttccgagttgccgaggtccgtccccaagtcagtggcatcattctgaaacgtaattacaaagaaggcagtgatatcaccgccggagaatcactctaccaaattgatccagcaagctatcaggctgattacaataaagccaaagcaaacttagccagagcgacagcaaatgaaaacgtcggccatttaactgttgaacgctataagccactgctgggaacacagtatgtcagtaagcaggaatttgataaagctaactctgattacgctcaggctgtcgcagatgtgcagtctgctaaagccgcgctggaaagtgcccgtatcaatttagcctataccaaagtcactgcgcctatctccggacgtataggtaaatcggctgtgtctgaaggtgctttggtttctgccggtcagacaacggcactgacgagtgttcagcaattggatccgatttatgttgatatcacccaatccagtgatgattatctgcgacttaaaaatgaaatcgcaaaaggtacgattcagcgagaaaacggcaagcccaaaattcatttagtcacagatacaggaatggaatacagccggacgggccaccttgagttttctgatattaccgttgaggaaacaacaggcaccatcacaatgcgcgcagttttcccaaatccgaatgaagaactccttccgggtatgtttgtccgtaccaaactggaggaaggtgttcgccataatgcgattctggtaccacaacaagccatttccagaacgcctcgtgggcaggcaacagcactgattgttgataaagataacaaagtagaattgcgttatctcaaagcccctcaggcaattggtaataaatggctcgtcactgaagggttgaaggccggggataaagtgattgtcacaggtctgtttaaagctgcgccgggagctactgttcagccaacagaagtggatctggatgccaaacctgaaacaaataaaactgaatcagccaaaaaatctcaataaaggagttggggattcatgcctaagttttttatagaacgaccaatctttgcatgggtaattgcgattatcaccatgctcgctggtctgttggcgataatgaaattacctgtggagcaatatcctgccattgctcctccatcgattgttatttcggctacttatccgggagctgacgcaataacgttacagaatacggtcactcaggttatcgagcaaaatatgaatggtatcgataatcttgtgtatatgtcttccaacagtgactcagcaggccgtactagtatcactctgacttttgaagcagaaaccaatgctgatacagctcaggttcaggtacaaaataaactacagcaggcgctccctctgttacctcaggaagtccaacagcaaggtgttagcgttgagaagacaaccagctcatttttaatggttgcgggtttcatttctgagaataataccatgtctcaggaggacatttccgattacgttggagccaatgtcaaagattccctgagccgtgtggctggagtgggtgaagccatgcttcttggcactcagtatgccatgcgtatctggctcgatcccgataaactggtcaactataaaatgaccgcgctggatgtcatgaagagcatcaaggagcagaataatcaggttgccgccggacaattaggggcaacaccttctgttcccggtcagcgtctgaatgtttctattattgcccagactcgcctgagctctcctgagcagtttagtcggattttgctgcgtgttaatcctgatggttccaaaatcactctggccgatgttgccactgttgaactcggtgcccagcactatggttttcttgcccgatttaatggtaaaccggcatcaggtataggtatcaaattagcaacaggtgccaacgcgctggatacttctaaagccgtcaagaaagcattgtcagagatgcagccttacttcccacatggcttaaatgttgtgtacccatatgacaccacccctttcgttaaaatttctattttcgaagtggtgaaaacactgatagaagctattctgttggtatttgttgtcatgtacctgttcctgcaaaacttccgggctacactgatcccaaccattgctgttccggtcgtattgctgggtacatttgctgttctggctgcatttggttattccatcaatacattaaccatgttcgctatggtattagccatcggtctgcttgttgatgacgcaatcgtcgtagtagaaaacgtcgaacgcgtcatgcaggaagaagggctttcaccaaaagaagcaacaaaaagatcaatgggacagatccaaagtgctctggtcggtatcgcgctggttctttccgcagtatttgttccgatggccttctttggtggcgcaacaggggcaatctatcgccagttctccatcaccatcgtttcggcaatgatcttgtctgtatttgttgccctgatcctgacgccagcactttgtgcaacaatgcttaagccgattgccaaaggcagccacggtattcagacaggtttctttggctggtttaaccgtttattcgaaaaaagcactcatcattatactgacagtgtcgggcgtatgctacgcggtacaaggcgttatctgctgatttatgtcgtgctcatcgcaggaacggctttgttattcattcgtatcccggcatctttcctgccagaagaagatcagggtgtattgctggcaatggttcagttacctcccggctcgactcaggagcaaacacagaaggtactgaatgaaattaatgattacttccacaccaatgaaaaagacgttgttcagtctgtatttaccttaaacggctttgggtttgccggtcaggggcaaaatatggggctggcgtttgtcagcttaaaagactgggatgaacgtaagaaagacaaagataaggttccggcaattgtaaaccgagctaatattcgtttttcacaaataaaagaaggaatggtattcgcatttaacattccgtctatcgtggaattgggctctgccagtggttttgacttccagttaattgataaaggaaatctcgggcatgaagcactgacaaatgcccgtaatcaattactgggcatggcggctcaaaattcagatgtactgaccggtgtgcgtcctaatggtcagaatgatacgcctcaataccgcttctacattgatcaggaaaaagcagaagcacagggtgtctccatcaatgacattaatatcacgctcagtacaatgtttggtggtacttatgtgaatgattttattgatcgtggtcgtatcaagcaggtctacgttcaagctgatgcccgtttccgtatgttgccaaaagatattgccaaattatatgtccgtaacttctacggtgaaatggtgccattttctacattcatggacactaccaaagaaccgtggatctacggtcctccgcgccttgaacgctataacggattaccatccatggaaattgttggtgaagctgtacttggaaaaagtactggtgaggcaatggctctgatggaaaaacttgcgtcacaattgccggcaggtattggctatgactggacgggaatgtcttatcaggaacgactttcaggtaatcaggctccggctttatatgccctgtctctgcttgtggtattcctctgtctggcagccctgtatgaaagctggtccataccattctctgtaatgttggttgttccattaggtgttattggtgcattactggcaacctttatgcgtggtatggataatgacgtctactttaaagttggtttgctgacaacaatcggcctgtctgcaaaaaacgccatccttatcgttgaattcgccaaggacctgatggaaaaagacggcaaaggactcattgaatcaacgatggaagcagtcagaatgcgcttacgccctattctgatgacatccctggctttcatgttaggtgtcatgcctctggtactgagcaacggtgcaggctccggtgctcagaatgccgtaggaactggcgtactgggaggaatgattgcagcgacatctctggcaatttacttcgtccctgtattcttcgttgtgattaaacgccgttttagcaagaaaaatgaggatactgaacacatttcatcttctcattaaattcaataaataactttaaaggccactccggtggcctttaatattggaaaaatggcattagatgaaaaatttttttactgatatttcaacaaaagacaaacactcttacagtaagcaaaataaatatttataaaaaataccttacatttaaaatgtgatacctttacgttttttataataaagggaagataagtcggaaacttagcatctttttcttctgattagccatttaatgataaaaaatgttcccccacgctgatgacatatgcaataatggcatcacattcatttttaacgctgcaatacaattcatatataggccaaacccaagctgcaagcataaagccggcttataaacactatggtagataactatgtataaaacgcgatgtaagtaagtacacctaacagcgcagccagcaaaaaagtagcaatttgaaagaaggtaggtatataatgatttgcgtacctattgctataacatccactatattagtataattcaatatattcaatgatacatggcttatacccacctttttagctgatagctagcctttggctgaagccagaggtaaattggcaatcatttaaatgaactggtggtgaacagaaaaacagagttttattattaataaataataatcatgttttgataggcttaattttaaaagaacgactataataattgatatgtataagccttagttcaaataagccgtgcgttgtttacgggagggtgtttatggatgaatattcaccaagaagacatgatattgctgaattaaagtacttatgtgaaaatttaattcacgaagcattttcagtgttgaatcgcactgataatcattggatcaatgatctgacttccgaaaaaaacttaagactaaacgaattgattgagcacattacggcgtttgtctggagttttaaaattaaatatactgataactacaacctcagtaccttaattgataaatatctggatgaaacatataatttgtttggtagtgataagataagctttgttgaactaacaaactggcaaagaacaaacgaacacttaacgagtattctactacatgatttgaacgcttctttaagcaaaatctgataaatatattcttaaccatttttataccaaataagataaggcgaccatgactaaaactgactatctgatgcgtttgagaaaatgcacctctattgaaacgctggaacgtgtaattgaaaaaaacaaatatgagctttcggacgatgaactggaattgttctattccgcagctgaccaccgcctggctgaactgaccatgaataaactctatgacaaaatcccatcgtctgtctggaaatttgttcgataatacgttgtcgtgatcagataggaagtagtgaaggccggtaactattatcggctccccatatattggttatttcttgattaaactgaatatgggatgagaatagcggaccgaaaaaatgggtgagggctctatcagcgacatcccagcacacacatcccctgctatggctgcttctttccagatctgaccaagttaacaagttagcattgcgggagaaccaatagagccctcattgacgtttgctttcaacttcaaagcggcgctcattatcttgcatactattaaaaatagcaagccactctagtctaaatgtctatttattatccataacacaggcccagagacaattcatttatttgactgagccgcattaccatgatgttaattgcagactctacacaagagccagagcggttatgtaccttttctatacccaatgaattttgaagttcatcaatggtgaccaaagagcccccctacaacatatataaccgaactgt

SEQ ID NO: 140 - DNA, 26355 bp, Xenorhabdus sp.; identical to SEQ ID NO: 139
  CDS (20127)..(21326)

SEQ ID NO: 141 - DNA, 46407 bp, Xenorhabdus sp.
  CDS (40415)..(41002)
gtcaaataatttttataattacagcggaaaaaaacaccattttctgtgttgtaatcgttcaaagtatctttaactgatttggtcattatccggcttcaaatatttttaccagcatttaattttataaaaaacatattttgtaattatttcgtctttatgataaaacacgctgattttaacatttgagtgttgtgtgatctctttagaggttggagttaacgccacttttaattaacataaaaacaccaaaaatataacaatactgttaatttaaaattaacaattacaaataatgttaacgtgctacaattgattttgatatgtatcaacaaaagttggtttttttagagggcaaatgcattactagctgttatattgctgttaatagactaatatagctcctgttctgattgggtttttttaggtatgtaccctcagagaaaagtaacaggtgcttttagcgtaaaacatatcaacaacttttattttttagacatgagccgggttttctgtgattcagaacgagaacaggatattttctattaataataacggcttatgtcatataggttctatttttttagcgattttaggtagcaactatgcaaaccccgcacattttgattgttgaagacgaaattgtcacacgcaataccctgaaaagcatttttgaagctgaagggtatgttgtttatgaagccactgatggctcagaaatgcacaatattttgtcagataacgatatcaacttagtgattatggatatcaatctgccaggcaaaaacgggttacttcttgctcgtgaattacgtgaacaggcgaatgttgccctgatgtttttaactgggcgtgataatgaggtggataagatacttgggcttgaaattggtgctgatgactacatcactaagcctttcaacccacgggagttaaccattcgggcacgtaacctgctttcccgtacgatgaatctgagccatgtaggtgaagaacgtcgtcaggttgaaagctacaggttcaatggctgggagctggatatcaacagccgttctctggtcagcccgatgggagatcattataaactgccacgtagtgaattccgtgcgatgctccatttctgcgagaatccggggaaaattcagactcgtgcagaactgttgaaaaaaatgaccgggcgtgagctgaagccacatgaccgtactgtcgatgtgactatccgccggatccgtaaacattttgaatctacaccggatactccggaaatcatcgctaccattcatggtgaaggttaccgtttctgtggcgatttagaagactaatcgataccacacctgccactgatttattctaaaaaatatcgtatttgtaaaaataccttatctttttaaaagccctgaatacctaatggcatcagggcttttaattttattgcttatattaccttactctttccacggcataatcggtacagcactgatggcattttttggtgagccatcaataactttatcggaataagttaggtagatcagagaattacgttttggatcgaaaaagcgaacaacctgaagctttttaaataccagcgatgttcttttctggaaaacaacctgcccttttttcggcgatttaaggatcttttctgctacttcgatcgggccaacctgttgacaggagattgcggcatcagaagtatcttccgctaatcccaagcctcctttgatacctcctgtcttcgctctgcttaaatagcaggtcacatttttaacatcaggatcatcaaaagcttcaatgactattttgttatccgggccaaaaaatttgaacacagtatcaacagaacctatctcttcggcgtgcaggatcgttggagaacacagcaggacaacagcaatcactattttcttaattgttaccatatttagtccacttgaattaaataaatgcagtgaaaatatccagtattagcatataatgcgaattaatgatttttgtaacgtcatttgattagtttatgtatctataaagaaaaacatggcattatagctaaatatacatgcaaaatgagtaaacaaaagggctttaaactggccttcacgattcccataattttctaaatactgcgtgaaaattctttctttatcgaaagccgctggaattgaaggtcagatggttttcatctactaatataaacaggtaggagacgattatctaatgattgatcttttcatttgttgtaaaggatcctaaagctgagcttgcaaatgatcagatttaccattagtttattccaagattttccttgtttaatttagtgtctgatctttatccgttgtgattatgtcatggtgctttgtcttatcacgcaagagaaaatgctgcttcttaggagtagcaatttaggagtagcaataaagtaacgtttgtttggatagccacaataggtattgctgtcatgacagggaaaaggactgtgttgtgaaaacgacggtatgcctgatgaagtgaaaaatcaggcaattaaaatcatctttgtgtttggaaatgataggtactcattattaattaatctatatagcattttcatccttaaatttttttataacagtcagttatcttacagttgtatggttttctttttgtcttgatgaattagggagatgtatggatcaaaccaacatcattcgagatttgttgcattggctggataataatctggatcgtccgctgtccctcgatcatgttgcagcgaaagcaggttattccaagtggcacttacagcgcatgtttaaggatgttacaggacaagcgattggttcttatatccgcgccagacggctgtctaaagctgctgttgcgctgcgtttgactggtcgtcccattctggacattgctctgcaatatcgttttgattctcaacaaacctttaccagagcattcaaaaaacagtttaatcggacgccagcttcctaccgccgaagtgaagagtggtgtgctagcggtctttgtgctcctattatgttggataacaaaccgttacctgaacataagtttgtgattttggaagatcagttgctgacgggtattgagcacagctgttcttacactctggagcaatggtcaaaagcctgtacggaaatgcgccacaattactggattgcctatttgcaacacgcggaagtcttgccgcctaaattgtatggcctgcatcactccaccgtcagcgcggagcatgaagatgagcagacagttttctataccacggccatagagccggagtatgcgacctttgacaccaaggatagccagccggttgttttaccgggtggggagtacatttcattcagttattttggtaaagaagatcagctcgatgagtttctttctaatatctacactgtctgtttacctcaattaaatattacccgcagaaaagggtatgatgttgagcgatactatctcactaatcttgaaaggaaaaaattacaggatgagtctcaaagccacgttgtggaatttgaatatctcatcccgattcagcgctaaccttgcagctcatctagcgcgggcatatccagatgtgtgatatcgcccgctgtttcaacgatccatccaggagccagccacgggctatcctgataatcgactcttgagatagaacagtttctcagccgtaagcggcgttcggagttggccggtaatcctaaaattgaacagaccagactgactaatgccatcccgtggcttactagtaaagggcggcttccggctggcagatcacggcaactttccagcgcggcacgcacccgttcggataactcactcatggattcgccttctggtatccgaccatttggtgtgccatcaacgagacttttacgccatgtttcttcttcttgggtcagggaattcagatcacggttttcaagaacacccatgtttatttcccgtaaacgaggctctaatatcacttcacaaccgcaagcttgtgcgataatttctgcggtttggcgtgtgcgaccgaggtcactagtgataacatgtgtgatgttctctgattttactttttgtgctaccaagagtgcctgacgtcgtccggtttcagttaatgggctgtcagattgtccctgaatacgacgagccaagttccattctgtttcgccatgacgaacaagatatacctgtaacatatttattttccgttatactgcatcatgaaatagttcaaaggattacttatttattatgtaccatgttattgctgcaaccactaaccctgcgaaaataaaagcgattagccttgcatttgatgatgtttttggagcaggaacatatcgtatagaagatgtcgatgtagatagcagtgttcctcaacagccaattggtaatactgaaactcgtaccggtgcccgccatcgggttatggctgctcgtcaggttcggccggaagccgatttttgggtcggtgttgaagccggaatcgaagatgacatgacatttgcctggatggttattgaatataaacaaatttcgggtgaatcgcgctctgccagtctgatgctgcctgaaaaggtattggaaagcattcgtgaagggcgtgagcttggtcacaaaatggcttatttgaccggtgttgataatatcaaacagaaaggtggggcaattggcttttttaccaatggtatcctgactcgcactagtgtttatcatcaggcattgatactggctctcgttcctattcatcatgaaatttacaaagatattgaataaccaactttaatgatccagtcacagaaggccatgatgttatggcctctgtatctaataatattgatacacttcgtctttcacgttgcttctttgttggctgcgctcgttcaccccagtcacatagttagttatgctcctggggactctctcccttgccgccgcgacgcaccttaaaatccattgtgtataataatatcgaaatgatcttttctaaccgattattatcacaatagatttacttcaataattgtgtttccagccattctttgacgtgagctggcgctgatttcaggctatttgaaccacgcgtgattgttgcaatcccaacactaagttcgtttttcagctcgcgctggctcatttgccctcgcattaattcttgaataatccgaactctggttgatagtgctgtacgctcatcgggtgtcaataataactgcaaaatctgatgttgcaaattttgttcgaatgctgtttgtaataattctacaaaagcaaaccagtcatcaccctcttctggggaaagtgcagggtcaatcaaatgattttgtgtcataatttttagccatactatttaactagtacaaaataataccataattgtatctgaaattagtaacgtctttgccattctgagtcggttaagacattaactaaatttcccataaaattatggtaaaacatgtcataagccagaacatttttgacgtaggctcttgtttcagcaaatggaatactttcgatgaatgcgatggcattgatgtttcccgcactattggccagccagcgctcaacatttctggggcctgcattataagcagcactggcgagtatgcggttattgccgaaattctggtacaccgattccagatatgcagtgccaattttgatattcatggtcgggttcatcaattggttactgctggcgtagccatcaatttttttactctttgcggtatgttccgctgttgctggcatgagttgcatcaatccgcttgccccttttggtgagcgagcctgtggatcccacgcactttcctgtcgtgcaatagccatggcataactttgtgaaatacttttatctgaagtgaaatgtgcaaattcattttgccatgccagaggaaaacgctcttcaagatgatcccacattttgccgacaatggtagcctgcacactgagggtaggccagttctgttcaaaagcatagcgggccagctgctctttctttgtgctgttttgtgctgaaacgaggttgatccattctgaacgtgccagatcatccatatgccaatacattaattcacgtatccgtttaatctgtggcaacttagcaatggaggcgtcaggtctttctgatttattgataaccagaggatagggcagatgtaatttctgtgctgctaccatagggtagaaaccacggtgttccatcagcttacgtagtattaagtctccttcttttttctttcctgtattcaacaaggtgatggcgctccagtattgccattcatctttttgcaggacatttttaggtaaaagacttaaccattcagctaatcctttttcatcagcattcctgagtgccagacgggcacgacgttcgattaatgtgctggaatgtgatgcacgaattgcgttatcccgccatttttcctgttccggtgtaatctctcccattaattgccaggccacgatatcttttaatttctgcctttctgtttcattcattttttgtgcccgggcgatggaaggaatactgagccgggctttttctgtgtttttacgggcaaaatgggaaaatgcattagtaacaaagaagcgggtaaaattcgttggctttaccgttctggcaaaatgttcaacagatgtgggatcactttgcagtttttgtaaatgagcctttaagctatggtagtcgaagggcaggcgattaataagataattggcaagtgtcgtgttattctcgtttacggcgagttcgatacgttgcaatattaaatttacggataaatagccggaacgctcccagacgttcagtaaactatcacaatcatcgggtaacgaactccctcgtaaccaaatttctctcgcaccttcccacgccgtcttgtgctttccggttacccagttcgcaaaatagtaattgcagcttgctgctacggtatttggtttatgggggctgaatgccagaaggctatgccagtttccgtcactcgccagtaaattgatatatcgggatgacagggaattagccggtggcagggttgggtgagtgtcaataaaatggcgtacctgctgaggagatgtcatttttaggttatgaactaattgccgatactcaaggtaaggatacaggggataatgcttcagtgtgggcatcaaccgttcaacttcttgcatgtttttcgcatcccatgcgagttttattgcctgataccgctcacgctgggcttccagagaatcagcctgtgcgataccaacaacagaagccagactgacagccatgataaaatgctgccacttatttatagtcacatactcctccagaaaattgacggcaacgaacaatacattaattgttttaattataataatattgaagtgttttatcatactaatgaatgtaaaaattagtggtttgattgcaagtttaggtaagaaaaaagatatgacttaaatattattgccataatcggttattaatttatttgattcatacaatacgttaattatttcaatcagatgataaaatagaaaagctgcatttcagcattcttaattcccagagaatttcaagagacatcgcagcggcaaggaaatggcaaattcgtcggaaacgaatttactcagtcaaagagctgatttccgctgaggggtaggaacttcccattaatctctggatgaatagataaacatctattgataaaaacgcaggctggtataagtgagggaagccgacacgaaaccaacaaagaggtagcccggaagataaagatcattacctcacctccgtttgatcgtgtgaaaagaatgctaaacaggtagcaacacgacggcattaatttagggtagaatacgccatccaagccccttaaacgtcaatgaatattattatttccttaattatcaaaaaggtacattactttggctcaatatgtttacagtatgcaccgggttggaaaaattgttcccccgaaaaggcatattctgaaaaatatctctcttagttttttccccggagcaaaaatcggtgttcttggtctgaatggtgccggtaaatcgaccttactgcgtatcatggcgggcattgataaagatattgagggggaagctcgcccacagcctgggattaaaatcggctatttgccacaggagcctaaacttaatcttgagcacactgttcgcgaagcggtagaagaagccgttggcgaagttaaacatgcgctgacacgtcttgatgaagtgtatgctgcatatgctgatcctgatgcagattttgacaagctggcaaaagagcagggtgaactggaagcgattattcagtctcacgatggtcataatctggataatcagcttgagagagcggcagatgctctgcgtttacctgcatgggatgctaaaattgagcacctgtcagggggggaacgtcgccgtgtggcaatttgtcgcctgctgctggaaaaaccagacatgctgctgctggatgaaccaaccaaccaccttgatgcagaatctgtggcgtggctggaacgcttcctgcacgattatgaaggcaccgtcgttgcaattacccatgaccgttatttcctcgataatgtggctggctggattttggaacttgaccgtggtgaaggtattccgtgggaaggtaactactcttcatggctggagcaaaaagatgctcgtctggcgcaggaagctgcttcagaagcggctcgccgtaaatccattgagaaagaactggaatgggttcgtcagaatccaaaagggcgtcaggctaaaggtaaggctcgtttggcccgctttgaagaacttaacaatgttgagtatcaaaagcgtaatgaaaccagtgagttgtttattccaccaggcccacgtctgggagacaaagtactggaagtcagcaacctgaccaaatcttatggtgatcgtgttctgatcgatgacctgagtttttctctgccaaaaggcgcaattgtcgggattattggtccgaatggtgccggtaaatcaactctgttccgtatgttgtcaggtcaggaacagcctgattccggttcaatcgcgctgggtgaaacagtaacactggcctctgttgaccagttccgcgatgccatggatgataagaaaacggtatgggaagaagtttctggtgggcaggatattatgcgcattggtaactttgagatcccaagccgcgcctatgttggccgctttaactttaagggtgtggatcagggcaagcgcgtgggtgaattatccggtggtgagcgtggccgtctgcatctggcaaaacttctacaggttggtggcaacatgttgctgctggatgaaccaaccaatgatctggatatcgaaacactgcgtgcactggaaaatgccctgctggaattccctggctgtgcgatggttatttcccatgaccgctggttccttgaccgcattgcaacgcacattatcgattatcaggatgaaggtaaagtgactttctttgaaggaaactttagcgaatacgaagattacaagaagcgtactctgggtgctgaagcactggaaccgcaccgtattaagtataaaaaaatcagtaagtaaaactgatttcagtgaaatagaaaacggcctgatatcaggccgttttttttaaggaaataacaatcaggataccatcactcttcgttcctgaaaggactcatatgtcttaacaattttaccgctttccagagtaatcatgctgtcagcatattgaatcaggcgcttatcctgagaggcgataacgacggtgcctttctgctcatgagcgataaatttaaagatatcaataaacatctttaattcctgatggttcaggtgacgagtcggttcatcggcaaacaagtattcaggtcttttcacgatggcttttgccatagctgctcgctgtctttcattttcagaaagctcacctggatagtaacggctcttatcacctaatttcacaatatctaacgacttctgtgcaatttttactgccagctcccgggaaagggataatccgtaagaattagacaataacaagttatctaacagcgtaagttcactggataaattaaaactctggaaaatgaacccactactttgtgaatgaaactgacctaactcggaatcactcattagttttagcttgttattattaatgaatacatctccttgatctggttgtaacatacccgaagcaatcgatagcaatgtgctgtttgtggatgctttcggccctgttatcaaagtaatttcacctggtataatagaaaatgtgatgtctgaaatcatttcataattaactgtattaccagttaaaccatatgaaatattgataacttcaatcgatttaaattgatttaagttcatattctcaacacaattaggttaaaaagttaaagctttttccttaaatatgttatctaaatctatttacagtattattaatatcaataagacataatatgaattcaaatagttcatttgtgaaatatctcgataataatatacataaacttatgtcaattattatttacaattattatatgataaatgagatatttcttagtcttagagtaaaatgttaatgattttcgtcgttactaagaaaaagacaacatacataaaaaaggtataaattattctgtttttattccaattttataataaggaaaaaagtcattttactcatataaaaaatataatgtttttgttacatcacctccatcctttaataaaaatcacatgtaaaatgtgtggttatcattgataataaaagaattttatatagataaatcaacaggtccgtccattaaatgacttatctcctgacaattcaagcctaaacggagaaacctaagcatcaaaaaatattattaacagaatctattttgttactattgtaaaaataactaaacgaaacatttaattagagtacaatcgagaataaaacataaaataacaaaaattgctatagaaaataaatcattttaattaatcattacgctaataacaatttaggctactagtatatatactttaatctttcaagttgccgcccggtataattgtttattttcggttgctgcaacttgaaatttattttggagaatatgaataattgttaataagctaacatttcctgaaccagttctacacattgaagaaaacgttgatcataatcgggtgagttaacacatacataatcaatattatttttcttcaacatactttcaagcaattgctgaaacgctttacgatcctgctcacttcccaggcttcttaacccgtcagcgacccagggggtgttattttctaacaggatgaccaagtcaaatcgatattcatcaatcagtgcctgaacgaaggggtgctctttcccttcatagcgcttacaaaatgcctgtgttgtgacaaaatcagtatcaataaaagcaactttgtttgcgtattttacacaaaaatcaatatattgagcgtgacctaaagctattttatcgtaatcagagtattgcagcgccatctcatctccccctaaatgggaaaatacatactcgcgcccatattcccacgcactggttgtgttaaacatatttgccagtttattgaccagtgtggatttcccgctggattcgcctccgagaatggcaaccgtacgtacgaagaaaggttttacttctgttggaatatattcccaatagcggaaaggcgcctgccgtatctggctgccgctgatattcataaatgaacgttgtggatcgacaagaatggtttcaatgccaaaatgctctttatagagaggaacgtcttgtgcttcgctggaatagatatactgaggattaatgccttttgcagacataaattgttttgcgctctgactccatttttcccagccgtttgggtagggttcgataccttgttcatcaaaagagtggatgtgaatatttttctgatatttgaatgtttgtaacagccatctcaggcgatcactgacggtaggttgctgagacatggaactgttgataaacaactctcgatcccgtaattcatcgtagcagagaaaaacgtgcaattcatcgacctggctggatgctcgctggatcaaatagatatgcccagtatgtaacgggtaaaatttaccaaacacaacaccgatagttttcttttccatagggtacgccaatcctaaatgttgatgaagagatgctaatttctgtgcactcgggctttttatcttgccgttaatgagctggcttaaatagcctttcgtcatgccacttgcatcagcaacttgttgtaaagtgtgatttgcctgtttaattgcctcttttaaatagtcaaactgccccatataaccccctatgttgtttagtatactaaacaacatagcatgccaacagggaaaggtaaaaacaaaactggccttttatcgggctatacacaatggatttcaaggtgcgtcgcggcggcaaaggagagaatccccaggaacatagataactatgtgactggggtgaacgagtgcagccaacaaagaggcaacttgaaagacgaggtgtatattaatcatccagatcatcaagcacagacaaagcatctgacaattttttaacgccgaatactttcatgtcaggtaatgattttttggacatattggcatagggcacaattgctcgtttaaagccatgcttagccgcttctgaaatacgttcctgaccgctgggaacagggcggatttctcctgccagcccgacttcaccaaagacaaccaaatcacggggcagagggcggtcacggaaactggaaactaaagagagtagtaaagcaaggtcggcgctggtttctgtcactttcacaccacccacgacgttaacaaagacatcctgatccgccatttgcaaaccaccatgtttgtgcaatattgccagcagaatggccagccggttctgctcaagccccacagctacccggcgtggattaggcatcatagagtgatcgaccagtgcctgaatttccaccagcaggggacgagtaccctcccagacaatcatgacagaactgccggaagtaatttcatcgccacgacttaaaaagatagcagaagggttattgacttcccgtagcccctgttcagtcatagcgaatacacccagctcattaactgcaccgaaacggtttttatggctgcggagagtacggaaacgggaatcggcttcaccatcgagcattactgaacagtcaatacagtgttccagtactttcgggcctgccagagagccatctttagtcacatggccgaccataatgatggcaactccccgggtcttggcaaatcgggtcagataagctgctgtctctctgacctgtgctacactgccgggagaagactgaatatcggccatatgcataacctgaatggagtcaataaccatcagcttaggctgctcttgctcggcaatcagacaaatctgctcaatacttgtttctgacagcatgttcagtttatctgtcggcaagcctagccggtgtgctctcattgcaacctgctgtaacgattcctcaccggtgacatataaggttttcatttgctcagatagcagacacatggtttgcagtaacagggtacttttccccgctcccggattaccaccgatcaaaatagcgctaccgggaacgacgcctcctcccaatacacgatcaaactctttaaatccggtagaaaatcggggcaattcttccagactgatttcagaaagtttttgtactttactgactccggtatcccctgcataaccgctgaaacgttcattgcggggagaggatgccgcggctaaacggatttccgtgatggtattccatgcctgacatgcagtacactgcccctgccagcggggataatctgccccacattcgttacagacaaatgcccgttttgctgcttttgccactctattctccctatacttctactaaaacagttttaacgttcttcgtgtttcaggccaccgctcagaacacacaagacgcccattaaatccgcatggcgaatacctactttagcgtgcgtgtacacttttggttttgcatgataggcaatgcccagacctgccttgcggatcatttttaaatcgttggcaccatccccgatggcgacagtctggctaagggggatatccagctcttttgccagccgtattaatgtggtggctttgtatttcgcatcaacgattggccctttgattttgccggttaatttgccgtcctttatttcaagttggttggcaacggaggcaaaaagacgtagttgctggcgcagagtatcagcgaagaaagtaaagccgccggaggcaatggcgacatgccagtcgagggattgcagtttacggacaaggctggttaaaccggatgtaagaggcagagtatccatgacttgctgcaatattgccgcatcagcaccagccagttgggcaacccgttgatgcaggctttctgagaaatctaactctccctgcatggcccgctctgtaatttcagcaactttatcacctacaccagccagtcgtgcaatttcatcaatacactcaatctgaatggccgttgaatccatatccatgactaataaaccgggtgaacgcaaacgggggatctgtcccaacggaacaacatccagacaacattcatccgccagtcgtttgatacgcggcgacaagccgccggcgatacgaacaacctgataatcatcaatgcgccatgaggaaacaacaacaatagccactcccagacgatgctgaaaatcactgatccgctgtttatccagattgcggccatacaacagccagcctctgtccccagctcggtaatccagtggcatgacttcatctccactgagagatagtggtaatcccggccatttatggatttcatcgggtaagtaacgataggccagattgttagacatgaatatcgactcctgtaattccatgtaataaatagggcaggcaaaaaatgcttttcaaactatcctatcactactgcatctggcaacatggaatgtaacgagcattaggtgggataactatgagtaaagcaaaactaaaatttcgactgcacaaaaccgcaattatcttaatatgtatagcattattggtcttgctgatgcagggggtatcctattttagccgttcacaacaacaggcccatatggatcagtttgaagatctggcaaagacactggcaaaacaggttgcattcagcctgtctgctgatatggagaatggcagcaaggaagtcaataatcaaaaaattatggataacctgaactatttaaccaacaaaagtcgtattctcgatgccagtgtttatcaggaaaacggaacactggttgcgcggagtggtgagttggtttctgttcgggagcggttatctttggatggaaaaaaagcgggtagttatttcaatcagcaaattgtggttcctataccggggaaaaataaaccgaaaggttttctgcgcctgactctggatacacacagattggcaacagaagccaagcaagtggataatacaactaatctgctcagagtcatgttgctactagctctggcgatcggctttattcttgctcataatttattacagctagctcccagccgttggcagcaatccccttatttattgactgccaaaaccaaatcaccggatgaaaataataaagaagatgaatctgcccgttaactggtattggtgccagaactccctttatttaaatatacacttcgtctttcaagttgcttctttgttggctgcgctcgctcaccccggtcaccgtttttataaacatacggttatctatgctcccgggaattcactctcttgccgccgcgatgcatcttgaaatccattgtgtataaagactatttaaataaaaagtgctttgaaaaatagtttttcgggtagaaaagaaacggtgctgtatcgaccaaaatggtctgctgaccaaaatgaggccaaaaacagcgctgttccttaccgctatttatcgtgatacaacttgacgcaaatggaataaattacacaatgtaacagtgctgccgctattgaaccgtaaaaaatgatggtgtgatgtggtagggctgaactgagcagcggaatgtgatcaaaacgaaaaacatacatatgaaaagaaatagccagaattgtcagtataattcctgaaacattgtgataaatatgatgtgataataaaaggtactttattaaaaagaaaaaagggataagcatgaataaagaaattattatgtaagtcattatcatttactccggtattataaaatttcaccatgaaaatgttttctgagtatcactataaataaacgtttctccttttattactcttgttttccttttctgctgtgcaatctatttttgctttatctaaagtgatggggtaaagatagacctcactttatatatagatactaaatatatttattatttatatttcctataatgttaatgagttttttaattattactctcactgcgagaatataggaatattctgcttttttatctaatattagtattcagtgattaaattttaagggtaatgcaacaccaaatatcagaaataataatataactaatgccgcgtttattaattcatatgagggaggaattgattgggttagagccgggtctttaatttctacatttttttcgtctaataaatattgattatcataaatacccgaaagtattttttcagcacgttgatgctcagaataatgaaccagcagcttcacaccaccaaaggcatgggagcacatataagtattccataccactccttcatctagtatttgggcatagataccttctgatagcattctgccccgaataatatgcgcttctatcggcgacataaacgttgccagatactgcatatatcctctttgcggagatatgttccacataagtactccttaatcaaaccgtaggaaatattcgtgtccattaaccaaagtataatttaacatcagatatgagcatatttaaacagcctgaactctgtataaaacagaattcaggcctgattggaggaacgatttcgtcgtttatactcgataaacttcaagttacaactagttatatgaggtgagtccttatatctccccgcgttgcggggagatataacacgcatcttgaagttgaattggtatattaaggcagatcatttggtagttttatatgagtatcatcctaaattgaggactgtcagattataagtatcgggattggggccaaggcgtttaccaatatccaatccggccataattgtcagatcctctttctccagcctgaaatcaaaaacatcaaagttttctttaatgcgggaaggcgttactgatttaggaatagcaatcatgccactgtcgaggtgccagcggataacaatctgagcaggtgttttatcatatttaattgccagactttcaactaatggatgatcaaaaacacctttaccaccgcgggataacggactccaggattcagtaataatgtggtgtgtggcattccatgaatgcagttgcctctgttgcatcaggggatgcagttcgatttgattgatagcaggcacaatgcctgtttctgaaaatagtttctgcaaatgttcaatatgaaagttacataccccgatactgcgggcgagccccgattcttttaactcaataaattgtttccatgtttcaacatacttatcctgctggggaaccggccagtgaattagaaagagatcaatatattccagctgtaatctatccagactctcttgcagtgcggttttggcatcttgatggcgatcattccacagcttagttgtgataaaaacttcctcgcgtgggatacaactttcccgcaatgcttttccgacgcctgtttcattgtgataaatcgcggctgtatcaatagagcgataacccacattcagcgcggtatcgatggctttaacaacctgttcattactcgcctgccagactccaattcctaattgcggcatgagatttccgtcaacgagtttaataattgtctgctgacccattcttacctcctccagatttggaatatcagatggacgcctcgtaaatccgcttgctaacttcaagcgtaatattctggtgttcacctaaagcaaccaaaccctgctgttctagtttttggatcattcccggtatagaactgccatcaagctgataatcagaaaaatgagtttttacaccgagactttcaaaaaattcacgagtgacatggattgcctgattaatgcgctgttcttcagttccttccgtgaaatgccagatacgttcagcatattgcagaagttttgcgtgtttagtatcccgcttttcctgtaagagatgcggcaaaataatcgccagtgtctgagcgtgatctaaattgtgaaaagctgtcaactgatgtgccagcatgtgggttgcccagtcctgtggaacacctgcaccgacgagcccgttaagggcctgtttaccgaaaatgactttggttggggtgtgtagtgtgaagttttgcataacaacaatccttactaactgaataacaaaaactttttccatgtcttaacattcggttattgagttatgttggtttattgcagtgatggagtccactctatgcaggatcatgtatctgaatgccggattattggctgtatgatgcttgtctgagtggactcggattgtttaatttttttgttgataagttaatagctagaaaaaatagtgtgattttgggaacagcggtcaataaccgatatgctcatttgtttttgtgtgatgatgcttttttatgacgccagtacatcaatagcgaagcacctagtccgctgattaacagaataacaggtaagatcatcaaaatattcatgaccaaatcctgatgcgctttaacaaaaggtatctgattcagggcatagccaaaactcacaattatgatgacccataagaagccgcttaaccaattaaaaaattgaaagcgtttgctgttcagaccggaaatacctgcgaaggtgggtagaagtgtacggataaaagcgaggaaacggccaattagcaatgccgttaaaccgtgtttggcaaataagacattcgcccgttggcgctgctctgccggaagctgggctagccagtttttgatcattcgggtatgtcccagccagcgcccctgtaaataccccagccagcacccgagactggcagcaatcgtcaataatatgacagtcggaacaaaccccatgacacctttggcaattaaagctccggtgaggatcagaagagtatcaccgggcagaaatgcggcaggcaataaaccgttttccaataccagtgtgacgaagataacaccataaataatccagatgacatcgggattggcgagtagggtaaagtcatgctgccaaagcgcttgcacgatcccgcttaacgtttccatatttatcctgtaatttcggtacaatatctttatgacaatttttgtacaaccagtgtcatacaatcgaattaatcatacaagtccatgtgttccagtgtaccgcaaaacgacagcaggatagttgatttgattcagcatatacacatcatggattacaggatgcgttgtggcggcgggggagctgccagcaaagaggcacctgtaaaatgaagagtataaaaataaatacagttaactcaacgcaatgcgggagaagccagcattcagatcatctattaaatcctgagggtcttccagtccgatatgcacacgaattaacgttcccgttttttggggaaaattataattacgtaggactgccagtgactcaggggaaatgcccagaatgagtgattcaaatcctccccaggaaaatgccattttaaaatattgcatattatccagatagtcagagagctgtccgggagtcaggctgacattcaacataaaagaaaacagcccgcaggaaccggtaaaatcgcgttggaaatagttatgaccgggacaggaaggtagcgcagggtgataaacctcagcgacttcggggcgttgggagagccatttagcaatgataaggctgctttcttcatgttgctttaagcggacagccagagtatgtaatcctcgatttgcagaataaacagtatcaggatcagcaatctgccccatcaaataagagctttcccgtaattgatcccaacagcgttgattggcaaccgccgtaccgagcatgccatctgaatggccgataatatattttgtcgcggactgaatagaaatatcgataccaaaatccagtgccctgaaaagaacacccgcagcccaggtattatcgatcataataacgatatcgggattaacccgccgggccgcctgtacaatagcgggaatatcctgaacctccatagtaagagagccgggggattcaagaaagatgacttttgtgtttggctgaatgagtaaggcaatctcttcaccgagccggggatcaaaataatcagtagagatttgcatctttttaaggatatttttgcaaaattcctgagtcggttcataagctgaaccggttagcagaacatggtcacctgtttctacaaatgccagaatgctgttggtaatagcggcagtacccgaaggatacaaagcacagcccactccaccctccagttcagccattgcttcctgaaaagcaaaatgcgtcagagtgccacggcgcccgtaaaacagttcaccgttagcccggttttttatcgcatgcctcatagcatcaaccgtcttgaaaatgacggatgaagtgcgctggataataggattaaccgctccctgtgtgtatttacgctttctcccgacttccaccagtctggtttccaattttttttctgacatatcactttccccctgacctgtcgcgattgtttaaataatcattagcaagttaaaagaatagtcaggttttttacaaagggattctgacaacttgacaaaaattcaaggtgagtgagaacggtgaaaaagaaaaaacggatgggataacccctttttattaccactttttttattaaatagtaatgataattactatcaaatcgcgcaatgtctgatatcatttggaacggactttttcccttatgtgatgaaaaacatgaaactgggcaaaaaatgataaaacatatacctaatcgatttcgagtttcagccaacaaaaaggcggcttgaaagacgacagatatatcaggattagcaagatgagtagcgattcactgctaagtaacagaatctataaaaaagagagtaaggctaactgatgcgtaatttgacagcttctattctattggcattcgggttaacaggttcagcatgggctgatactacaccagctaataccgcaccagctaatactgcaccaactacagcggttaccgcgccagaaaatcaggctgccactcaggtagcagctccggcaacaccggtatcttccgtggctccacaggctagtgaagtgaaaacagagacgcagcaaggtgaagcgcagaaaacggacgaggcagcgacggcagaacagccaacagttactacagaagttactgaaataacagaagctggtgcagtagaaaccacggcggcggcagaaacagaaaatctgtctagcggttttgcgacggatctttccgtttttggtatgtatcagaatgctgatgcagtcgtaaaaagcgtcatgattggtctggtgattgcctctattattacatgggcactctttttctctaaaggatctgaactgttaatagcgcgtcgccgcttacgtaaagaacaactggctttagctgatgttgccagtctggatgaggcagtaaaaatttcctcggattttgctaagaacagcattagccgtctgctactgagcgaagcacagactgagcgcagcttatctgccgaaagtaccgataaagacggcacaaaagagcgcacctcattccgtatggagcgtgcagttgctgcaatcagccgtcacatggggcgtggaaacggttatctggcaactatcggtgcaatttcaccgtttgttggcctgttcggaaccgtctgggggatcatgaacagcttcattggtattgcccattcacaaaccaccaaccttgccgttgttgcaccgggtattgcagaagcactgctggcaaccgcgctgggtctggtcgctgcaattcctgcggtcgttatctataacatttttgcccgtgttatttcatcataccgtgggcaggttggtgatactgcggcacaggcaattttgttgcttggtcgtgatcttgatttggctgacagaaaaactgataaagcagaagcaaggtaattaattatggcaatacgtcttaatgaagatttggacgatagcggtgaattacacgagattaacgtcacaccctttattgatgtcatgttagtgctgctgatcatctttatggtggcagcaccactggcaaccgttgatatcaaggttgatttaccggcatccacagccaaaccacagccacgaccggagaaaccggtctttctgacagttaaagcagacagccagttatttgttggtgatcaacaagttgatcgtgattcgctctcttcagtgttggatcagacaactcagtccaataaagagaccacgattttcttccaggcggataaaagcgtggattatgaaactctgatgagtgtcatggactctctgcgtaaagcgggttacctcaaagtgggactggtcggaatggaagcggtagaagcgaaataaacgctacaaaattaattctgtatgaataataaaacctgcccgaataataaattcgggcaggttttttctatctgaaatcaattaaaaataaaatttttttacttatttttccaatcaaatggcaataatttatccaatgttaaaaccacctctttattaactttcacttcggtgtgtatattatcccgatttatctggctgataaattcccgacagcgaccacagggaggaatgatatcgccagatttattaaccgcgataactttaattatccgattttctccatgttttatcatatcggcaatggcaccatgttctgcacaaaatcccatagagcatgaagtatcaatactcactccggtataaatatggccggattcacactgaatggccgcagcgacgtgaccatatttaatatatttatttaattgcgtcggagaaataagctggtgtgcaatactttccatttcatcaaaagagaccataatttatttccaataaataaaaaatgaagtttactctttaatactacgaataaggtcaacaacagatttcgccatttcctcttcgttttctccttctacccgaacaataatttccatgccatttttaattcccatcgacataattttgaacatgctttttaaattagcgactttatcccctctgataatttctactgtgccactataagtcttagctaaattacaaagttgtgccgaaggccgggtatgtagccccgaaggggctgttactattacggaatattcgatcatgactttatctatcccttcgtcattcagttaatgaaccaccacgtgtctggataacgttctgataccaataaaacgaatctttcttataacgagcgagatctttgagatcgtcatcagtgcggtttacgtacacaaaaccataccgctttttgtaaccattgctggtggaaagaagatcaataaaactccacgggttataggaaagtacgacaacgccggaatccattgcccgtttaatcgcctgtaggtgctgctttaaataatcaatgcgataactatcatgaatagtgccatcagattccagaacatcatcagcaccaaagccattttcagtgatcattaatggcttttgataacgggtatataaatcgcgtagcagatattcaagcccatgcggatcaatcgtccaatcccaatcagtagtatcaagctgtgggtttttgtggatctgatagtaatcaggctggatctcataaccgtccatttgccctttgatacctgtaggattaaagccatccatgcgcctctgagcaccttctggtgctgcggttgctgcatggctgcaatagtaattgagagccagaaaatcagaatatccttctttgattaacgccatatcaccgtcttcgatattaggtgccagcccctgatttttcaggtaaatcaaagcggattgattatattcccctttcaaataaatatcggtgaaatagtaattacgcagatcattggcattctgggccgccagattatcttctggtttgctggtcagcggataaatggctgaatatcccaatgctgcaccaacctgaccttccggcacccattgatggactaatttgcaggcgatggcatgagccagattcatgtgatgatttatctgatatttaatctgttcattatcgagatactgttcagggataaaacattttttcgtccagaattgtacgataatgctttgttcattaatcgtcagccagtatttggctttcttgccatattctctgataacaaattcagcgtagtaggcaaaatcattgacactttgcctgtcaatccagccatgatatttttccaccaaagccattggcatatcataatgataaagtgttggaattggtgtaataccattttctaataattcatcgataagattatggtaaaactgtacgccttcatcattcggtttcccgatgccatcaggaaaaatacgcgaccatgcgatagaaaaacgataggcttttaatcccagttctttcattaatgcaacatcttctttgtagcgatgataatgatcactggtaatatgggaatcagctaaccctggtttattattgagaatatcttgctgggataattttttaccatatttttctgccgcaccttcaacctgataagcactggttgctgcaccccaaagaaaagtttcaggaaatagcgtattatttttcgtcatgatgattttttcctttattatcgttcacatttttaatgtgtttatataaatcaattatttcctctctcaggagtaactcgctgcgtatcgtcattaacgtatcctgagcatgaataaatagcagactcaaattaatatcagagccctgagtctctttctgaataacatcagtttgtgtttgatgagctgacaacatcatctttcgtgctttttccatatatatgcgagcattttcaaaatcgccattacgagcgaatttcattgctttttcacttttttctctggcattacctgcatcgagaataatctccatagaaatagcgattaagatattttcctcactattcatgatttttttccttgtagtagagtcgcttatgctgcattgaggttttcttcttcaatacgttttttctcatacactttaaagaagggataccaggtaacgaggaacacggccattagtaccaaataacagatgatcgcccgccagtcttcagtaatcatgacgctggaaaacggagcgggtatttgaccgacctgaatcattttggcagggatattcagccagtcggagcgcataaacacccagataatgatcgggctggtgatcgcattaatccacatcggcagcatgagcagtggattgagcacaattggtgtaccaaacaccagtggctcattgatattgaagaacgaaggcccgatacagatataacctgttgccttaagatctctggattttgaaaacagcattaaaagattcagtgcgagagtggcaccggttccacccattgtgatcaacgccgctgtatacatggtttcataagtcacaatattggtcggggcctgacctgccgccaccaaagtaatattggtgctgataccaagcataaaaataggcatttgcaggccagtaaatgtccagacggaaatccccattgagaatgcaatagccggaattaatgccatcaatataaagcccggcagtgtctgaccgaatgcagcaataggtgaaaagaggtaaagcaggcgggagaaaatatcaatttcaaaggtgaatactaataatgttccgattccgatagaaagcagaatcggaataatggcgtgtatccagccagtgacaaaatcaggtagagtgctgtctttcagaaaacctatttttgtatataagtggaaaagataggaaacaaacaggccggtgacaatccccagtaaaattcccgcagggccgaatcgttcaaaactgacaatcatattaccgtcagaaaactccggcttaatgaacatcatataaacacaaatagatgtcaggccagcaatcagggtataccgaaaatgatgaagtttttccatcatctgattggcaatcataaacgctgtaattaagccgagcatgccaaaagaatattcagctattcgaccaagattgggtaaaaagggaagataagaacgaaatacattataaaaaaatatcagtgaaccggctaaaataaacgggatgtttttctgcatggaaccagaaatagcagcaacccatggtcgtttagtgaaattttgcatcgctggtgcaaacgaatcagataaccacgacataaatgctttcattttgcatctctctttattattttctcttccatcaattggatataaataaaaaaccccggtgctgtaaataataaggttaatgattcaatttatttttccatatgaaaggttaaaaccaccgactttagtcggtcagctttagctgcgatactgtgttgcacgagaggtgcaatatggattacagatatggcagccacacggtatttcagattgagtatcattttgtgtgggtaacaaaatacagacacaaagtgctcacaggtgaagttggcttacgggtgagagagctagttcgtcagacctgtgaagcgtttgaaatcaggatagtagaaggggtcgtgagcaaagaccatgtgcatatactggtgagttgtcctccgagcttagcgccctcagaaatcatgaggcgaataaagggaaggacagcaagtaagttgtttgaagagtttgctcacttgaaaaagcgttactggggtcagcatttttggggcagaggctatttttgtgcgacggtaggtcagttaacggaagagatgataaaggcctatctggcgcatcattttgaaccgaacccgaatgatcacttcaggctggataattgacgcatcgtttagccgatgcgtatccggactttcagtccgttaatcactaacccaccgactttagtcggtggttgttgagtaatattaatattatgattttttaatcattttttgtatcagaagcaataaactgcagaggtaataaaaagctgaatacagaacctttcccgaccgtacttgtaatatcaagatgagtattgtagtggtgtaaggcatgtttcacgatcgccagccccaacccgcttccacccgcacttcttgaacgtgaacgatcaacgcgatagaaacgctctgtcaggcgcggtaaatgctcagggctgatcccggggccattatcctcaactttaaacagcgctccatgaactgttctcaaccaactaacctctattcgggttccttgttcggtatggttaatagcgttatggataagattcgacattgcgcttctgagctgctcttcacttccgtgcatatgtagagtgttatcgacattaaatacaatatcatgctgtttatctgccaatgtctgtacttcctgctctaataaagccagcatagccggaacatcgaccatattgtgcacatctacctttgagccactctcaattctggaaagatgtagtaactgactgaccagagaatccatcctccgtacctgctcctgcatagtactcactactttctgacttgctttcccgctgagctcctgatcctgcatcatttccagataaccttgtagcactgttaacggcgttttcagttcatggctggcatttgcgaaaaaatcacggcgggagttttccagccgtcttttttgcgtgatgtcacgggcaatcatcagtaattggctttccgagtaaggcatcaactgaaattccacgatatgaccattatttaattcaagagagaggggagaagtaaaatcacccgctatcatataacggctgaaatcagggtagcgaagaagattgaaaatagactgtcgattatcttctggccagcgaaaccctaataaatgttgagccagacggttacaccaaaaaatattcccttccactgtcatcattaccaaggcatccggcaatgattcggcaccactgcggaaccgtttgattaataatgccagttccctgcgccgcttgcgattacgttgctgtaactgataaataccatagaaaaccggctcccatcctcccctgcctgccgggggcaacatactgcgatcaagccagagccagtcagataacttcagtaagttatagccatgccatactaatgccagaagtaatgcaataaccagcaaccacgccagttggccgacaaagaaagacaaaataactgcgggcagacagaaaataaataaccccagtaccagctttttccaggataatttctcaagcacttaactctctccagtacaggtttgttgtttttcaatttgcttcattattggcttcccaaactgaatttatgcaggtcgtcccaaaaatcggccagaaagactaataacgagtggaaaagcgattgcctgtgccacgaacagtctgtaccattttatcgtgtccacccatttccagcgccttacgcaagcggcgaatatgtacatctaccgtgcgatcctctacataaacattcgctccccacacatagttaagcaactgctcgcgactataaacacgctccgggtgcgtcatgaaaaaatgaagaagtttgaattcggttggtcccatatcaacactttgtcccggactggaaacacgatgggatatagaatccagcatcagtccttctatattgataatatcttctgctgccataggggagatacgacgcaatacagctttaacgcgggcaattaactctctgggggaaaatggtttggtaatataatcatcggcaccaacatcaaacccacgcactcgatcttcctcttccccccgtgcggttaccatcatgacaggaatatctttggtggtgttattacgcttcatttgtttgataatttgtattcctgaaccaccgggtaacatccagtccaacaggactaaatcaggataaggctcagataaacaccctacggcagtgtcataatcttctgcttcaacaggctcatatccgttctgctccagaacaaaacagaccatttcacgaattggggcttcatcttcaacaaccaaaatacgtctaaccatggttaatcctgtcagtatgattgaagtcagcaaaattcacagtgaactattgtgagtcaattttattacagttttatgaaatagatttcatcttaatcataaaactgtaaccaacattacgaggaatttatcaatcaattattctatttcattgctgttgcgaggccgctcgaaaatctgtaaatgaaattataattacccacgacatccgcagaacactcattataattaacatctgaacagggcaggctgggcgcagggacagcgcagagcagcaacacaggcaagataagcagagcaaaaatatgcggattattcatacgtcagactggcatcttgggcaatatttctttactaaaaaccgtgcggcagagcatcagcacttcttacagtggcttatcaggcaaataaatgaacatcaggttgatgccctgattattgccggagatgttttcgatacaggttctccgcccagctatgcccgggagttgtacaacagatttgtggtggacctacaacccactggttgccagcttgtcattcttgggggaaaccacgactccgtcgcaacactcaatgaatcaaaaaccctgttctcttatctgaataccactgttattgcctgtgctgaaactgatactcaacagcaaattaaagtattgaataacagaaatggtcaggctggagccattctgtgcgccattccttatctacgcccgcgagatattatattcagtaaagcaggccagtcagccatacagaaacaacaggctttacaggatgccatcgctgaacactaccaccagctctaccaacaggcttgtagcttacgggagcaacttggccaatctctgccaattatcgcaaccgggcatttaaccacagttggagcctctacaactgactccgtgcgggatatttatattggcacattggatgctttcccggcacaagcattcccccctgctgactatattgctctgggacatattcaccgcccacaatcggtcaataaaactgaacatatccgttatagcggttctcctattccgttaagttttgatgaagttgggcaagagaaaagtgtctgtctggcagattttaaggaaggtaaattcaatcgccttaccctgttacctattccgaattatcagccaatgcaactcattcggggtaatctgcaacaaatagaagcacaattacaaactttcagtgattatcagggagagcgccctgtctggctggatattgaagtagcaacgcaggattatctgcatgacatccagaaacgtatccaaactatggctacggatttgcctgtagaaattattctgttacgccgcagcaaaaccgcacgtcaaatctcattatcagagaaaaataaagagacgctgactgaattaagcgtatccgaagttttcgaacgacggctggcaatggcggaaattgatgatcagccacaaaaacagcgcctgacgactctgttcaggcaaacactggatgatattactcagcaacgtacacaaaaataacaatcagaaataacggccaggatgcagtaatgaaaattcttagcttacggttgaaaaatattaattctctacagggtgaatggaaaattgacttcacagcagagccttttgccagcaatggattattcgccattaccggcccaaccggagcgggaaaaactacgctgctggatgctatctgccttgccttatatcacaggactccccggctgaaaactatttcagacaatcagaacgaattaatgactcgccataccgcagaatgtctgtcagaagtcgaatttgaagtaaaaggggttgcttatcgggcattctggagccagcggcgtgcccgtaatcaggctgatggaagactccagcaaccgaaaggagagttagcagataaaaaaacaggcaaaattctggctgacaaaattcctgataaaaaagaaaagattgctgaaataaccggacttgattttaaacggtttactaaatctatactcctgtcacagggggattttgccgcatttttaaatgccgatgataaagatcgggctgatttattggaggaacttaccggtacagaaatttatggaattctgtcacaggagatttatcagcgccataaagaagcccagtccgaattgaatattcagcaggcaaaagcatcttcaattgaattattaacagcagaacaactggaagagtatcgcaatcaacagcaacagctgattgccgcagagattcagcttggtcagcagctaaaagatttacaaattactgagcaatggattgtacggcagcatgagctggaacagtcactaatgaaccataagttatcactgcaacagactgaacaggcgatacaggatgcttccccccagttacaacaattgactgccagtgaaccggctgaaaaaatccgaccattgtgggatgcatacaatcgggctttaaccgaacaacagcgccttgatgagcaaagcagaaaaatccaattcgagctgcaacgacaggttgctttactgcaacccgctcaacaaaaacagattaatttggaacaggctaaaaaagaatatcaacagcatcatatacagcaggagaaattgatctcagagcaggttacgccactcgatcataagattgatattcagtctaaagatctgctcacgctggaaaaagaagccactgtgcagaatcaggaactagctgaaatatcatcccagtatcaactggctgaaaaccagcacatctcgctgaataaagaacagaaagtgttggagacatacgatgaagaacatccgcatttccgcactctcgacaggcagttaccgaaatggcagcaactcttttcccgccagaatgaaaaacaggagcagataaccaagctcagacaaaaacaacaacaaatggctactgagcttgcccgtacaactgaaaatctgaatagtttaaatacagttctggaaaaacaggcagcacaatgccagccattacaggattcacttgaacttgcagaaaaaaaactgttgagcttacaaacccaatattcatccgatcaactacaaaaacagttatcagattaccaatcacagcttaattcacaaaaccagctggaaatttttctgcctcagatcgagcaaatacagacaactatctcaaccaatcaggcgcaatttgcacaaatccaatcattcctgaaacctttacctgagcagttaaatacccttgagatacaactgacagaaacacaacaacaccatcaggatttaaccgccagaattcgtctggaacaacgcattatcagtctggagcaggagcgtaatcagctaaaagagggagaagcctgcccgctttgtggatcgaattaccaccctttgattagtgaatatcagaatatcaccctgccaaaatcagaagagcggctgaaaactcttagccaaaaaatagaacagctacagggagaacgttctgctttacagcaaaagcagcaattccagcaacaacagagtgaacaattgcagcaatccacagaacgtttcacatctcagctgacagaaatcactacacaatggcagcaccattgccaacaactacaagcacccgaattaccaatggaagctgaaccggtcaggcactttattaccctgcgtcagtcagcctatacccaatctcagaaacaatatgaaatactgactcaagctgaaaaacagtaccacattgcagaaaaaacactctcggctcatcgtgaacagtacaaattagatgaacaaaaatcggcattggaaaaagtcaggcaagagtcatatcagaggcaattgaaggaaaatacggctgaactccatcaggcagaaacagaatatgccacaacaacagggcaattaatcgatacattgcacgatacgccgtttacactgccagagccgcaggaagtaggaaattggttacaacaacgtgaaactgaattgaaaaactatcacagatcccgcgaaaaatggcagcaattgcagcaggaacaggccgccctgcaaagcaaactgaatgaactggaaaaacaaaaaagcagaataatcaataaacaacaaatactggctgaacagctacaacagcagaatcaggtattgcagcaaacccagcaggaacgttatcaattatttggcgaacaatccgtcagcactgtacgtcaggaattgcagcaaaaagcgagcgaactggataacgcctgtaaacaagccactgctgatctacaacagttacagaatcaggtaaatcaattaacgggtgctgcgggtgaaataacacgaagctaccatattgccgaagccgcatacaaacaggcatccgacaccttccagcaaggtctgcaacaacaagggtttcctgatcagccctcttttgaacaggctttactggcaccggaacaacgggaaagccttcaacagctacaggaacagcttgccaaacagaatctgcaagctaaaacacggtgccacgaatctgaaatcctgttacagcaccacagggaaaaaacaccgttactgttggaacagtttgaaccatcacaattagctgagttgttaagtaataccgccaatgaattaaaacaaaataaccagcagcagggtgaagtcaaaaaccggctcaccagtgatgccaacagtagacatcatcagcaggaactgttggatcaaatagctctctcacaacagaattatgatgactggagctatctcaataacctgctcggctcggcggatggtgctaaattccggcgttttgctcagggtctgacactggatcatttggtgcatctggcaaatagtcggctagaaaaattacatggccgttactacctgcaacgcaaacgacaaaataaagatgatgtcggccttgagttacaagtggttgatatgtggcaagccgacgctattcgagataccaaaacgctttccggcggcgaaagctttcttgtcagtctggcactggcattagcactatctgatctggtaagcaacaaaacccagatagaatccctgtttcttgatgaagggtttggcacgctggattctgaaactctcgatatcgcactggatgcactcgatcaccttaatgcaaccgggaaaactatcggtgttatcagccatgttgaagccatgaaagagcgtatccctgtgcagatcaaagtggaaaagatgaatgggttaggggtcagtaaactagagtcggaattcagggttcgttgatatgtattagctcacacacgatcttgatctataatgcagctccttttgcaacatattcagaacaacatggaaagatttattgaaaacacaatgtatgcctcccgttggctacttgcacctgtttattttggtttatcactggctttatttgcactggctataaaattctttcaggaaatcattcacgtcctgccacatattttttctatcgctgaatcagagctgatcctgactttgctttctctgattgatatggctctggttggcgggttgttagtgatggtcatgttctccggttatgagaactttgtttcaacattagatatcgaagaacacaaagagaaattaaactggttaggaaaaatggacgccacttcgcttaaaaataaagttgcggcttccattgttgccatttcatccattcatctgttgcgtgtctttatggatgcccggaatgtgccggacagtaaattaatgtggtatgtgattatccacctcacttttgtggtatcagcatttgtgatgggatatctggataaactcacacgccatcatcattagaaagaaatcttacccgccctaatgccagctcaatattacttgctggcattaagggactccgttctttttcgtgagttaccattaacggtttctttctgtaattcgtcgataaacctatctacgaacatttcaactatctcacttctgctcgttccaagccgattggatagcccatctatttttcggatgacagacatccgcaatgacagggaaaccggtttcttcttttccttatcaaggaaaacgtggctggtagcttcctttaattcaaagttattatgctgagtgagcagctcttcaatcctgcgcacctcttttctggtcaataaccccttatctactagttggtaagtatttccaattttgctaaaccggatatcagcacgatagtgatctcttagttcccttaaagtacgagtcaatgttggaccagaacaactaagtgcctcgatcacttttaccttgctgacaggtctttcatgggaaagcagcaaagttaatttaaaatttctgagttgtttggggctaagtaacatcgttttcaattaccaagtcaggaatacgataacttcctaatatataacacaacatccagcatagcttctcatgccggtaaatcaatattaaagctagttaaaaactccataattttcagtttcacttcctgaacagacaccattatatttcgcccgttccagaatatttacagcccagcgccagtgtgtagccggttcacacattgcaccctgaaacttaaataccgcctgctttgtattcaggatttttaaggcatcagcataatcatggttgttcaccatcaatgccttatggatgtattctatttgtcgtggatgaatagctgttttcccgacaaacccatgagcaatatccaatacaagctctttctcaagtaactccagattatcaatatgctcacaaacgggcgctgttaaataaaaaccacgtgaaccaaaaacagccaccagcatttttatcacatatcccattgggccatcatatagcgtgagttcacgcgaacgacggatcgaaataagattcatcagatcattaccaccaacacgtagcgcgatgacccgctcgcagaaagggtgagattttagcttatcggccaaataattcatttgctgcacatcaaaaacatcttcagtttccagtgtcggcataacgccaagatgcgttgaagcaataatatcccaccattcaggtaataatgattgcgtgaatttaggcaataccagacccgtgacaaggctaagatcaacagtattgaccagatatcgtcccatggattcattccgtgggcggataaaaatcaatggataatgatcagtattagcggctgaacccttagccgcagccagtatctgtaatacagatacgaggttttcgatagcgacgggaatatcctcttctacgactgagtcctccagacaaatcaccaaagaacgtaatcctacaactttattacacaggattatttccggaatatctgggcgggtcgctggtatataaagtgtcgcgccaagctggtttgcgaaagggttctgtttcatcggaccaccttttttatgctacttttttgataatcgtgactgcccgatattggccaatcaaatcacctacttctgtaatggcaacatttttctgctgtgccagataaaccagcaaagcaacatcaggatcatttttagaacggacaagtacctgttcaggaacacgcctcagcacagcgcgcgttgcttccgcaattcccggtttgatacgattaatgctattgacctcatataaatcagcaagagtggaaataactttcttacttaattgcagcaaaaccattttttcctgaggttgccagtcagccgcaggtatggccgtcaaatccagatgatcccggcattcagcaacggtatcgaccagcattccactacattcaaactcactcagatgatcacatttcacacatccatgcaatccattttcactccagattgaacgcgatattaaccctgataccggtgctcccatgatcccaaagggaattaaccaatcatcatcactggccgccagccatgaacatccacacggatcggccagtacgaccaaacggggaatacctgaataacccggccgtcccgctaatgaacgggataattctgctgtaatcgcacctttacctgtccagccatccacaaataccagaccagccgtcccatgctgctgttctatatacgagagcgccgtatcatcaatgccacgatcccgtataatactgatcccatagtgatacgaactttgccccatatcccgtaaaacctgatgtaacatcacacccagaggaactcccgccctgactaagctcaccagcacaataggtgtgtcgccaaagcgtgatatcagagccttggcaagcatcacaacttcagttgccagtctggttgctcctatttctagcgctttatcaaacagttcaaggtggtaagaagtcggttctggctcctgactcaacatctcagaataatgacgggcaccagactgaattaagtgttctttaatctcaaccggtgtcatttcaatctgaacaggctttagtaagaaatgaacatcaccgctggcgtaagagccagaaaaaggagaaaaactattcatttatttaggattccgcattccgaataaagaggccgttaatgtgtcagcaaattgactgcgttgagggatcgcaagccagtcacaccatttcataaaccgatgatcacttaagctatcccccatgccaataacaggaaaaacacctctctcatcgtgaagcctttgcagaagatgatgagttgccaaccccttatcgacacatttaggtagaaaagcgagattattattgttgtagtgaaaataaaaatcgtcggcatcaaaaatatcactcattacctgagtcactgctgtaagcagcgtcttaagctcttctgcctgattatgcttattacacttaaacgaaatataaacaggaatatcaccatattcatagttaatgcgtgaccatacagaaaaaccgccggatgctatcagtcgattcccctgacattccaattccagcaatttatcccggtaaggctgaagttcagccagcatatgcgattgccacacctgatccgcatgcccttccggtgtcagaagtaccgcaccgtgagtggcaatacgccatgaagtgaacggaagctgtacccggctaagctgctctgtatttctggctgtcacagggatcacttccgcatttgccagcaaccagtcaaccagcatagcctgctgttcggtcatataaccatgaggagcctgctgcctgtctacagtagctacgctaagcgaggtaatatccggcggatcatttattttccggcgggtttgaaataacgtatcgtcaagatcagtaaaaaatacaggcttaatcataagtcacaatctctatcactggtgcaaccagagataattgctccatcagatgcggatcaactgcggctttaggtgtttcaaggcagagtaggacgcgatcaaactgctgatgcgctacgttataaagaaaattggggatccccagaccataattatccgtaaatgccatcacagactgaatagcgtgcccgcaggagataggagaacgggttgtcgaaccaaatttcacggcagccccttctcgttcaaggcgttctgccagcaaaaatggttgccagacaaattcgctggagcccagcaccaggaccttttcaccaacgttagccgggatctcagcccccagatcatattgaatatcgtccagccccaagcgtccccagttctgcgtaccaataatatcgacttttccccgtgccgtgatattcaccgcaggcataaccggcacagaagctgaactatccgcatcccattgccactcaccttctatcagggaaataaccgagacgggaagcggacagcgctttatgatgctttgcccactccagtccgtcagagtcactgtaatgatatgttcaatatgttccagcccggcacgatgcaatgcttcaaacagattgagaaaagtattgccagtcgttgcttcatcatcaatcagaaccagtgtacgggcatggcttacccgctggcgcaaatgttcttctttcggccagtagatcagatggtctgttgcatgactatgattttccttaaactcacacaacaactcaccttcaaccgggtggcgtgttgatgtcagaaatatcggagaagtaactttatgccgggtttcctgaaaaacccccgccgccagaccaaccgccgtttctgccatcccgatatagagcaccggcccgggaagatcaactgggaatttatctgacagctgctgataaactgtacgcataatagacggactgaccggaatatgacgcccgagcactttgctgacaaataaaaatgcccttttcggattacgtcgttcagcaatatcaaacaacgcttccagagacgtttcaccacactcagccgtcacagttaaggttccgctgtttaactgtttttgatagctttgtttttggtaactttgctttttatcagccgggaatgagtgacgctgaagatgattacatgctgtcatatagaagccttttaaaagaatttcagcaatttcaggaagtgaggcaaaagcagtggtgattctttcataaaacaaatttccctttcataaaccaaatttttttatccagacaacgcctattgctaaatagacattagccaaatttgttacgtccattttccagttcaaattcggtgaaatatgcatcgaagtctagagcttagctacacttaatgtcaatcataatatgattttttaaataagaatttgtttgacttttctccatggaaaagaaattataaaacacgaagccagattgctctctatcatacatttaacagatagttgcaatttgtgaggatcataatatgacaggatttcagccatatatctggtcatattatgattttctacataagtgaaattatcgcaattcactgatagcgattcacgataaataacaaatcacttataaaacaattcaccgataaataagaggtgttattaatggtttcattgagtaaaaatcagtccgtttcgctgaccaagcagagtacttcgctggctaaaattgattttggtctgggatgggatccagtagcacaaaaaaaaggcttcctgtcgcgtttgttcggcggagacagtaatgaaattgatctggatgccagctgcattctgctcgatgcatccggcaattccattgacattgtctggttcggtcagcttaaatcagaatgtggttcgataaggcacagtggcgacaatctgacaggagaaggcgacggggatgatgaagtcatcagcgtcgatttggttaaactgcctgccaatgttgaataccttgcttttaccgttaatagtttccgcggtcaaaccttcaacgatgttgaaaatgccttctgccgtgttgttgatcaaaacggcaaagagctggcgcgctaccagttaaacgaacagggtgctcataccggcattattatctcttccctgcgccgtaataacggtatgtgggatttcaccgcacatggggttccctgccgtgggcgtaccattgatgatatgtatccacaagtcgttgaaacggtggtgcgctgatgaatctgactccggggggaaatgcccccgtctccaatcaaatgctgaccatcagggtactttcaggttcagcagtcgatgtctccgctttccgtctgtatgctgatggtaaggtgcagggcgatccggatatggtcttttatgggcagccggataatgacgataacaccattcgcctgtccggcggtaataccaataccgcgttttccgttaatctgccggctcttcggcaagacgtccaaaaagttgcattcaccgcgacctgcgacggtagccagactatctccagccttcacagcctttctattcaggtcgaactgaatgggggtgtgattttacaggggcacgttgaagttcaggggcgtacagaagccgcgttgatcctcggtgaactttatcgccgtaatggtgaatggaagtttcgttttattgctcagggttttaatggtggccttaagcctctggcagaacattttggtgtcgatattgtcgatgatgcgccagcgtcgccaccaactccggctcctgaaccgaaaagtgtcaacctgagcaaggtttctctgacgaaagaaaaacccgctatcagcctgagtaaacgtgacaacttcggtgagatccgcgtcaatcttaactggaatcagggagcagcgcctgccagccgtggcatgttccagaatctgtttaataccagtaaaggggtagatctggatctcggtgccttcgtccggctccgcgatggcacccgtgacgttatacaggcattagggaacggtttcggtgcttatcatagcgagccttatgtccagttacagggggatgatcgcacaggcagtgttactgatggtgaatggctccatatcaacggtcttgaatggaaaaatatccgtgaagttctgatctatgcctttatctacgaaggtgtaccgagctggaacaatacggatggtattgtcacgatttacgtcaatggccagcctccgattgaaacccgtctgacagaagggcataaccgcaaaaatatgtgtgcgattgcccgtcttgttaatgacaacggtgccattcaggtagaacgtatcaaccagtattttagtggtcataaagagatggatcaggcttttggctggggctttcgctggacatcaggcagtaaataatacgtttaatacatacacgttatacaaactaacggagggacttatgtcctttttaaacaaaatcaaatcggcattcagtgcaggccgcgaagagcttaccaatcaggttggccgtttcaaaaacaaaaaattcatggaaggaactgttgctgtgtgcgcgcatgtcgcaatggcaagtaacggtgtcagttctgaagaaaaacagaaaatggtgggattcatcaaaagttcccctgaactgaaagtattcgatacgactgaaattatcgacttcttcaacaagctggtcagcagctatgaatttgatgctgatatcggcaaaggcgaagcgatgaaatacattatggcgctgaagcagcagccggaagcagcacagctcgctttacgtgtcgggattgctgttgccaaaagtgatggcgactttgataacgatgaaaaaaatgctgccagagaaatatgcacagccttaggctttgtaccggcagatttcgatctgtaatcgcggataattaagaggcttacttcatggtatccacgcacattggttttccgatggaaaccgttgctgtatttattattctgtcggttggtgcgctctttatcgacctctttatgcatcgtcatgataagccgatttcgctgcgcagtgccgctctttggtctgtcttctgggttgctgttgcttttgttttcgcgggattcctgtttgtccatcacggtgccgaagtcgcaagcctgtttatcaccggttatgcactggagaaggtgctttccgtcgataacctgtttgtcattatggcaatcttttcctggttcgctgtcccggatcgttatcgccaccgcgttctttactggggcataatcggtgccattgtcttccgtggtatttttgttgctatcggggcaagcctactgacactggggccgtgggttgaaatggtttttgccgttatcgtcggctggacagcagtgatgatgctgaaaagtggtgacaatgatgatgaaatcgaagattactcacaacacctggcctaccgtttggtgaagcgtttcttcccaatctggccaaaactgcacggtcatgatttcatgcttacccagaaagaagtcgatgcagaactggcaaaaccagaaaatgctgatgtaactattggtcgtagaaccagcagtaataaaactaatagtgaaaaagcagggcgtgtcggtaaagcagctctttatgccacgccactgatgctgtgtctggctgtggttgaactttctgacgtcatgtttgcttttgactctgttcctgcggttattgctgtcagccgtgagccattgatcgtttacagtgccatgatgttcgccattttaggtctgcgtacactctactttgtactggaggcactgaaaaagtatctcgttcatctggaaaaagccgttattgtcctgctgttctttattgctatcaaattggggcttaacgcatctgaacatatgttccaccacggttactctatttcggcgacaaccagcctgtttgtcgtactcggggtactggctgccggtattattgccagcctgatgtttcccgaaaaagaaaaaacaagctaaatccataaataaatgaggaaaaaataatgggtgtatctctttctaaaggcggtaacgtttctctgaccaaagaagcgccaacaatgaaaaatgttctgatcggtctcggctgggatgcccgcgcgactgacggacaggactttgaccttgatgcttcagcgttcctgctggcagcaaatggcaaagtacgcggtgatgctgatttcattttctacaacaacctgaaatcttctgatggttctattatgcacactggcgataaccgcaccggtgaaggggatggtgatgatgaatcactgaaaatcaaactggatcaaatccctgctgatatcgataaagtcgtttttgttgtcaccattcatgatgctcaggctcgtcgtcagagcttcggacaggtttcaggtgcgttcattcgtctggttaacgatgacacacaagctgaagttgcccgttatgacctgactgaagatgcttcgactgaaactgcgatgctgttcggtgaactgtaccgccacaatagtgagtggaaattccgtgcagttggtcagggctatgcgggtggtctggcatctgtttgtgctcagtatggcattaacgcagcctaattcgctttaattaagtgagttaatgtatacacaatggatttcaaaatgcatcgcggcggcaagggagttcatccccgagagcatagataactatgtgaccggggtgagcgagcgcagccaacaaagaggcaacttgaaagacgaagcgtataaaaccctgcctgataatatcggcagggtttttatttcctgaataagattaacacttctcacaacataattttctcaccccttaaagtactgctaaagtatgatgaaatctccaaatgacacaaggaacgtcaaatgagtcttcatgttttatttcgccacactgatctccccgagttaaccctcagtggcagcaaactcagtgatgccgggtttatttctgattcgctctttcatatatcccagcactcagatgggatcattctttctctgcttgcccccgagacggatcttactaatctgatccacgaaattgaaaacaagccagaacagggaatagataatattcgtgaaaatggagaactctatcttgccggcgactggctaactgacagtcaattgatagagcaacccattaatattgaaataacgttcgggaaaataattcttaaacctaagcaataatgtcaaattttttgtcgcaacctgccagataactcaaccggaaaaatacgccattctctccggttgaattcttagttcaaaaaagcgaaagtctattttcctcccgccaaatccataaaattacccgttacatacgatgcatcatcagataacagccatgcaattgctgctgcgacctcttcaggctgcccgcctcttttcatcggcagggaatctttaattctgtcaaccctgtcaggttcaccgccatcagcatgcatctcggtataaattaagccggggcgaactgcatttacccttattccctgcgccgcaacttccagagataaccccgtggtcaatgtatctacagccccttttgaagcggcataatcgatatattcatagggagcccccaaccttgccgctgctgatgaaacattaataatcgccccaccctgccccccatgccggaaagccattcttttgactgcctctctggcacacagaaaatagcccgtgatattggtggcaaacatctcattcaaacgctcagcggttagctgctcaatggtagtctgagcctttaaaatgcccgcattattcaccagcccggtaatataccccagttccttttccgccttctgaaacagagcggtaacctgctgttcatcggttacatccatctgaacagccagtgccgattgccccaggctttggatcatgtccacaacttcctgtgcgcgctctctacgagaacgataactaatgcaaacatgatgccctttcttggccagatcaagcgctgttgctttgccaataccacgggaaccgcccgtgataattgtgactttctgcatagggctatcttcctcattatttatgttgagtttattaatgcttaatgacaaaaagatctttcgtggctgtaaatccggatatattggcataataccctccaatataaggttttactaataccgcagtcacagcgtaataaacaggtgcaataggagcatcttttatcaaaagatcaacagcctgttgaaagtcagcctgattattagggcgtgttgacgtttgctcgaagggaattgggtggcatgataatttggtctcttattttcgccaaaaaactcgttacccgaactatcatgccacgacctatgttatcagatcctgtgtgggataagctatttgtcttcatgcaacaaaatcggcttacctatcataaaaaaacgcatcgcctcatcatggaaggtattctttttcgaatgagaaccgggataccctggcgggaactacctgctgaatatgggaaatggaatacggtctttaagcgttttaatgtctggtcaaaaaaaggtgtttttaattcattattcaacgaattagctaagaattctgatactgaatggttgtttattgatggcagtattgtccgtgctcatcagca

SEQ ID NO: 142 - DNA, 46407 bp, Xenorhabdus sp.; identical to SEQ ID NO: 141
  CDS (42682)..(43752)

SEQ ID NO: 143 - DNA, 46407 bp, Xenorhabdus sp.; identical to SEQ ID NO: 141
  CDS (43779)..(44357)

SEQ ID NO: 144 - DNA, 787 bp, Xenorhabdus sp.
  CDS (161)..(787)
gctctcaaggtttatgtacttctttatatgaggtcattcttgagcaggtcagccaacactgttcggaagagttacacgatttgctgtcgctagcctgtgatattaatcaggaagtttactattcgctctatgcagcggttaatggcgaggacgagtgatcatgagtcagggaaataataatcagaaaagccgcccgttagatgtgattcgaacagtgaaaaaatcagctatcaatcactggcaaagcctgttgcttgcttgtggtgttgatgttccggcaaaaggcaaacatggtgtttgcccgatatgtggcggcactgatcgtttccactttatcgatgataaccatcatggcgattggcactgccgccagtgcgatgaacctaattatggtgatgggctggatttagtggcaagaaccaaagggatcacggtctttgctgccgctaagttggtagccgatgcgctggcactttccttgcctgaacccaagtccaccaaagagcagccccgaacagtaaaaccaattgcagaacgcatcactgagctggtcgcaacttctgtcacgggtgaatctcagtatctgactaaaaaggggctgcaatgccccaatcagcggttattgaaagatggctctttattactggtggttcaaacgctggacggcacgatcacaggcgggcaaaccatcaagcctaatggtgaaaaacgccttgtcctcagggactcaaaaaaaaggcagttttattcctgtcctcgagaagacccgaacaccagacattttcat

SEQ ID NO: 145 - DNA, 894 bp, Xenorhabdus sp.
  CDS (630)..(884)
agttgggtgatggtgctctgatgggggcggaacgctactgccatgtccttatggaggggttttcaactagaggggtaatcagatctgtcgctgggatgattatgccttatgtgctgatccctatcggattaactgccagtattgcttaacgaaatcaacagggccggactatcatccagtaactcgcgaatatttatagaaatgcctgaagatattttaaggataacaggcatcatccttgatgcttttgaattcgggaaaaatgacgataattttaggaaaaaaactcaataatcataatggccaccatattggtggctttccgctttcctcaaaaatactgctgccccaaacaccaacctactcacatttataacaattaatgaaaattaatcccttttaaaaacaagttaaggtaaagtttattggccgaatttttggcgaaaataagagaccaaactatcatgtctctcaattcttttcgagtaaacgtcaacacgccctaataaaatgcatgcctgatattatgaaacccgttgtggtttttgtattagaggcagggcttaggcgttcaaacattttaaatctggaatggtcgcagatagacatgcaaagaaaggtcgcttggatacacgaaggcgaagaatcgttcagacggaaccatgactccaacagtgaggaaaatgcgggtggatgcgaatacgtcattcaggacggcattgaaaagggcaggaatagacaattttcgctttcatggcctgcgtcacacatgggcaagctggcttattcaagctggagtacctttgagtgcattgcaggaaatggggggctgggaatcaattgagatggtacgtcgatacgcgcatctagccccctctcaccttcagagcatgc

SEQ ID NO: 146 - DNA, 628 bp, Xenorhabdus sp.
  CDS (50)..(628)
aagtataacaccaaggtgatggacagcaaagcttttaatttagaaggcgtcgatggctgaccgtcctatcctattcagcgcgccaatgatccgcgcgttgctggctggcacgaagacacagacgcggcgccttatcaaaccacgcgggaagcatcgcccaagcctgttcgacggcacatggtccgattcatatgtgcttgaccacggcaacgaaagctggcgccaagtcgatatcccgatcaaacttggtgatcgcctgtgggtgcgtgaaacatgggctcccttgtctgcccttacccacaacgatccgggcgtgcaggctttggcggacggaggtttctatcgcgctgacggtgggacggtcgatggcgaaatctccaagtggttaccgtcgatttttatgcctcgtcatgcttcccgcctgacgctgatcgtcaccgacgtgcgggtggagcggttgcaggacatcagcgaggctgacgcggatgccgaatgctttggcggcaactatcccggcgatgttctgccagaggtattccacggagaccgggagcagtacggccatctttcgatggcgcaatgctacggcagactgtggaaccacatcaacggcgctggctttagagca

SEQ ID NO: 147 - DNA, 775 bp, Xenorhabdus sp.
  CDS (404)..(742)
ttgtattgccagcaattttttcagatgagtttccggcaccatcaacgtctcctgaagcaacacatgttcagtttccggatggtgcagtgatggagtatgagccgcaatcaggtgcattaactgtgactggcatcaaaaccgcgacagtgactgcatcggattccgtccatattactgcgccggaaatcacctgtgttgccagcacccggattacgctggatacaccggaagtcatctgtacgcagctgatgagcacaggaaatttgattgtgcgcaacggcggcaaaatgacgggcaatattgaacacaccggcggcacattcagttccaatggcgtgatcgtggattcccataaacacatcggcatccagtcaggccgtgacacatcaggaggccccgtatgatgtatctggggatgaaccggcagacaggccgggcgttgagcgatttggaccatgtccggcaatccgtcagcgatattttactgaccccagtaggcagccgtattgcacgtcgtacttacgggtcgttactgcctgaactgattgactggccgcagaatccggcaatcaaacttcaggttatggcggccagctataccgcaatcagccgttgggagccacgtgtgacgctgacgtcaatcacaatggaaaccctacaggacggcagaatggtggtggatattaccggtacttatcaccagtccgccaaagaattttcactctcaattccggtgaggtaagcaatgccaacaatcgatttaagccagttatgt

SEQ ID NO: 148 - DNA, 775 bp, Xenorhabdus sp.; identical to SEQ ID NO: 147
  CDS (3)..(404)

SEQ ID NO: 149 - DNA, 1206 bp, Xenorhabdus sp.
  CDS (67)..(843)
  unsure (1)..(1206): unsure at all n locations
acaagtatgcgcttatcgacaggaacacccggtatgacgaacgccncgtgactactcttccaccccgtgttcagccggccccgaaaaatatccgcatcgacagtgattattcgattaatcagggcattatcaccaccacgttgcagggtcacatgggatgccgccagcagtgccgtggtctatgaagtcgaatggcgaaaagacaacggtaactggataaccgctccacagacgacagcccggcgtcttgaggtgccgaacgtcgatgaaggacgctatcaggcgcgagtcagggcgatgaatgccgcggcaatctccagtatttggacgaccacgcgggataccctgctggaaagacacacaaggccgccatcggaaccgcagtctctccaaaccacgccgctactttttggtattcggttggattgggcttttgtcaagtcaacaaatgtcctgctgaaaacggaaattggctacaacaaaagtggagaagaggatgacacgttgcagttcgctgatattgcctatccgcagcgcacctacacgttgcaagggctggcagcgggggagaaattttactttcgggcacggctggtggataaatcaggtcatgcttctgagtggacatcgctggtcagtggtcacgcctccacagatacccgctggatagtggaggccagtcgggatcattttctggatgcaaaaaccggtcggcgcttacaggaacaacttgctgaacaggccagagtcgatgcgcgttacaagcaatccgctgcggaaaatgcgcaggccattgagagactgcaggacatgctgaaagatcttcagcagcgcacacggtaatctactaatgacagtttccgaacatcattatggcttcggctcccacgggttgaggattgttactcctgaggcttgaaaatcggctacattacgcgtgactatcgtcataccatgcacaagtgccgttgctgcaatcagtgcatcacgttcgctgcacttgtcaggaacgtgcaaccgtgcgcagcgttgtgctacggcggtatcgacaggcaaggttcgttcaaagaactccggtaagacatgttgctccagccacgcccgcagtatcgttccctgtgtggcgtccttacgctcaatcaataaaatgccaagttctaattccatgatggtgatggcggagacaaagagatcgctttagagcac

SEQ ID NO: 150 - DNA, 1883 bp, Xenorhabdus sp.
  CDS (1009)..(1881)
gtgctctaaagattaaacaattattgggcagtgttcagcagatacccgcctctccggaagggaaatggtcaggccgtggcggatttgctgacctgacactgcaatttaccacctgtgccgtgcggttagcgaaagggcatttattgccgcccggtgtggcaccggaaacacaggccgcacaaggggtcttatggcaggcggtggtgttctgggcggcgttgttttatcacctgccgttgttgcggcaactcgaaggggaactggaagacgggcaggtctggcaaccgggcatcggtattcccgacaaaccgtttcgtttccgtttccgcgcaccggagaacatatcgtcggctccgcaggaagtgttgctggccgcctgtctgttaccggaaaaagccatgatgtggctggtgacggtaccggaggtctggcactgtctgatgcagcatcttaacggacgaccctccactgtcccattgatagagacattgcttcaggatgcggccggacagctccattcccctttgcaggtgaaaccggtgacggagaccgtgttctctactgaagacaaccctgtgccggaaacgacagtgcggactcccgccagtgacataacgccaccgcccaccgctccctctgacgatacgctgacattattgtccttatttcagtcaccggatgcatcttcaccacaaaatcaggggaaaaatcatcatcacggtccgaaactgaccaaacagccgggacgggagaaagaaagtattgcccctgacagtcacctgcactcatcatttaaagataaataattcaaatggttatttgtattttattgccgcgaattgtttttggacaggaaacggcaggatgagccgaggaaaaaataacatgttgcacaccgtagacaccctcagttgggaagaattattagaagagtactttttttcacatatcctgcgaccggataccgaatggagttatcgcaaggtcacacggggttttatccggtttatgggagaagccgcatcaccggcacaggttattcaccgggatgtgctgcggtggcggcgtcaccttctggtagaaaaaaaacagtcgagtcatacctggaataataaggtggctcatctgcgggcgatttttaatttcggtatggagcgaaaactgctgcctcacaccgaaaacccgtttaacaacgcggtgactaaaaaagagaagaaaaagaagaagattttgagtcaatcgcagataaaccgcattaatctgttgatgggcaagtttgctgaggaagaaagagtcgagatgcccccacggggagggcgttgtgccctgtatccgacctggtattggtcaacagtactggcgacattgcgttttacaggaatgcgtcagaaccagttactgcacctgcggctgcgggatattaatctggacagcaattatattgaattggggctggaaggcagtaaaaaccacagtgaatgggaaataccgatcattccgccgcttaaacgccggctgacaaaattagtggaaagggcagttgctgccggtgcgaaagcccacgatccgattttcgatctcagccggttgagtgtcccacacccaagccggctttcccgttaccaatacgatatcaaccgggaaaaacaacagctccgttctttctttcgccggctgtccaaagagtgtgattttgcggtctcgcctcaccgttttcgtcatacgctggcgacgaccctgatgaaatcgccggatcgtaatctgccgctggtgaaacgcttactggggcaccgtaatgtggcgaccacgatggaatacattgatcttgatatggaagtgacgggcaaagcgctggaacgggaactggggttgtatactgattt

SEQ ID NO: 151 - DNA, 356 bp, Xenorhabdus sp.
  CDS (104)..(355)
cgggggtgccattatctccgcggggatttacgccgaagatcagcaataacgcttcacaatgttcagtcaggtcgctcaggcggcttttttttacgggtgaaatatggaacagcatcagattcagggcagcaaaggcggcagtgacagcccccgtaccccggtcgaatcgccggattcgttacagtcgacctcgtatgccaaaatcttactggcactgggggaaggcgagttcgccggcggactggatggcaccaatatctttctggataacacaccgatcatcgggccggacggtaagtccaactttgagggggtgaagtgggaatttcgccacgggaccccgtatcctttagagc

SEQ ID NO: 152 - DNA, 1370 bp, Xenorhabdus sp.
  CDS (1)..(1368)
ccggatatttacaacccgacagcgcgtagttactccggtgtctggtcagggcagtttaaatgggcatggacggataacccggcatgggtgctgtacgacctgatgatcaatgaccggttcagcattggttcacgggtgaaaaccgaaaacttaagtctggcaaaatgggatttataccggattgcccagtattgtgatcagtctgtgccggacggtaaagggggcaccgagccgcgtcatacctgtaatgtgtatatccagtcacaggaagaggtatggacggtactgcgggatatcgccggtatctttcgggggatgacctactgggccaacaataacatgaacgtgctggcggatatgccccgggatgtggattatctctacacccgcgccaacgtgcgtgacggtaaacgcttgcaggagcaactgaattatcaggccgaagcagaactgattaacagtacggcgatttatcagaatgcccgtaacttaatcgtgaaggatggagagaacaaggccgaaatcaggcggcttgaccgggtattcgctgatgagaaggcagcatgggccgaatcctttaaagaggtgaaggcggaccttgtggtggttaaagatgaagtgagaaccgaggtcaaggccagcattcaggaaagccagaaagccattgcgaaaatggacaaagccctggcggaaagtgagcaacgcactcaggttcaattcaaacagcaatcagctctcattgataccaaagcaaccgccgtttttgatcataaaggcggttctgcgacatattcagtcagggcgggcatcaaagacgctgacgggaattatcatggcgcaggaatggttattggtgctcagatggtggatggtcaagtgagaacggatattgggtttaatgccaatcattttacatttttgaatccagttaacggtaaattagaaccatttatggctgccaagaatggtcaactgtttgtcaggcatgggtttatagaggatggcagcatcgacaatgctaaaattggtaattatatccagtcaagagattataccgcgggtcagacggggtggaagattgataaaggcggctcagcagaattcaataacgtgactgttcgcggcactatacatgcaacaaatggtacatttagcggcacaatcaacggcgctgatggtaatttttcgggcacagtctatgccagtaaaattatcggtgatgttgtttctgtcacattggggaatgtctcaatgggaagaaatacccatgttttttttcataagagactgaacgaccccatgccctttgatcgggtttttttttatggcccaataatgactcagatatatacttcaaactttagagcaca

SEQ ID NO: 153 - DNA, 2672 bp, Xenorhabdus sp.
  CDS (973)..(1722)
agtcgttactgtttttaagataaccctgtgcatcagtttcgatttctcgaccttcaaataccaacatagctttttaaccactcgacaataggggctgcaatttagcaaaaatcacctttattccaaagaaagattgccataaatgctgaataaatgcgccaacgaacagttatgtgagtgatttaacatcaattgagcatataagtactttacatcgggaacagtgatgtttatagtgcacgacatcgcggaggggtggccgagcggctgaaggcagcggtcttgaaaaccgccgatgggaaaccatccgagagttcgaatctctcctcctccgccacttctacttatcgcaacgtctcctaaagtctattttcctcagtaaaatcaacaaataacaacaaactcaagtctcctgatatctcctaacatctcctgaaagcgacatgaaattgtgtatagttttgtgtatagtttttcctatacacatcttcctatacacatgggtgaaatgatgaagctaacagacgtggcaattaagaaatctaagccagaagcaaaggcttatactctctccgatggtaacgggctttggttgttaatagaaccgaatggatccagaggttggcgattccgttatcgttttgaaggtaagcagaaaatgctatctttgggtacttatcctgaagtacctttggcggaagcaaggaaaagaaccgcagagttccgctctaagattgctgatggcgtcaatccttctgaagatagaaaacagaagaaacgagaaagcgctattatgtctgaaaatacttttgaaaaaatcactcttgaatggtacgagaaacgcaaagatagatggtcggcagggtatcgtgctgacatgatgagtgcttttgaaaatgatgtcttcccttatattggtaataaaccaatagcagatataaaacccttggaattttggacgttcttacgagaatggaaaaaaggggtgctacagagaaattaaaaaaagtccgtcagcgttgtggtgaagtttggaagtatgcaattatcacaggtcgagctgaatataatcctgcccctgatcttgctagtgcttttattcctcataaaagagaacattatccgcatcttgatgttgacgagttacccgaatttctgaaatccattgataaacacatgggcagccagattgttagacacgcactgagaattttaattatcaccggattgcgccccggtgaattaagaaagttagagtggagtgaagttgatctggaaaaaaggcttattcaaattcctgccgaaagaatgaaaatgcgtagaccgcatagtgtgcctttatccaatcaggtaatcactctacttcaacaactaatcccaattagcggtgattaccaatatgtatttcccagccggacagattataaaaaacctctcagtgaaatggctatgaatactatgatgaaacggatgggatacggcggcagagcaacagggcatggattccgtcacaccatgagtaccgtattgcatgagcagcgcttcccttctgaatgggtggaattacagcttgctcatgtggataaaaataccattaggggcacgtataatcatgcccttcatttggatggtcgccgtgagatgcttcaatggtatgctgattttatgagttctttggagtccgggaaagatattactaatagtcgttttaaaaatgactgattaagcattatcttcaattgagcagcgagattcattgatgcgctgctcaatccactcattaatctcactctctataaaggcaattgaacgagagccaatcttgacgggtttaggaaactcccctctatcgattagtttataagtccatgacttgctataacctgttctacttaaaacttcacccagtctaattaatttatttgacattgttcctctcctttctgatacccgctctccaatatcaccctcgccacactcgccggggttgccttattactccacgtcgcaccgaaaataatgtcgctcagttccgccatgagaatatcgttcaaattcttcggtcttgtggagtagggcaccccatcaggcaccccttccataatgtcgatagtgagctgagctatttctgttgcttcccgttccggcttacgatatccagaatgccagaccacatcagtgatatcagacggatcaccccagactgaagcaataatctgagtcaggtggaatgagttattgatcatgcttctccgctccttcaagtaactgatacgctgtagtaataatattcatgtcatttctcacgttattttcttttctttgggtgcgggttaactttgtgaatattatttcccttagaaataacgcgaataaagctctcacaggtaacaaaggttgtgccgcaattaatattttgacactggttatagcgctcttttgtttcttctgtttgccagaaactactacgggtatgagagttagttttacatataggacatctaaacatgttattacctcattaagaattattgctcgttctgcctttatttgcgggtattatcttcactaccgacactttgggtgctggtggaagaggagggcaaatgccctcgtgaatgtaaaaaatgcgtctcatgggatggataatgcgctggccccaatccctgcca

SEQ ID NO: 154 - DNA, 2672 bp, Xenorhabdus sp.
  CDS (164)..(337)
tggcagggattggggccagcgcattatccatcccatgagacgcattttttacattcacgagggcatttgccctcctcttccaccagcacccaaagtgtcggtagtgaagataatacccgcaaataaaggcagaacgagcaataattcttaatgaggtaataacatgtttagatgtcctatatgtaaaactaactctcatacccgtagtagtttctggcaaacagaagaaacaaaagagcgctataaccagtgtcaaaatattaattgcggcacaacctttgttacctgtgagagctttattcgcgttatttctaagggaaataatattcacaaagttaacccgcacccaaagaaaagaaaataacgtgagaaatgacatgaatattattactacagcgtatcagttacttgaaggagcggagaagcatgatcaataactcattccacctgactcagattattgcttcagtctggggtgatccgtctgatatcactgatgtggtctggcattctggatatcgtaagccggaacgggaagcaacagaaatagctcagctcactatcgacattatggaaggggtgcctgatggggtgccctactccacaagaccgaagaatttgaacgatattctcatggcggaactgagcgacattattttcggtgcgacgtggagtaataaggcaaccccggcgagtgtggcgagggtgatattggagagcgggtatcagaaaggagaggaacaatgtcaaataaattaattagactgggtgaagttttaagtagaacaggttatagcaagtcatggacttataaactaatcgatagaggggagtttcctaaacccgtcaagattggctctcgttcaattgcctttatagagagtgagattaatgagtggattgagcagcgcatcaatgaatctcgctgctcaattgaagataatgcttaatcagtcatttttaaaacgactattagtaatatctttcccggactccaaagaactcataaaatcagcataccattgaagcatctcacggcgaccatccaaatgaagggcatgattatacgtgcccctaatggtatttttatccacatgagcaagctgtaattccacccattcagaagggaagcgctgctcatgcaatacggtactcatggtgtgacggaatccatgccctgttgctctgccgccgtatcccatccgtttcatcatagtattcatagccatttcactgagaggttttttataatctgtccggctgggaaatacatattggtaatcaccgctaattgggattagttgttgaagtagagtgattacctgattggataaaggcacactatgcggtctacgcattttcattctttcggcaggaatttgaataagccttttttccagatcaacttcactccactctaactttcttaattcaccggggcgcaatccggtgataattaaaattctcagtgcgtgtctaacaatctggctgcccatgtgtttatcaatggatttcagaaattcgggtaactcgtcaacatcaagatgcggataatgttctcttttatgaggaataaaagcactagcaagatcaggggcaggattatattcagctcgacctgtgataattgcatacttccaaacttcaccacaacgctgacggactttttttaatttctctgtagcaccccttttttccattctcgtaagaacgtccaaaattccaagggttttatatctgctattggtttattaccaatataagggaagacatcattttcaaaagcactcatcatgtcagcacgataccctgccgaccatctatctttgcgtttctcgtaccattcaagagtgattttttcaaaagtattttcagacataatagcgctttctcgtttcttctgttttctatcttcagaaggattgacgccatcagcaatcttagagcggaactctgcggttcttttccttgcttccgccaaaggtacttcaggataagtacccaaagatagcattttctgcttaccttcaaaacgataacggaatcgccaacctctggatccattcggttctattaacaaccaaagcccgttaccatcggagagagtataagcctttgcttctggcttagatttcttaattgccacgtctgttagcttcatcatttcacccatgtgtataggaagatgtgtataggaaaaactatacacaaaactatacacaatttcatgtcgctttcaggagatgttaggagatatcaggagacttgagtttgttgttatttgttgattttactgaggaaaatagactttaggagacgttgcgataagtagaagtggcggaggaggagagattcgaactctcggatggtttcccatcggcggttttcaagaccgctgccttcagccgctcggccacccctccgcgatgtcgtgcactataaacatcactgttcccgatgtaaagtacttatatgctcaattgatgttaaatcactcacataactgttcgttggcgcatttattcagcatttatggcaatctttctttggaataaaggtgatttttgctaaattgcagcccctattgtcgagtggttaaaaagctatgttggtatttgaaggtcgagaaatcgaaactgatgcacagggttatcttaaaaacagtaacgact

SEQ ID NO: 155 - DNA, 2409 bp, Xenorhabdus sp.
  CDS (889)..(1674)
taaagactctgaatacccaactctggtctgaatatcgtcaagagcataatgaaaaaagatatttattgcatcatagccatagcaccgcattaagaagtcagaaagaaaatcagcgaacaaaagaggtattaaaaaagcaccttgataatcacactgaaaccaataagtggaaacaaaaatttcaacaggcgatgaataatgaaggtatatgaacaggcaggcgaattagcgcgtaatttagaatcgaaaggtttatttcgtcgcgctgcgaataaatggggtgaagccctttcattatcgcagaaccttaaacaagaacaggaatgtattaaaaacggaaatcgctgcattcaaaaagcaaaaataattattcgtgaggggtggtaatgaaatacacagaatcaatgatagaagaaatgatttccgatttaaagaaaagcagatttgaacctcctgcgtgtcttttagataaagaaagaatgattgccaattatccgccaattaccgatgaggaaaagatggaatgcgctgaattttcggttaagcaaaagcgagccatcgctgccaaagaatacttagtttcatgcggtgagcggtttggaaaacttgaaaatgggaatgtcgtattttcccatgaaaattgcacagtcgaattagattctgaagttattgaaacgctacttattcaccaaatagaaaagccaattttagaagttaatccaattgaaaaatatatcgcattgcaacgtttctatttaggaaacgaaataaatgaaaaagaaaacggtagtacatggatgcgtgattttatcgaccaagtatttatcgacggattcaaattatttacggctgaaccagcatcacccagcacacattgagagacgagatatgagcaagaaaaatgaagtcatcaccaataaccaagcggcaatgatgagcagccgtgagattgcggagctgactggtaaaaaaataagcgctgttcactctgatattcgggcaatggttccagctttgtatgcagcagacaacggagaaaaagtgcggtcctatgcatggggaacaaccaaggatgagatgatcgcgtttttaaatcatcataaaattcaaggcattgaggttatttttgacgacagaggctacgtctatgaattcctgctcgaccgccgccatacagaaattcttatttccggttatgacattgtacgccgggcggcaattatcgaccgctggcgcgcgctagaaacaggtcaggcacaaccaatagccagcaaagcaactccccatctatccaagctcgaagtcctccaaatggccattgaatctgaacaagggcgactggttgaaaaagaacgtgccgataaagcggagcgcaccaaatcgcagatcagccgcagtcgtgaggctagcgcactcggcaaactcagtgttgccacccgcaaatgtcgagaactggaagaacgcctaggcgaaagcaccaaacactcaaccattaccagcgtatttagggccacagagaaagagtacaaatacgcggccctccgcaaatggtgtcgtgaaaacaatatggaagctaccgacgtacccgaccccagatatggcagcgtgaagtcatggcctgccgaagcatggttggctgtatacggtgtcgatctcaaaaaactgtttggttagaagtgaggaatggaaatggaaaaatacattgtgacctatttagctgattacccttgcgggcaccgacacacactgcgcgttgttatggacgctcataacgcaatggacgctatcgaaaaatctctggcagcattgactgatgatcagctgacctcaactaatcacacgctcttctctgttatgccggaagcgttcaacgaaaacaccattggcagtctggatgcatgcccaaaagcggaggtgaagtcatgatcatcgataccgatttgttacgtgctgctttagtttgtgtagccaaaggtgagcaagcagaaaaacaccccggattgaccggggtccatatcacccggcaacaccttgaagccactaacggacatgtactggtacgcatggagctgacagaacatagcggcactttctttgatgacaatgatgcagatgatctcaatctggttatccggttctgtggtgatattccagagcaggcttgctttacggaaattatcttgggtgacgaggtaagagctactcatctggacaaagacaataaggtctttagcttcacccgattagaaataatcaagggtcgattccctgacttagataaaaccattccaacagagaagcaggatgttatgccgctcttctcagctgagtatctgtcttatccggcccaaatgtttaaggggtcagcgtcggtgcttattgagccctccggtatgaatgccccgtgtc

SEQ ID NO: 156 - DNA, 1773 bp, Xenorhabdus sp.
  CDS (792)..(956)
aaacgagtataactgagcaaggtgggaaaatcgtgatgatgatatcgccaaatatgctccagataaaaatttttaaaatcacgataatgcgacagatgaaagaggatcaggatggtcatgatttcactgggatacatgtgaccttttctacgacgtaggcgatatcccttattgagacaaaactgttcccattgtggaatgaaaaaacgacaaaagtcatcgacatcgatgaaaatttcaactaagttgttcatagcctgttcctccccggagctgtttcgacttgcaccaaaacacggctccttgaacaggcttctcgtcaatttcttatccagaattggggttaaataagataattatcccgttttaactcattgatttaattgaattccgtccctgagccggaaataagtaaaatcaacaagttacataaaggtgagatttcccacctttaacccattgattattccgtggtcttcactttggctcaatccttctgtttcaaatggagagactaatcaatgtgattaaatgggatttaaaagccctttatgagtcactccgctttctgctgcatgagcttattgaatttttcgtgcagtgattatcgaaagagtggcttttcaatagcggaatttgtaatagcttaggcgattttttcattctgcaaaacttttattaaaagtatataaaacaacgtgttatttaagtgattttatatacataaaactgatgttatagccttaaaatattcaatatatacagtaagttaaggttctatttttttcctgttgctgcgccacatgggatggttcgaagctgctgacctaatcgttaaaggtatggaaggttcgattgctgccaagacggtcacatacgattttgagcgtctgatggaagacgctaagctgctgaaatgtagcgaatttggtgatgctattatttctcatatgtaatagtaactaattaaaatagataacgggggcttaatggttcccgttgttttattgtcacggaagaagcggttatcaaaaagttatcaaaacaagttatcaaaacccagtaaattttacgtgcgtcagattactatttttatccaatccttgcctcggtcatcgtgatattcatcggtctgttgttgcctttgtcttgatatatccaagtaacattatcataaattattggctgctcagagaatgtattaccactttagtagggcaaacgggtctaaattgaacagttagttcagtgatgtgccttcagtacataaaggtaggaacattgatgatcgtttgtgatttacaatccgttttctgtcaatgataaccgtagaaaccgtcatgaaagcaaccaccctcagcaatacctttggacacctcactgatccccggcttaatcgtacgaaacagcatttgttgatcgacattctcaccatctcgatttgtgcggttatctgcggttgtgagagtttcaatgcgattgaagaatacggaaaatccaaggaggactggttcagacaatttctggaactccccaatgggatccccagccatgatacctttaacgatgtgataaaccggctgaatccccaagaattcggggaggcttttatcgcatgggtgaataagttagccaaaatctccaccgacattattgcattggatggcaaaacaatgagaggcacactcgacaaagccaacggctctccggctatccatttagtcagtgcttgggcggtggcgaatcaactttgttttggccctttagagcaca

SEQ ID NO: 157 - DNA, 1738 bp, Xenorhabdus sp.
  CDS (110)..(1738)
aaataaaggccatgccggatgacggcttgctgaccatggataaagtcattccggctttattgagtcagttaggtaaattaagagccgaaagtgaatccatggggccccggttgagaaatcgttaacccgtgtgcagaactccttcatggaatgggtgggagacgttaacaaagccaccgggacaacacgtgtgcttgccggtacgctggatgatctgtctaaaaatatcaacaatgttgccgccgccgggatggtcgtagcgggcctgttcggggcgaaagccatcggtaaccggctaacggcgattcaggcttcaacctcggcgttaatccagaattcccgggccgaaatcaataacgctgatcaggcttaccgtaatgcgcaggttcaggtggcgaatgccagagcaacggagcttcaggcccagcgcaatgtcttagcggcgcgctcaagattactgcaaaccaccaacgatcagcaatttaccgccgcccagctgagattaaaccgggcgatagaggcagaggcaaaagcgcatgcggtggtcactcagagtatcgccgccagagctgccgcgcagtcaaggctgaatgccgtcacttcgctgggtcaacggatggggggcgcgttgctgggtgccgtgggtggcatccccggtgcattgatactggctgccggtgccgcctatctgctgtatcagaatcagaaacaagccaaggaagaggcacgggaatacgcgaacactatagatgtcatcaagaataaacttgaagggctatcactcattcaattaagcgatgagaccaaaaagatcaaagatgtcattgaggtggttaaaaatgacttggagagcttaaaagcagatcttgaggttaaggtatcgcaattaaaagatgctaaatccttagcgaattcacccactctggcggctcgatggaagcaaagtcccgaattcttcaaaaaatccgcagtgaatctggaacaggatattctcattttaaaggagaaaataaacgaaaaggaagcaaaaagcatcgaattaaatgaaacgctagcttctttgcaagagaaattcaagtcgaaagcagtagaaagcgctgagaaagaaagaaaaatcgttgctgcaataagcgaggctagaagaacgggtaatgtcacaatagcgctacagaatcagaagcttgaatataccgtcgagataatggagagattaaaacgggctgctattgatgtgtccggtcttcatatccccgtccccgaggtgaaatttgaacccaatgataaattaaaagcacttttagccgatcaggaaagggaaattgatctctccagaagaaagggactggacaaggctcagcgtgaggcacactacaaggctattgatgcgggactcaacccgaatgaccggcagcagaagccctacgtggatcggatggttaataatgccacccagatataccagaataccgaggcgatgcggaaacaggatgaagccgcccgggaagcccggaatgccgcagaaagagccactcagaaagccgccagagcggcggaagattacgcccaaaaagtggcggaactgaacacccagttagccacagaagcggttcgttatcaggaaggtaataccgccgctgagcggtttgcggcggctcagggcaatgtgacgaagttcacacaggcgcaaaacacccagctcaatctgttaaaccagaaactggaagaggctaagcagcgt

SEQ ID NO: 158 - DNA, 2036 bp, Xenorhabdus sp.
  CDS (638)..(1798)
tgtgctctaaagccgtgctcccaggcatgttgaataagcgtgtacgcgcctgaggcactgagagcgctgtccattgccagcgccactgctttgggtgcgcctagtgtttttgccggaccataaatacttttgacttcttcataagtgaggatgtactgccctgactccagcttttctgccagggtttgagacaatgccaatccccgccgaggctttatcgcctgacgtttttgttttcttgccatagtgatatttaccgacgcatagtgcgtgaagggcgcagggcctgattaacgatgtccgggttcatactgaaaccccgtttcttctggtataaatcgcgcagagcctgagtcatggcatccacaacatcatcatgcgcccctacggggaaggtagtaatttcatccaccgtttcggtgatccacggcgcgatgtctttatgaggcaaaaagatgttcccggcttcccactcagcggtaacggcatgggcacgggcaactttacttccgtccggctcaaccggtaaacggatcggcaaaggatataaaacgactaagtccgctgttcttgcttatattaaaagcccgatgcaaactcatggagcgagcaagggtgatcgttatggaggtaaatcatgtcaatcacccaaagaaacggaatatggcactgtcatttctttacaccgtcaggaaagagagttaggaaatctcttggcacgagggacaaaaagcaagcgcaggagttgtatgaccaattaagagctgaggcttggagggttgaccaacttgatgatctgccaactcgtacatttgaagagtgttgcattcgctggcttagggaaaaagagcataaaaggtcacttgatgacgacaaaacgaagattgagtttttcctacaacacttttcaggccgggatgtttcaacaataacggcagatgaaatttatgatgcagtttcaaatatgaagaatcgtaaacattatcaaatctgggagagtaaaagagatgcagcgctgaaaaaaggggaaaagcctccggtgtatgaggccattcctgtgagtcaggcaacaaaaagccagcacctatccttcatcagatctttgttaagggcagccgctaatgaatggaactggattaagtcagcgcctgttatcaaaacgaagaagccagtaagtaagcgcataagatggctgacaaaagatgaagcggcaaggctcattgagtgtatgcctgaaagtatcaagccgattgttatctttgcgttagcaacaggacttcggcgttctaacatcatcgatctggagtggcagcaggtcgatatgcaaagaaaagtggcatggataaatccagagaacgccaaagccgggaaagcgataggtgtagctctgaatgataccgcatgccgggtgttacgggatcagataggcaagcactcaaggtgggtctttgtgcatactaaagccaagcaccgaccagacggaacattaaccccagcagtgagaaaaatgagggttgatgataatagtgcctggaatatcggccttaaaaaagcaggaatagaagacttccgttttcacgacctacgccacacatgggcaagctggttgatacaatcaggggttccactttcagcacttcaagaaatgggggggtgggaatctatcgaaatggttagaagatatgcacatttagcacccaaccatttaagtgaacatgcttgcaaaattgatgtgctttttgaagataacgacacaaatacgacacaagggaaaaatcaagcgggtctgagattggcgtaacatattgattttaaatggtacgccctacaggattcgaacctgtgacctacggcttagaaggccgttgctctatccagctgagctaagggcgcattgagatgtgaaataagaaacatcattaatgcaatgcgttgatgctgacgtggattatacgggcataatggattgagtcaatggccttttcgttcagatgctcattttatgattatcattaaaactgacactttagagcaca

SEQ ID NO: 159 - DNA, 2335 bp, Xenorhabdus sp.
  CDS (1216)..(1608)
tgtgctctaaagtccattcatccagatccgtttgcaactcattgagtgacatgtacagtttctttctgaaggtgatttggtaaaactcgttcaaaatgctcttatggaaacgttcacagatgccgtttgtttggggggagcgggcctttgtttttgtgtggtcgatatcattgacggccaaataaagctgatagtcgtgatattcgacacgcccgcaatattctgtaccccgatctgtcaaaattcttagcatctgacgttcatcattgcttgatactcgcatatagccaatcaacatgtacgacaaaccttaaaattgagcttgtcgtacagtgtctcattccgacagtgtttgtcacgtaaaaaataacaggtttatgccttcaattttttccagcggcaggatctgacggaaaacaggtgattttcgtcagggtgaaaatcgcttagcgggtgttattgcagaaatgaccacggaaccccttaatggcttttatttttcattcctgggatacatcccatttaatggtgacatttgcagcaaattcgttcttctcagtaagaagaattaagcggttattgtggtcactatattgggtaattatattgataccggctcgtgcaatagcatcagctacttcacccagttcaccagaccgttcctgatttagttttctgattaaaggcttaactacatcacgtacatctaaacccgcagccatcaggacctgacgggccagctctccatcttcaactaaaaaatgtgcgtggctttcattgccaatcgtaaaaacgccaccaccttccaggctaacgccatttttaccaagtaaagaaccgagtaacgcaagagcaccgggagtattactgagaacaacatgaatatcatacatacgagtattttcctttttcagattaatagccataaaaggcatgggaaaaaatataggggaaggtattgtgatgcttccgtggtaagcgaaatgtcaatatttacgcgtcggttttcggaatcagcccccttttatgccttatgagccatttttgagatctgcttcaaaaatccacatttcttcatcatgagcaagtcttttaaaggtgctctctcggtgagatagtaaggcgtctaaggcctacggctacagaaagcttttacctaccaaaccctatctaattgaaaaaaaataacatttaacgattttgtgattaaaaattatgaccagaataaatcttatccagccaagtgaattgtgtgatcaacatttgcttgccgaacatagagagttaactcgaattcccaatgaaatagctaggagggaaggtaatgtgaccttgagtacatcagaaaaatacctactaggaaaaggacatgtgattttttttagagataagctgttatttttgaagaaaagatatgaagctatacatcaggaatgcttgaatcgaggtttttccgtagtaaacagatggccagagagtgtcagtgtttatcaccatttatggaacgattatcaggtaactgaggaagatattagcgttaatatggcaagaattaaggagcgaatgcccataaaggctagattctctccctgctttgataaaaaaattaatgaataaaaaccaaatacatcttctgttatggaattaaattatggcattttctattacttatacagccatataaaaattatcataaagacgattagcatttacactcacatcaatctcaaggcatagattaacatcggcttcaaagcctctttctttcagctcaagtgcagatgaacagttataaagtgatgctaaaccatgctgccgttgttgtttatagacagcaacagcagcgtatgcttcaggggataatttccgattgccaagagacgcaataattccaccagcagcaacataatcttcaatagaaaaacggatactcccatcaggccaacgctctccgctcgggacaacgagaatacgcttaaaatcctcacaagctcttgcacacgcagttatgttcctgaagcaaccgctaaaaaccgtcacaccataatcttttgctttgaatgaaattgaagagccattaggtgatggtagaacaagtttagtaccttcaggaattgcctgaagagatgctggtgaaaggctgaattgactgtcagcacatttcctgttgaagctggcagaaagtgcccctaaatttctagcatattgaatagccgtctcgtctttccatgaataaggataaacataagcattattgtcgtttgctatactgacacaggttgaaaacgacataacatcaacaataaccacacaatcaacatattgcgccagattt

SEQ ID NO: 160 - DNA, 3140 bp, Xenorhabdus sp.
  CDS (1204)..(1476)
gtttcacgtcttcacattttattgtagatggaaatcaattcatgaaaaaactactcgaattacgccagcaaaaagccgatttaacccagcaaatgcgctcgctgctgaccaaacccgaaaacgaaaaacgttccctgacagccgatgaagccaaacagttcgacgaactgcgcagccaatccgataacctgaatacggaaattgcccgttatgagtctttatctgatgaagaacgcagtcaggcaaagactcaaccgaccagtaaagcactcagcaatcacgagctacgccactatatcctgactggcgaagcccgttccttgtctacaagcatcccctcagacggcggctataccgttatccctgagctgaacaaacaaatcatgcagcaattggctgatgagtcggttatgcgccgaatctgtaccatcaaaaccacgcgcagcaacgaatacaaacagcttgtttcggtcggtggcgcagccgtaatccacggggaagaaggcaaggcacgcggtgagactgccacgccgaagatggaagaagtcagcatcaagctgtttcctatctatgcctaccctaaaaccacgcaggaaattatcgattttagcgatgttgatattttgggctggttaacctcagaaattactgacacttttgttgataccgaagaaaccgatcttgtgagtggtgacggcagcaagaaagcaaaaggcttcctgtcttatcctcgtgatgctcaagccgatagggttcgcacattcggtacgctgcaaaagctggaagcgactcaacttgaagccgataacttgattgacctgaaattcatgctcaagaacaaataccgcaaaaatgccgtttgggtgatgaattccacaactgccgccaacgtgcagaagctgaaaaacggaatggagattacatctggcgcgaacgtctgcaagcgggtgatcctgatatgttgctgggcttgcctgtccactatctcgaatttatgccggataacatcatcggtctgggcgacttcaaacgcggttatttcattgttgaccatcaaacgggcatccgcactcgtcccgatatattaccgagccgggattttataaggtacataccgataaatatttgggcggtgggctggtggattccaacgcaatcaaggtgctggaaatcaaagcctcttgataatattggagtttatcgatgaagaatgattttgaaatccgtaccgcttcattatctgccaatgacaagaaactgacaggctatgtgattaagtggaacagccgatcacatatcttgtgggatgaatttgccgaacagttcgccccaaatgcctttagcgccagcttaacagcgggggcagataacgaattttttggcgaacataagagaccaaattatcatgccacccaattcccttcgagcaaacgtcaacacgccctagtcgctactttatctgactctgttttgtagacaagtgcgactaaatctgacagtcagccatgagaaaggagtggacatatgggcattctatattcactgttacacttacttattttcctgcatatgcttccaaatctcttcgaaaacatcttcattcgcataacccatataactaatcgatagtttattaaattgtaacctgagggattccttatctttaagaaacacattgaggagagaacgtgaatttttaagataaatgcctttttcttcaggattcatattatcccatctgtcgccaaaaagttgaatagctgtagtaagtaaatcttcttttctcttttttaaagcttttcctctatggtttttttgtattacttcattaaatgctctgtgaaacattaagtcagaattatatgtgtatattttatttgaatctagaaggttagcagatattgttaaatcctccgtttctaatagactttcataaaaattgaatgatgcagtttcaacatcaatagcaggaattttttccaaaggtgcaatgcaaaaataagctggtgtaaatttctttattgtatgattactacgaataaagtggtaaccatgacaagtcccaatgaatgtaataagttgatttttcattattttattaatttcccgcaagtcatctgctaattccgtccatgaaatagtacttttatctgctagttgcattaaaagtggagaaccatgagcttctatatgaataattgggaaaaactcaatatctaactcaggattaaagaaatcttttattttttgtattatgatacgaaataaatcagcatctggaacttttagataagaaatactatccctgaatcctttatcatttaaccgttcattaagatgtttagctgtttgatattcaccctctgctaaacagtcgagaataatgagtttattgaaattaactttcttatgaaatgttttgtgcttcattatattcctcgaatatattattggtagttgtgtcaggatttttgttattactgaaattcgcagttagtatcttgccatagagtttcaatgcagagcagacgcctatcacagtgtaactcttagggtatgaatgactatatctggaactgaactgactgtcatatacctgaactcagaatagcaaaggtatcaaatctcatctggacagcatataacgtaaaaagttaagcgtttatactggttcgcttattgagtccgataaaccaatcagttaaagtagctccgccattagcaaaatctagtggccagggcttcgcatccctgagctaagaacactggtaggatgtttctaccagtgacctcgttcaccctttcaatggtgattcaggcaggggaggcttcggcctcaccggaatcttagcccggtaatgcgaaccttgcttgaatcgccaccatcaattttctcaattaatggaaggggtaacaggaatgaataacgttagaaatgattggcaccaagccgacattattgctgcattacgtaagcgcggtacaaccttagcggctgtttctcgtgaatctggcctcagttcatctacactggcaaatactctcagcagaccgtggccgaaaggcgaatggattattgctaacatatctcgaaatacatccctcagaaatctggcctagccgttattttgattcgtatg

SEQ ID NO: 161 - DNA, 3140 bp, Xenorhabdus sp.; identical to SEQ ID NO: 160
  CDS (3)..(1106)

SEQ ID NO: 162 - DNA, 4449 bp, Xenorhabdus sp.
  CDS (960)..(1382)
gtgattggttgcaccataagcaatatccattctttgttcatcggaaggaataggagcgatttgtgcgcccatcgaggtgaatattgctctggcactgtcataaccggggtcatctaaccagactttatcatcaggttgtaataatacccgggcagctaaatttattgcctgctgagtaccgttaacaataataatttgatcttcgtggcaatttacaccacgggttgaatgaacgtaatcagccagcactttttttagtagtggatagccatcaggtcggttaaattggccaattgcttttttagagtgacgccagactctaccgcttaactgtccccataattcatgaggaaattgatccacacaaccgacaccgatgttaaatatagggtattggtcgcttattagttttattttttcccagaaaggcatcagcctatttgcagtagcgctgaggtctggtgctgaaatcatttttcttttcaagtaatcaggagaaggatttgttgtgatcaactcatctgggatcgtggttgatacataggttcctgaacctttacgtgctatcaaatatccttcatcgatcagacgttcaaaaccggcaatcacggagttgcgtgaaattgccatcatttcagccagtgctcttgtggatgggattttggttctttcggtgagccgaccatcaagaatagcatttctgatcgtatggtaaacctgatccttaatgtagccattatttaagagtaaatgcggaaacggggattgtggtttgcacaccatgataaagtggatccttaaataataataaaagtgtatcttattaagtaccaaatggaattgtaatattgctccgtcatttcgtcattatgatttttacgatcaaaatcaaataggatggcttttatttgagaggagttatcatgagcaatgatttattaccggttactgttgaatttgtttctcctgaacattattcacagtggctggtttattggcaggcatatcaggatttttataaagttgatttagcggaaaatattactgaaaggacgtgggccagattttttgatgtaaaagaacccatgcattgtgcggtcgcattagagagcggtaaaattcttggctttgttcattatctctatcaccgtgctacatggtctgaaactgatttttgttaccttgaagatctctttgtttcaccggagttcagagggcgtcatatcggtaaaaagctgattgaatttgtccagcatgaagcacaaaaacaacattgtgggcggttatactggcatacacatgaaacgaatctgcgtggtcagcgcctttataactgggtggccgaaaagtcaggcatgattgaatatcgtatgccattgtaattgggttttgttaaataaatatgccgatcttcaggatcggtatttttctttcataaaagaaaaataatttaatgtattaatgcttcaatctcttcccggtttaattactctattcattcgcgccatacctaaattatcacatttcaatttccatttatgattaattttatctcgggttaatttttgattagtgctttcaatttatgcattaaattatttttaatggttattaaacgttattaagtactaaagaaattaatttgttaattcgggaaggtgaatttgcataaaaagcaatttgcattattggcaatgtactcaatataaaattttcggcgcgatcaatgccgatataaaactaacaacgctacaaaaatttttttcagaagaaagtttactttcattttgtggcggtagctttatgtaaacaaagacttttctgcaccctaagtaatttaatcaaccataatcacttttatttaaagagaggctattatgtctacaagtacgtctcaaattgcgattggatatcctattccttcttatcgttttgttgtttctgttggcggtgaacagattccattcaatagcgtttcaggtctggatattaattatgaaaccatcgaatatcgtgacggtgtaggtaattggttcaaaatgcctggtcaacatcaacctattaatattaccctgcgtaaaggtgtttttccgggtaaaactgagttatttgactggattaattctatccaactgaatcaagttgagaaaaaagatattaccattagcttaaccaatgatgctggttctgaattattaatgacctggaatgtcgctaatgctttccctacttcattaacgtctccttcctttgatgccaccagcaatgatattgccgttcaggaaattacgctggcggctgatcgcgtcactatgcaggttatttgaggcattgatagttaatcattccatataagggattttttatgacaaccgttaccagttaccccggcgtttatattgaagaattaaataatctggcgctatctatatccagtagtgctacagccgttcctgtttttgcagtgaatgaaaaaaataatattattgccgaaaataccgcattccgaattaactcctggatggaataccttaataaggtatcaaacaattttgatgcagaagataaattgtcagtttctctgcgggcttattttactaatggcggaggttattgttatctcatcaagagcagtaatttagaaaaagtgattccaaccttagatgatgtcactttgctggttgctgcgggtgaagatattaaaacagccgcagcaattttatgtcagccgggaaaaggattatttgccatttttgatggccctgaagaagccttgactatcacgaatgtagaaaccatcaagagtaaatatgacgctaccgcattcgcggcagtttattacccatggctgaaagcggattgggcaaaaattactattccaccgagtgcggttatggctggtgtttatgcctccgtcgatctctcccgcggtgtatggaaagcccctgccaatattgcattaaaaggcggactggaaccggcatttttggtcacggatgaagttcagggagcatataacgctaagcgtgccattaatatgatccgcactttcagtaataccggcatcaccgtttggggagcaaggacgttggaagacagtgacaactggcgctatgtccctgtgcgtcgtttattcaataccatcgaacgggatgttaagcgcaccatgagctttgccatgtttgaacctaacagccaaccaacgtgggaacgtgttagagcagcaatcaataattacctttatagcctgtggcaacaaggcggattggcgggcaacaaagaagaggaagcctatttcgtgcagattggcaagggaattacgatgacagaagatcaaattaatcagggacaaatggtagtcaaagtcggtctggctgctgttcgacctgcggaatttatcatcctccagtttacgcaagatgtagaacagcgttaatcatattgattgataaggaattatcatggtagctgatctaaaaacgcccggcgtttatattgaagaaaatgcttcccttgcattgtctgtcagcaacagtcccacagctgtgcctgtttttatcggtaagtttaccccaaacacggtagagccaaaccaagcctgtatccgtatcaataactggcttgaatttacttctgctttttctttggcaccagtgacagatgttgttatcaaatcaagcctcccttctgatagtggaacaaaaaaagaagcccgagaaacacctgatgttcagattctcgctgcttctgttgctgagggagaaacccaaaaatggatccacagtattgagagaattaatcaatctctggctgtagaagccctgaggctctattttcaaaatggaggagggagctgttatatctacccattaaacaatattaataacgaattggctttggcagctattcccgaattaattgagcaacaaggggatattactctactggtttgtccggaaaccgaatgggattacaaaaacagagtttatgatgcagccagttcattactaaatgataacaaagtaggctattttctgattgcagacagccctgatggtgaatcgataccaagttcgggaactcgctccagaattgccgcgtattatcctcagttggaaactaacctgacattctctgccttacccgttgataagaatgtgattatcagtggatacgaggatgaatcgggcaaagataaactgaaaaatctggatgaactcaggaaaaaaaatgaaacgctggcgcggagtattgatgccagattaaaacaggaacaacaacgtcagcttattcttcctcccagctccgccattgccggagtttattgccaaacggataaccagcgtggtgtctggaaagcacctgcgaatgttgcacttactggtatcaaaggactgactgataaagttgacgatgctcggcaaggaaccatgaatggcaaaggcatta

SEQ ID NO: 163 - DNA, 4163 bp, Xenorhabdus sp.
  CDS (3214)..(4161)
atatcacagataaccaatgctccggcattaataaagggattacggggaatacctttttccagttccaactgcaccaatgagttaaaaatggttgccccaaggctctgtgcctactcgctgccagatatcctcttctttatagcgtgtcattgccagtgtcaggctcaacaccttagaaacagactgaatggagaaacgtttttccgcatctcccgctttaaagacttgaccatctaccgtacagatagccattgccagattatttatcggaacttccgccagagcaggaatgtaatctgctacttttccttggccaatcaaagggcgtacttcatctaagatatctgccaataacgcattagagaaccttactttcaccactttttctccagacaaaaaagggctctcaatgagcccctacataattcttaattcaacagcgaatcaatcccaccacatatcaaataattcagatgtggcaacttcttccataccgcgatctttcagccatttatcaatcagctggcggtgttcttcagtgcatttaccgattttctgtaaacagacaagaccttcccactgcaaataaccgctggcatccagtgcaaggccatttggctcgattaattcctcaatcagagcatcaaccgtgctgtctacgacttcgacggatgtatcagccggaaagttccacttgacggaaaaacctaattcctgaaattcatcaatacgcaattttttacgcagacggcgactacggtttttagccattattttaccctctcaaacattagatcccatacgccatgccccaaacgatgaccgcgcatctcaaattttgtgacaggacgtgaatcaggacgtggtacgtaatcattgctttctgaaatgttgcgatacccttcagcttcgctcatcacttccaacatatgctcagcatatggctgccagtcggttgccatatggaatacaccaccaattttcagtttatttctgatcatctgagcaaaagcaggctgtacaatccggcgcttattatgccgcgctttatgccatggatcagggaagaatagctgaaccatttccagcccctgttcagggatcatattttccagtacttcaatcgcatcgtggcacatcacacgcaaattgctgatattttcatcttcagcggaagccagacatgcacccactcccggagcatggacttcaattccgaaaaaattcttctccggattctggcttgccatcgtgaccagagatgtccccatgccaaaaccaatctccagcacaacaggtgcatcacggccaaacaattctgccatatcttgcagtgcaggctgataatccacacccatatttggccacacattatcaagtgcatgttgctgacgagccgttaaccgcccctgccgacgcacaaaactgcggacacggcgcaaagccctgccattttcatcatattccggtgaaattacgttatttatcatggtactgtctattggtactttctatcagttttaaaggcttttgctctggcttccgggacgttatgtgccgcaggattgcctaaagagagcgcaattatgcaaagatggctgagtttatcaagttcagtgctcataagcacaactttaatgttaaattgtgtagtgcttcgaaacaaagttcgggtttacactgaggttacactatgttgcaatcctgttcacgaaacgattatcagatataaagacaattattctaatgatggaagccgagcaattttcacaggcggtacttgaatggtatcaccgttatggtcgtaaaaccctgccgtggcagctggaaaaaacatcctatcacgtctggctttcagaagtgatgctgcaacagacgcaggttgcgacagtcataccctatttccagaagtttatttcacgttttcctgatgtcacctcactggcggcagctccattggatgaagttcttcatctgtggactggtctgggctattacgcacgtgcccgtaatctacacaaagccgctcagcaggtcgttgaattacatagaggaaaattcccgaccacctttgatgaagtagtcgcattacccggcgtaggccgctctaccgcaggcgctattctttctctctctcagggcaagcatttcccaatccttgatggtaatgtaaaacgcgttctggcccgctgctatgctattgatggctggccgggtaaaaaagacgtagaaaatcgactatgggacatcagtacccgcgttacccctgcgctgggtgttgaatattttaatcaggcaatgatggatttgggtgcaatggtatgtacccgcagcaaaccaaaatgtgagatttgcccgcttaatacaggctgtatcgcgtatgctaatcacagctgggccaattatccgggtaaaaaaccgaaacagaccatccctgaaaaaaccgcgtattttttattgatgcaacatggcgatacagtctggctggaacaacgcccgctttccggtatctggggcggattatttgcattcccgcaatttactgatgaaaactcactcaaacagtggctggaagattcagggatctcgcacagtcaacctgaacaactaacttcatttcgccacactttcagtcattttcatctggatatcgtacccattaaaatcaacatattatcttttgattcctgcatggatgaaagtaagggactttggtataacttacgccagccagcaactattggactggcagctcccgttgagtaccttttgcagcagttgggataaacttaacccatattttgtgcgccattattttttgctccataacgacatttgaggatttatcatgagcagaactattttttgtacttttttgcaacaagaagccgaaggccaggattttcagttctatccgggagaattgggtaagcgtattttcaatgaaatctctaaagaagcctggcagaaatggatgagcaaacagactatgctgattaacgaaaagaaactgaatacgatgaatccggaagatcgcaaattgctcgagcaggaaatggtgaaattcttgtttgaagggaaagatattaaaatcgacggttataccccaccagaaaaataatttttaatatctgctatttattgggtgaatcaggatatttaaaaatcacccaataaatgggaatttatcctaatatccaacggcatcataaaatgaaaaaactgctggcactgctcctgctcactccacttctgatttcctgctcaagtaaaaaaaatattgaatacaaagaagaatatataaaagacacgaacggatttgatatcttaatggggcaattcgctcatgatattgaaaatatctggggattacgtgaagttttaattgctggccctaaagattacgtaaaatacacagatcaatataaaacccgcagtcatattaatttcgatgctggaaccattactattgaaacaatatcgcctattgagccaaatgagcatttacgcaaggccattatcaccactttattgatgggggatgatccgggttctgttgacctttactctgacacgaatgatattcaaataagcaaagaaccctttctttacgggcaggttctggataatgccggcgagccaattcgctgggaatggcgcgcaaaccactttgccgattacctgctccagaataaattacaacgccgtcagtcaggactgcatgtgatttggtctgtcacgatgcaattagttcctaatcacttggataaacgcgctcataaatatttgcctattgtccgcaaagctgcgattaaatatggtattgatgaatcgctgatccttgccattatgcagacagaatctagttttaacccttacgcagtcagtcgctccgatgctctgggactaatgcaggtaatgcaacatactgcaggacgggatgtattcaagatgcagggtaaatctggccagccagaccgtaattatctttttgaccctgaaaacaacatagatgcaggtacggcttatctggcgattttacagaacgtttatttgggcgaaatccagaacgcaacctcgcgccgctatgccgttattaccgcatataacggtggtgcgggcagtgtcttaagggtattttccagcgataagaaaaaagcagc

SEQ ID NO: 164 - DNA, 2547 bp, Xenorhabdus sp.
  CDS (2)..(391)
taacctctatcgctctgggtataagaaacagcttggtatcaataacgaccagctaaccgaaatccagcaactgaccgaccgaattaactatcagaacacgcgcattgatatgctgcatgagttagacagcaaacacactcaggaactcgccaatgccaagactgaaatcaacactcttcgggctgatattgccgctggtcgtcgcaagctgcgcatcaaagccacctgtcctgtgcgtgaggccacttcctccggcagcgtgggccatgcaaccaccgtcgaactccctagagaaactggacaagctgttctcgatatccgagaagacatcatcaacgaccgggcaaaactgagatatttgcaggagtatgttaggacgcagtgtgggtgagaggacggtgggaataaaccgtcctcttagtattattgatgatgtccgtgtccgacacatattcctctaactggatctgcaaataccttgcatgactcctcgcaaattttccttgctttttcgtcatgaatataagcacaggcggcataagtttgcattgaggcggaaagtgttacgcctgccagcaagcaaagaagcaaatattttttcatttgactctccgtttataacgttattaacaaaaaatggataagcctaattatcttatccctactgaataatacgtgaactgaatttaacaattcgttaacgttcgaagttgagatcaatatttctttacccactccctgagtggttaaaggaatacagataactcatgctgccacttcgttctcaccgcgtactctacgcacacgaactggcggcatttttattttcaccgggttatcgccgtctgtcggtattagctatgacatgtctccttttcatcgagcgtactgacagaatcaaaaataacccatgcccctgagaataacaggtcattatcagcaacatccgctgtaggcaggccaagtgatgtgacagccggagagacggcaaattctgaacagtctattcattgaatggattgtgcagagttttatctctgttttgactgactcccggctaaaaaatgacggggttatataaatcagaccagttgaatatgctgaatgaggtgaaattatgccaccccgtattccccgagcttgccgtaagcagggttgccccaagacgacaacagatcgcagcggctactgtcctgaccatctgcataccggctggcaggctcaccaacaaggcaagaaccgacatgctcgcggttaacgaagtggcgcgtaaaaatgccaagtctacgctgtcgtccggcatcgggctgtacatgaccggggccgacagcgaaggtggggcggaggtgtattcggcggcgacgacccgcgatcaggcccgtatcgtgtttgaggatgcaaagagcatgatcaagcaggcccgacccacgttaggccggttgtttgagtttaataagctggcgatttatcaggagcagtcgtcttccaagtttgagccactgtccagtgatgccaataaccttgacggcctcaatatccattgcggcattgtcgatgagctgcatgcgcaccgcacccgtgatgtgtgggatgtactggaaaccgccaccggcattaactgtttttgctcccagcgttttcaaacgctcaatgacttgctgcaccagaatatccggggcagaggcaccggcagtgacgccaatagcgctgatattatcaacccactcttctttaatatcttcggcagaatcaattaaataagcgggtttccccatgcgttgtgccagttcagccaaacggttggaatttgatgaatttttggagcctaccacaagaacaacatcggcatcggttgccagatcacgaaccgcttcctgacggttagttgtggcataacagatatcatccttacgtgggccaataatattcgggaatcgggtattaagtgcatcaatgacgtctgaggtatcatctacagaaagcgtagtctgtgtcataaaacacaggttattttcatccttgacctgcaatttccacacatcttccggtgactccaccagatacataccgccttcagggttgttatactgccccattgtcccttctacttccggatggccggcatgcccgatcagaatggcttctttgcctttacgactcgcccgggcaacttccatatgtacttttgtcaccagaggacaggtggcatcaaacaacatggtcaggttacgggagcgggcttctgtacggatagcctgagagacaccgtgtgcggagaaaatcagaattgcaccatcagggacttctgagatttcttcaataaaaatagcaccccgagccctgagattgtcaaccacataacggttgtgaacgacttcatgacgaacataaatcggagcgccatagagttctaatgcacgctcaacaatgctgatggcacgatcaacaccagcacaaaaaccacgagggttagccagcaatatttgcatggttttcctccaactgagggtctatttcccacacttcaatttcgaaaaggatgttttg

SEQ ID NO: 165 - DNA, 2547 bp, Xenorhabdus sp.; identical to SEQ ID NO: 164
  CDS (1245)..(1757)

SEQ ID NO: 166 - DNA, 3685 bp, Xenorhabdus sp.
  CDS (253)..(597)
gtgctctaaagtaagagagtgaaagagcatgtcatgtcgaaagcaaaagaagaaggtctatctctgaattcagcaattatccaaaggctggtatggagtatcaatgatgagaaaaagaggattgggtaataaagtcgaaacctcgaagggtgcaaccaacgaggcttctaaatcttcaaaccgtgtaagtaataaagattatgtcaacccataacagagagtgacaatatgaataatgtagcaaataaaaaccttcctgtcattgcaggcgtagaaatcactaccgattcagaaggtcgttttaacctgaatgctttgcatagggcgagtggtactggggaagaaaaatcccctgctaagtttttccgtaacaaaacagctaaggaattgatttctgaactagaaagccaaactggacaaatttgtctagttagctcagagggtaaatttggcggcaccttcgctcacgaacttctcgctgtttcttatgctggatggataagcccttcattccaactgcaagtcaaccagactttcatcgattatcgcactgggaagctagcgccaacagagcccgagaaaagtaaatcaggtttacctgaatatagattcgccaaagcagagcaattgaagtctgttgctctcgaaaagaacattgcttcgattgagagattgaatgctcttttaccgaacttagatcatctggctaagcagtcactggctgcatccataattaacccaacagtaggctttgaagctattcctcttccggtgctggaagaaaaatattacacagccggtgaagtaggaaaaatgctggatgtatcagcgaagaaaatcggactggttgccaataagcacaacctcaagaatgagaaaaatggcaagttctttctggataagtccgcttactcaagtaagcaagtcgaagcattccgttataacgagaacggcattaaggcactgagacatttaattcatggtgttgaagtcgcttaaggatttaagccacggaaggcgaagagcgaacaatcaagctatcaatgttattaagggtatgcaaccgattccctatcttaaatcgattgattagtctaattttcgagccgcttcccaaatttagcatgtaaatatttacaaaaggttacagttacgtaataaatgatgtcgctttaaacggcgaagccccgaaactattaccagtagttcggggcctctaatacaacgtttaccccgtgaagaggaagtaaacatggtaagtataacagttaatgaattaactaaaaacaccccatcagtagagcacatgatccccatcatgcacaacaatgttccggtcattactactgagctgttagctgatgtttatgaaactgacattaacaacattcagcaaaactttaagcgtaataagggtcgtttcacggaaggcaaacattactttaagctaactggtttaattttaaaggaatttaagaacagactgacagttagtcagtcagttaacaagcacgcaagaaatctcatcctctggacagaacgcggtgcagctcgtcacgctaaaatgctggatactgacaaagcatgggatgtcttcgggaaactggaagatttctactttaacctgaaaggggttgagactaaaaccacaacctatgatcgcactcccttacgtggactggttaataccctaatgggtaaatatggcatcagtgatagaacgttattccagatggtgcatcgtgagtttggggtaaaccatattgacgagctaagccatgatcagcttccgtctgcgatagcttatctggcaactaaagtgattgaaggggagtttctaggtaaagaggctttgcctgtatcccagcaaattagatacacagttaaactggaaatctacgataaccatttcaatcaagtagataggcttacaaacaggatggatacaccggaaggcattattcaaggggtagccaaattatacggttattacattgataaaatggtatcaatgccggataacgcgctttagtctcaagccacggacagctttatttggtgattgtataaccagtcagtgctaaaattgaatcaaccacgaacacagagaggtagatatggacgctcgcatagaaaagttagagacaagagtcgattccatagagtctaccttgtctcgcttaaatgaaacgatgttaaagctagatggtaagattgacttacaaacatctaaactcgaatcagctatagctttgcagtcaaataagcttgaatccgcaatagctttacaaggcgttgaactaaaatcttccatggacaagcaaaaagttgcttttgatggcaaattgaaggatatgcgcttaagcatcattctctggattttaggtctgcctagcttgttttttgcagtatataaaatatatgaaactattggacattaactaacccgcttcggcgggttttccatttctaaggccgccgagtgcggtttttttacatccaaaaacggggtgaactatgtttggaaagccagatatccctaactggaagggtatccccaacgctgcaatggatgccggaattagcctgggtggtgcagcgttaatcaatacactgttcggcaactactgggggatattcaatcagtatggcatccccttattgctggcagatagtgtgatctccctgcaataccagactcagtatcgggtggtgagtgccccgatagagaacggctcatttgcttcttataacaaggtcggtgagccttacaaagtgacggttcagttaagtaaaagctcaggcggcacattagagcgcggcgctttcctgtctcagcttgagatattagcgaaaagcacattgaagtttcatgtggtcacgccggaatttgtctacatcaatgctgccattgtcggctatgaccttgcacgggaagccaaagacggcactacgctgattaaggtcaatgtccatctggaagaagtcagggaagtgaaaatcaaatatgacaaagaggaagtgaagaacccggacgatgccaaaaagaaagacaccggcgaccagacacagaaagtagaaactcaacaaaagcgggtggaaaaaggggatatgtcatgggggaagtatagcatgactgagccagagtcagcttttaacgctgcaatggaaaaggtgactaatgcaacgatggaaagagtgaaacaaattccgttgcttaatcagtggctgctgggaggacccgtccaatgattgccgaaattaccttatccctcatacccaaccaaacaacctcattcacgattggtacagacctaatcgacctaacccttgaaagccgactgggaaatattttcgccacggtacaaaagaacggcgagtatctggtgtgtatcaataaacaggccgccattgtgggcaaagaggccgaatcccgacaggaatttgagctaagacgacagcagtctgtggcggtcaatgccaaaaatactaatgccgcgacacagggtgcggtaggtaatcttaagggcgtgatcgactgttacgttattgataatccctctaacgaaacaaaaaccgtagggttcaccaattatccgttaattcgcaactccatcgcagtgtctgtcgtggggggcgatgataatgagattgcccggcatattctgagtaaagccgggtctgg

SEQ ID NO: 167 - DNA, 3685 bp, Xenorhabdus sp.; identical to SEQ ID NO: 166
  CDS (1295)..(2032)

SEQ ID NO: 168 - DNA, 4015 bp, Xenorhabdus sp.
  CDS (65)..(313)
acgagatggtgttatttcaagactgttattccaagaacaatgctttcaagaaaggtgaacaattatgattaagtgtcctctttgtaatcaatcagcgcatacccgtagtagctttgagcattcaagccaaacaaaagagcgctataaccaatgccagaatatcaattgtggggcaacgttcgtcagccatgaaacgtttgtgcgctttatttctaagccaggcgatgttgaaagtgttacgccgcatccgagggcaaaaactaagagacaacctcgccagaaagctgcgccacaagctgctgtcacccaataaataataaaaaaccttgctccagtttttgccacctttatggtggcttttttatggatattgataatttaaagttctcttattgagaaccctatgatggtggcacaataaaaaccgatgtcttcataagacgcccgcttttcagcgtagcaggcgtcagtctatggcaggattacttctgagattccgcctgtaaaatcctttgcatctcatcctttatatggagtttttctttttttaatcgcacgactttttcgttatagccagccccattcgggccttcaagctgcgatatttcatggtcaaggcggttatgtttttcaaacaaggattggaaacgagggtgggagtctttcaggttggatactaaatcacgatcttctgcaaattctggaaacatgggacctccaattacgaagtttactaccacactatgagtgtagcagcccattgtaataccagatttgagagatatcacataaaaaatattttataaaaatggcgtatctctatgattgttaatgtaaatttattctacactgaaggaggtgttattttcttttaaaataatagtgctaaaaatcagtgccttgctaaaaaagcataatttattactgaattttcgctgttatgattctcttgcgttgttaaatataccaagaggtgaaaaaatgaaaaagtatctacttgccttagctgctatgagcgtttcggtttatgcccaggctgataaaactgatgatctggctccattccctgaaccttcagagggcatggttcgcagtgtaattacgctagcacctgaaaaggacgaaaataattacatggtcgaattgatgattggcaaaagtatgatggtagattgcaatcatcactggtttggtggaaatcttgaaaccaaaaatattgatggttggggatacaattattatgaattggataaagtagctggcccaatgtcaactaaaatggcctgtgctgatcagaaaaaaaccatgaagttcgtgacagtgaatttagataaggatgcatttgtacgttataacagtaaattaccaatcgtggtatatacaccgaagacgataaaagttaaatatcgtatttggcagacatcagataagatcaatgcatcagtagagaaataaattactaattaagtaactcaacaacctgagtttaatatcaataaactcaggttgttatgtcgattaaatacatcttttctaattattgaaatcattactctccgtattttcttgtcatctattttctgctgacggatccttgcacatatttaaaaatactaactaaactttgtttggattcttttgcattcatgcaggtatcgttgaggaatcatataatgtttaaaaaattatcggcagagttattaggaactttttggttagtgttcggagggtgtggaagtgctgttttagctgcggcattcccaatacttgggattggttttgtgggagtatcactggcttttggtttaacagttgtgactatggcatatgctgtcggtcatatctcaggagggcattttaatccggcagtaacattaggtctatttgttggtggacgtattccagccaaagatgtcattccttatattattgttcaggtgattggcggaattgcggccgcagcggtattgtatttaatagccagtggtcagagtgattttgatgcgacggaaagcggttttgcttccaatggatatggggaacattctcctggaggattttcattacaatctgccattatcattgagttggtattaagcgcattttttctgattgtgatttttggagtaacagataaaaatgcatcaattaagtttgcgccattagcgattggtttagcgttaactctaattcacctaattagtatacctgtcacaaatacatcagttaaccctgcaagaagtaccggagtggctattttccaaggaacctgggcgatagatcagttatggttattctggctgactcccttgattggtggaattattggcggtttgatatatagatggttattgcaaaaaaatgagtaaatgataaatgttgttcttttattaaatgccatgcgatagcgtggcatttttctatgtagtgtaaagattattaatttgctcttatagagtaaacgtttaagaatattatgatattatatataacgatattaatatggaaatttaatcagatattaaagttggttttaattttctatctgtgataaagaatttatctatatgaagaatatctcaagatgttaagaaataaatttttctaccatatatgtgatttattccctgaatttgttgcaaaaccaatttacaaagaaagattaaataaaagacttaatctggtaactcctgttacatttaatataagggtttgtttcatgaataaagatgttcctaagatatctgtaataatgtctgttttcaatggttgtgaatttttgtctgaagccgtagagtcaattctcagccagtcgttttatgattatgaatttatcatagttaatgatgcctcaacggataatacagatcaggtactctttgagtttcaaaagagagatagcagaataaaaattatcacgaatgcctataatatagggcttgctaaatctttgaatatggcgatatctttatccagaggggagtatatagccagaatggatgctgatgattattcatttccagatagactcaaaaagcaatatgattttatggttgagcatactgatattattgtttgtggtacatctatgagcattcatgaagaactgggtaataataaaattccacctttaagtcatgaagaaataatatcctgcattgcatttgactgtcctttctatcatcctactgtaatgataagaaaagagacttttctgaaattaggggcttcttatcctgaaaattataaaaaagcacaagattatggattatgggtaagtttatttttattaacaattggtgaaggctataggtttattaatcttcccgatattttattaaaatacagagtgcatcctgaaaaggtaagggacgattattataatgagaagttactttattcagctgaatctcaattcaaattaatgccttatttaggtattgaagtggactttaatagtttggcaaaaataaacttgaggaataagctatcaggttatgaaattattaaactaaataaaatattgaaaaaaatagcagtgggagtaatgttattgttggctccaaaagatagagggtatgtccatgatgtattaatagccaagcaatataaattgtattctagagctaagataagtaatttatttggagttttattaaaaatatattccagatttttttatttttccaatagaaaaaagataaggttatttttataacaaatcctgtattttataactatataaaacggactggtagcttatcaaatgatattaatcctgacaaagtcaatattatggctgatgcgattatacatatgaataatttttttgatgaaaaatataaaagcattattactactcatgctgtagagcacttttaaaaaataaaagattattatcaagtgaaagaaaaaatcatctaaaaggcatgataaaatcagtgaataaggtttcatattttttggatcccagtgtaagattcagtttcaagcgaaaaatattaaagctggaatt

SEQ ID NO: 169 - DNA, 3734 bp, Xenorhabdus sp.
  CDS (3048)..(3476)
gttaacggtcagccagttacatgagggcgtggtattggcagccattgatgaaagcaatttgttcaccattgccgaacaggtcagaacacagtggcctaacgcagaaatcatccttgccgctgataacgattggcacgaaccggaagagcgggacaaaaacggtaggttaaaaaagaatgtcggcaagatagcggcagaaaaggccgctatagcgattaacggctgggtcacactaccgcctacggcattaaaagccgattgggacgattatcgccagcagcacggtattgaggcagcaaagcaggcattcagtgaagggttgtatcaggtgggggaaaagaaagtggaaacagctaacgttatttcaattaatccggaaaagcagaagaaaaaacgcacgggtaacaaccttgcacaactggcggataatgaaaaggctttattgctaacagaacggtatgaagggattgctattcactcagaaagcgaggggttctatacatatcaatcgggagtctggaagaaaacatcatttctggatttaagccgggaaatgggaaaagtgtataccttgcatggcactaactttagtaaacgtgcgcttaataacgtggttgaagcattaaagattgttgcacctgtcttgggtgagccatgtcagagcatgatcccctttgcgaatggtgtctttgatattgaaacgaaagtcttttcacctcatcggcctgagaattggttattaaatcacaatggcattgagtataccccagcaaaaccggatgaaaatttgcgggatgatgcgcctaatttccataaatggataagccacgccgctgaccgagatccatataagatgaagcggatatttgctgcattatatatggtgctggcgaaccgttatgactggcagctatttttagaaattacgggtgaaggaggcagcggtaaaagcgtctttactcagatagcaacgttattagcaggtcagcacaatacagccagtggcaatatggcagcgttggacacagctcgaggacgggcacaatttgtaggtaaaagcatgatcaccttacctgaccagcctaaatacaccggagaaggcacggggataaaagcgattacgggtggtgatgcggtcgaaattgatccaaaacatgaacagcagtattcggagattattcgtgctgtggttattgcgactaacaataccccgatgatatttactgaacgcgcgggtggcgtcgctcgtcggcgtgtcatttaccagtttaacaataaagtgaaagaagaagataaagacccacatttgtcagaaaaaatagcccatgaaattccggtgattgtcagacggctactggcgacatttgacgaccccgaacaagcgaaagtgctattgctggaacagcgtgatagtgatgaagctctggaggttaaacgggcatctaaccctgttttagatttgtgtgcggcactggcttttatgggagagccacgagggttagaaatgggcggtggacgtaaaacagaagaagagcgtcagccaaagagatacctttatcacctttatctttcctttatggaatatcagggactggggcgtcctctgagtgtaaccgagttcgggaaagcggttaaagaagctgcaaaagagtacaaagccgaatatctgacgcgaaccatcaagggcagacgacaaactaatgtgcaattgaccgataaagcggacgagtttatctaaaaatagcttttggttatctaccttgtctacctaattgaaatttatttaaattaatcatatggttaattgggtagataactatttaaagattatctacctattatctaccttatctacccaaaggaaagaaaaaagcaggtagatgaggtaaggatcggtagacaacgggtagacaatcaaaagtcagtcatctacccactcaaggccttgtgccacatgagatagagtgaattggtagataaggtagataacctcgagacattttttataaacgttaaaacaccaatgaaaaattaatgttcctatacacaaatatgcaagacctgcatttaggcacagggcactcggatactattggcaatcggataaaacctgtaccatgcaggaaataagggatatcagggagttaaaagagataattccccccccatataacgtaatttattgattttattattcccaacgtaaaaccacaattaattggttaaaaagcaacctttgttaattttgatacgaactttattagatgaaaatatacccaattatgaaaatttgatatacgcacaaagcgaacatctttttataacacccctatcatttattgttatttaacaattagcgcgttctattacgatgctttcagtattcattttttagtatgggttatttaattaaacacattattaactaatgataagagggtaatttcatgagcctaatagatggtatttatatcagtgaagatcataaacatactctgacaataattgacagcacaactagtcctgctggagcatttagtggttcttttatcagtaatagcctctcaacaggaagagtgaactatactcagataattggacaatttaagtatccttcggataatccagccaagatatggccaagtcaaataagtttttactcttatttcatctctagccccagaacttacgttatagcagaccattggaatggcatcaggatggctgatggaaatatcattatgagtggcttgcgaacatacacaacagatgcaggcttatatgatatgcattatttcgaaaaaattttcttcatactcgcaccaacagaaacataatgtagtaaatatcaatccaccgaattaaatcagatcacactctccattattgataaagcaatttatttatgttcatcggcgaagaaatctcctatcgccttcatgttatttagcaatgtgtattgttgattagttgagggaattaatatgcaagataaaaagcctgaagtattaacacaacaattttgtgaggactttggctatacaatgttacctgttggcgttcctattccgtggccgtcagaaacgccaccagatggttggctcaaatgtaacggtgaaacatttgatacagtaaaatacccgaaacttgctcttgcctatccgtcgggcagattacctgatttaagaggggaatttattcgtggttgggacgatgaacgcggagtggatacgcctcgacaggttttgtcatggcaacaaggttcctatctagtacaagaaattaacgatagagttgataacgttgttaacttttcacttgatgaccgtaaagatttaaattgggacataccaaatgaagaaattcatttgcgtggcaggtcggtaggagcaaacggaacttggcccgtagacaaaagatatgtaggcgtaactcgcccccgcaacgttgcattcaattacatagtcagagcagcttaattctgagctaatataatcacttctggttttgttagttaattttcagtacctagacatggacgtctaatcaatccctttcgtgaataccacatacccgccccgcccacaaaacacatcaaaaatacaaagatttgtaaatattcagtcctcaagtttcctcctgcttaggcttcctagtgagaggtctttttattctatttttcatgtatatattaataaatggcactcaggcgtgagccgccataaagccgttta

SEQ ID NO: 170 - DNA, 3734 bp, Xenorhabdus sp.; identical to SEQ ID NO: 169
  CDS (2)..(1738)

SEQ ID NO: 171 - DNA, 3802 bp, Xenorhabdus sp.
  CDS (2113)..(2559)
tgtgccctcaagtttcttatagccactgctttcagctcctccattacatgcatggcttgctgccaactcaatactattgtagtaagggacttctacctcgttgttatctagcggtgaagtgctatcccatgccgttacttcttgtgatgctatttgctctactcgtatgccatctttcttagaaggatcgccaaatagcagccaattaacatcaactccaagtatttctgcaagctccattagcttagcttttcttggttcggtatgtgattcccattgctgaacagattgaggtgtcacaccgatcttttcagcaagatcagcttgagtcattttctttgcaagtcttgcttgctttatacgttcacgcatagttttcatacttccaaatatacaagctttactttcttttcgctagcaagttttgctttacaaagacaagtatagcttgtattttggggttgtgaattattaggaggatatatgagcattttaaatcttgccattgaaaaggctggaggaatttcaaggctagcaaagctattgggtatatctagtcaagccgttagtcagtgggttcaaaaaaaacatataccaccgggcagatactttgaattgcatgaaaaattaaacatcccactagaagagctggtgaagcacaaaaatcacatatcagaacaatcttccgagagaaaacatgtttcctgattacaccaaagtgaccatacccgaaatttatcatccgggtgatgcggaatggattcaaaagatgctttccgctatgaaatcaaccatgagggagtatgcgagggataagtactcatatgtctacaaacttcggcgggatgaagatcctgtgccattccgacgggataacacaggagccagagcagccaacacatggctcaggttgtttctcaagaaaaattacagatcgatgcaaggttataccgaagcgccaatgttagccccgcaagcacagccaaggacacagcctcattcggaggttgttttagggcaggagcaagacagtaacaccgaaaaggctgtgtcttctggctgaggtagcaatggttaagggattactgaggctgagtatgaagaagcagccaagtgagaatgaatatcaaaagtggggaaaagtaaaaaaatccggcagtgaaggaaaagtacttaataagaacccccttatttttttggactaaatgataatgattatcaacaaagaaaaagcagaaaagatcatccaaaaacatcgtgctttcgtgaactggaaaccagcacgcgctgtggctgagttggtagcagcaggaatcccaaaagtcgaagcagtagcaatggtcaaggcaaacgcaccagagcgaaaatctcataaaccacacaacagccacgcaaagccggtgaatctggaagcattgagtactcattacatcgttgtcggtgattacgagttactgagcctcaagcatcaagatgctttgattgcagctattcgaaacgggaaggggaaaagttcatggaatgatgaatcaatggcgatcacgttattcgggttagtcagggcgtaccccattatcaccactgctgaggtcaataagttcctcaatcgtggtgcattcattgacagcattccgttgtttattgatggagaggtgattgaaggggaagtcatgccatctgcgaataacgagagtgtaaaagatattttccgggcggttaagcaactgaaaaaaatcactgacagcctgatggggtccggtgcactacatcttcagaaatacctcgaccgcgtaccgaccgatgaagatgttaaacgcgctgtcggtatcgtagccccagcaataataaacccgcatttccatgaaatcgattatgagcgtcagtacaacgaaatgcctgtggatgctcacgctgaagacagtaagcggattatcaatgagtggaaaagagaattgagaatcaaaggaagcaagaaaccgaacagcgaaactttggcgagcacagccgatccggttcttgcggagagaaatcatgaataaacaaatttccgttaatcattatggcattaattttttattagaggaatggcaacccgtaccaattacaggttatttcgatttttatcgggtaagtaaccttgggcgcatccatagtctgcacagtaatcgggtattaaaaggcaagatccactatagcgggtatcactcagtgaaactttctctgaatggagtaataactgatttttccgttcatcgcttggttgctatggcttttgtgcctaaccccatgaatctgccgggcgtaagacacttggacggagatatcctgaataatcaagcatccaatttaacttggtcttccgcatcaaatggcattcttaatagcgcgatattagctatcagcactgcaactggcagtcatttagtttttgttggtaaaaacgatctgcttgctgctggctttgattcttcagcggtctacgcctgtttgaacgggagagctaaaacccacaaaggttaccgttttgagcgtatcgcgctggagggtaaatcatgctgaacattacccctaactttgctcaggagcgcggtttgagtctgttgcgccagaactggaagcgacaccgtacgttcatggtctacagtccgacaggctcaggtaaaaccggactggcggcatttatcacagacggctatgtcactcgtgaaatgcgcgtcatgttctgcgtaccgtataccatcctcgtagagcagacagctacacgctttatcgaatacgggctacccggagatgaaatcagttacgtctggcgtgaccatccgaactacgacccgacccggcttattcagattgcgtcagccgatacgattatccgccgtgagttcccggacaatatcgatctgctgattatcgacgaggcccacctgcgccgtaagcggatgctggagattatccgtgacagtgacattccggttattgggttatcaggcacaccatttgccccgttcctcggtcactattacgagaagctgattaagccaaccaccatgaaagagctgattcagcgtggtgatttaagccggtatgaattctatgcgccaatgaaaccggatttgagtggggtgaaatccaatagcagcgcggaattcggcagtgattataaagaggctgagattgctgaaatcatgtgtggtgctgatctggtgggcgatatcgtcagtaactggttagccaatggtaataatcagccaacgatctgtttttgcgtcacggtcagtcatgccaactttgttacggtcgaattcactcgtgccggggtgaatgctgagattattaccgcccagaccccccacgaagaacggcagattattattcaccgcttcgagcagggcgcaacgaaagtcattgtgaatgttggcaccttaattgccgggtttgatagtgatgtgcgctgcatcatttatgcaagacccaccaaatcagagatccgttggactcaatgtctcggcagaggcttgcgtaccgcgccgggtaaagaagcctgccttatcttcgatcactccggttctgtccaccgtctcggctatcccgacgatatcgaatatgacgagctgcccagcaaaaacgatggcatgaagaccagttccagccaccgggagcaggaaaagcgggagaagctgccgaaagaatgcccttcctgtcactacatgaagcctgccggggtttatgtctgtccgaaatgtgattttaagccgctgaccggggaagacattgacgtagacaccagtcgttctatccaaaa

SEQ ID NO: 172 - DNA, 3802 bp, Xenorhabdus sp.
  CDS (3422)..(3802)
ttttggatagaacgactggtgtctacgtcaatgtcttccccggtcagcggcttaaaatcacatttcggacagacataaaccccggcaggcttcatgtagtgacaggaagggcattctttcggcagcttctcccgcttttcctgctcccggtggctggaactggtcttcatgccatcgtttttgctgggcagctcgtcatattcgatatcgtcgggatagccgagacggtggacagaaccggagtgatcgaagataaggcaggcttctttacccggcgcggtacgcaagcctctgccgagacattgagtccaacggatctctgatttggtgggtcttgcataaatgatgcagcgcacatcactatcaaacccggcaattaaggtgccaacattcacaatgactttcgttgcgccctgctcgaagcggtgaataataatctgccgttcttcgtggggggtctgggcggtaataatctcagcattcaccccggcacgagtgaattcgaccgtaacaaagttggcatgactgaccgtgacgcaaaaacagatcgttggctgattattaccattggctaaccagttactgacgatatcgcccaccagatcagcaccacacatgatttcagcaatctcagcctctttataatcactgccgaattccgcgctgctattggatttcaccccactcaaatccggtttcattggcgcatagaattcataccggcttaaatcaccacgctgaatcagctctttcatggtggttggcttaatcagcttctcgtaatagtgaccgaggaacggggcaaatggtgtgcctgataacccaataaccggaatgtcactgtcacggataatctccagcatccgcttacggcgcaggtgggcctcgtcgataatcagcagatcgatattgtccgggaactcacggcggataatcgtatcggctgacgcaatctgaataagccgggtcgggtcgtagttcggatggtcacgccagacgtaactgatttcatctccgggtagcccgtattcgataaagcgtgtagctgtctgctctacgaggatggtatacggtacgcagaacatgacgcgcatttcacgagtgacatagccgtctgtgataaatgccgccagtccggttttacctgagcctgtcggactgtagaccatgaacgtacggtgtcgcttccagttctggcgcaacagactcaaaccgcgctcctgagcaaagttaggggtaatgttcagcatgatttaccctccagcgcgatacgctcaaaacggtaacctttgtgggttttagctctcccgttcaaacaggcgtagaccgctgaagaatcaaagccagcagcaagcagatcgtttttaccaacaaaaactaaatgactgccagttgcagtgctgatagctaatatcgcgctattaagaatgccatttgatgcggaagaccaagttaaattggatgcttgattattcaggatatctccgtccaagtgtcttacgcccggcagattcatggggttaggcacaaaagccatagcaaccaagcgatgaacggaaaaatcagttattactccattcagagaaagtttcactgagtgatacccgctatagtggatcttgccttttaatacccgattactgtgcagactatggatgcgcccaaggttacttacccgataaaaatcgaaataacctgtaattggtacgggttgccattcctctaataaaaaattaatgccataatgattaacggaaatttgtttattcatgatttctctccgcaagaaccggatcggctgtgctcgccaaagtttcgctgttcggtttcttgcttcctttgattctcaattctcttttccactcattgataatccgcttactgtcttcagcgtgagcatccacaggcatttcgttgtactgacgctcataatcgatttcatggaaatgcgggtttattattgctggggctacgataccgacagcgcgtttaacatcttcatcggtcggtacgcggtcgaggtatttctgaagatgtagtgcaccggaccccatcaggctgtcagtgatttttttcagttgcttaaccgcccggaaaatatcttttacactctcgttattcgcagatggcatgacttccccttcaatcacctctccatcaataaacaacggaatgctgtcaatgaatgcaccacgattgaggaacttattgacctcagcagtggtgataatggggtacgccctgactaacccgaataacgtgatcgccattgattcatcattccatgaacttttccccttcccgtttcgaatagctgcaatcaaagcatcttgatgcttgaggctcagtaactcgtaatcaccgacaacgatgtaatgagtactcaatgcttccagattcaccggctttgcgtggctgttgtgtggtttatgagattttcgctctggtgcgtttgccttgaccattgctactgcttcgacttttgggattcctgctgctaccaactcagccacagcgcgtgctggtttccagttcacgaaagcacgatgtttttggatgatcttttctgctttttctttgttgataatcattatcatttagtccaaaaaaataagggggttcttattaagtacttttccttcactgccggatttttttacttttccccacttttgatattcattctcacttggctgcttcttcatactcagcctcagtaatcccttaaccattgctacctcagccagaagacacagccttttcggtgttactgtcttgctcctgccctaaaacaacctccgaatgaggctgtgtccttggctgtgcttgcggggctaacattggcgcttcggtataaccttgcatcgatctgtaatttttcttgagaaacaacctgagccatgtgttggctgctctggctcctgtgttatcccgtcggaatggcacaggatcttcatcccgccgaagtttgtagacatatgagtacttatccctcgcatactccctcatggttgatttcatagcggaaagcatcttttgaatccattccgcatcacccggatgataaatttcgggtatggtcactttggtgtaatcaggaaacatgttttctctcggaagattgttctgatatgtgatttttgtgcttcaccagctcttctagtgggatgtttaatttttcatgcaattcaaagtatctgcccggtggtatatgttttttttgaacccactgactaacggcttgactagatatacccaatagctttgctagccttgaaattcctccagccttttcaatggcaagatttaaaatgctcatatatcctcctaataattcacaaccccaaaatacaagctatacttgtctttgtaaagcaaaacttgctagcgaaaagaaagtaaagcttgtatatttggaagtatgaaaactatgcgtgaacgtataaagcaagcaagacttgcaaagaaaatgactcaagctgatcttgctgaaaagatcggtgtgacacctcaatctgttcagcaatgggaatcacataccgaaccaagaaaagctaagctaatggagcttgcagaaatacttggagttgatgttaattggctgctatttggcgatccttctaagaaagatggcatacgagtagagcaaatagcatcacaagaagtaacggcatgggatagcacttcaccgctagataacaacgaggtagaagtcccttactacaatagtattgagttggcagcaagccatgcatgtaatggaggagctgaaagcagtggctataagaaacttgagggcaca

SEQ ID NO: 173 - DNA, 3659 bp, Xenorhabdus sp.; identical to SEQ ID NO: 45
  CDS (1736)..(3160)

SEQ ID NO: 174 - DNA, 5166 bp, Xenorhabdus sp.
  CDS (2)..(718)
gcactataacgaagacgggctcagcaaaggtaatgctccgggcgggacaggtgtgaatttctccgggcattcctattatacctttgctccggaaaaggcctggaattatgagttgtttgcccgtggtaaagccatcaataaccgattactggtaacgagtaatattttttatacagattataaggggttccagagtgctgtagatgattacagggaagacaaatctaacggttcgattcttgttaacgccgataaagcggtaagctatggggttgaactcagcgcagattatcgggtactggacaatttaagcttaaacagcgggcttggattacttcatactgaaatcaaaaaattcgctgattatcggggaaactcgtttgaaggaaaacatttctctaaagcacccggttatatgtttaatatcggtgctgactggaatatcaccgaacaatttcgtctgagtggatctcttcgttacgtggatcattatttctctgatgaccaaaacgatcctgaattacgagtcagctcttattcagtctccaatcttcgtttctcatataatccgaccaataatctggaactcttcgcctacggaaataacatttttgacagacgtgcgccgacaaataaataccatgatcgtaaggccgggctttctggcaatatgttagagccgcgtgaagtaggtattggtgcgaaaatgagtttctaaaaaatcagcattgagtgcgccgatcttcgtttgaataaggttggcgcctcccgtagtggaaaatgacttgattatcttgacctgatgatttcgatcgtcaggtttttcgttattagcggtttaatcagcttggctaaaagtgaaagataataaacgatgggtgaggggcaggggggaattaatcggcagatccccctgcctttattgcaaatcacgtctgggaataattatctgaattcatgacttggcaattttgattaatcattgattggcattagtttgcaactataggttcgattaatagcagcttggttaatacggtggaagaaggtttactttcttcccctttcggtactacaaaaaactcaccttgatttatgattacatgctcatctttaaaatctatatgtagctgaccctcaatcaccataaacaccttgtcttctttttcatgtgtatgccatataaaatcaccatctgcgagtaatataattatcttatattcgtttgtttcagttattaccttcggtgaccatacttctttgattaaatcaaattcttgttttaaatttgttacttttctcaatgcagcaatagggttcatattatatacctttcctttagttagtctttggtttgagtttttaatgcttaccaattatatggaattatcgttttccggttttttatcttatagacaggaaaatattttatctctatttctaacctatttggttattacatcattacagatttatacgcaatgtatagacatatggggtatcaggcgccaagcgtagcacctccatcaatgacaatatcctgtaacgtgatgtgacttgcttgctcagaagctaagaacagaatgacattggctatttcatcgggttgtgcgattttcccgagtggaatgcctagtttaaattgttcggtaatgccgtgaatcaaacgctgatgcgctatgtcaccattgagcatcccttccagcattggggttagcgtggaacccggcgaaacaatgttacatcgtaccccaaacggtgccagttcaagccccacactcaggcacaagctgcgcattgcggctttagacgcacagtaaactgccatattaacgcgcggtacatgggcggcgttagagactatcgaaacgatattaccattgcgctgacgctggaaatgtggaatgagtattttaaacagattaaatgctgcaccagcattaacgttaattgaactttcccagtcttcacggcttaatgtttctgctgagccaagacgcaaaattcccgcaccattaaccagtacatccagcccgttttccttcagcagtggagggcagattttttgcactgcacaatcgttactgacatccagaatgagcgtctcaaacggcattgaatcagggaacttgagatcgaatccaaaaaccttagctcctgcttcgtgaaagccgagagctgtgcggtaaccgataccgctcccggcacccgtcacccagacggtttttcccttgaagctgttcatctcgcctccaactcgccattcagtaatacaagccagtttcgcaatgttggttgcttcattaaagcggtaaaatcaagctcgtatccttccaaccggcgcttggagacgaaagacatcatgcgtagtgaatctaaaccataatcaagcaagttttcgtcatcatcaatgtcgcatacatcttcatccagtgtggattgcagtatggtcagtaaacgatcccgatcccatctattttctgttgcgggagaatcgagtgccgatagtgccatatcggtactcaacacttgtccggaacggccagcagtgtagcgtagggccatcatgtgctcttcccggctgaagtctgccagtgcatcgcttatcataaacgcctgtatatcgcgcataaaggcgtcagtagccgtggttaggcagccgatatgggcatacacgccacagattataagctggtcgcgctgacgttctttcaggtgcgtctccaaatcagagcgctgaaacgcgctgtagcgccacttcaccagcacagtatcctgttgttcgggggccagtgctgccgcgattttttgctgttccggatagcgattcagccccggtccccacatatcattcagtaacgctcgctcaacgtcactctgttggtccggctgagctgtataaaacactgggataccgagttcatggcaacgggcgcgcaggataacaatgttattaataacctgctgaaccattttgctctcttttccccagaagttgaggaaatattcctgcatatcgtgaatcagcagagcggcacgctgcggttctaactgccattctactttgtttacaggtaaggtggcctcatcgggcagggtataatcctgaagtttaggaatgctcatggcgtgtttcctcaattatctaagacggcgttggcaagtgcacgtagcgcctgtttattaatttttcctaccggagtaagcggtaatttaggcaggctttcgaaacgatcggggattttgtagtcggcgataccctgttctcgcaaccagcgacggaacaccactggttttaccgattcatgctcgcgcgtcactacatatgcgcaagttttttcacccatcagagggtcaagaatagcaaccaatgcggcgtataccactgctggatggcgcagcagaaggtgttcaacctcttcagcggcaattttttcgccaccacgatttatctgatccttctcgcgcccaacgactttcagatatccgcctggaagctgaataactacgtcaccagagcaataaaatccgtggctgtcgaacaccgtttggttatgttccgggcttcggtaatatccacgaaaagtgtatgggcctctggtcatcaacaatcccggttctccgagcggtaccggaagaccttcctgacttgcgacccatatctcatcatcctcgctgatggggcgaccctgagtggtgaaagtatgtgtatcgtcatcatctagtcgggtgtagttcaccagaccttccgccataccaaatacctgttggagctggcaacccagctctgctggaatgcgtctggccagtgtttctcccagaggagcaccgccgaccagcatgacctccagactggcgagttcgtcggcgtggcctctgagagtggtatattccagccagatgctgaccgctggtggtactagggcgacaagattgatctgatgacgttctatagctgggaaacatccatccggacttggatcggggacgagaataacctgaccgcccgcatagaaaaacgcccaaagctcccggtgaactcatagggtagttatgtgcagcaggcagtgcacagagatatcgggttttactgcttacgttgcagattgggttgctggcgcggatactgtaataatagtcattgtgggtgcgtgggatcagcttgggtgtgccagtactgccgccggaaagctggaaaaatgcgacctcatctgccggagttggcgttggagtgaagtcgcccggctcttccgatatcagacgtgaaagcgagtggtctgaatctgtatggtgaagcacgactatattcagttctgggcatttatcgattagacgatcaataagaacatcatcatgaaactggcgatgttggcgatcggcaatgagtatttggggcttaatttggagtgcatacgcggttaactcgctgctttgatgactataaagcgcgttaacaggtacaacacccagacgtaataaggcaaaaaagacgatataaaattccgcctcgttgccgagctgaaccagcgcagtttgtccctgacgcacgccgcgtcggtgcagagaagcggctaatcggtttactgactcattaagctcgcggtagttccagctccgctcaccacaaaacagtgccttggcatcgttctcacagtgaatatcaagaatatcgctcaatggacggtcaatccaataccccttcaagcgatagcgttcagccagatcctggggccaacggttgaattcaatcataatgtctgctcctgttgcgtcgcaaagccaagtgcgctcagcatggtgttaaatttggtacgggtttccatccattcattttccggaacagagtctggaacgatgccggcaccggcgaatagctcaatctgatgagatcgaactttaccgcagcggatcgccactacccattccccatctccgtgggcatcgcaccagccgacgataccgccaaaccagccgcgatcgaatggttccagctcgccgatcagattgcgggatgaggtataaggagcgccgcataatgcaggcgtggggtgaagtaagcaggcaagtgatagagcagtctcgcgatcactggtcagtatcccctgaatctcagtcgcgagatgccagaatgtaagtgtgctgagtaatgaaggttcaggaatagtc

SEQ ID NO: 175 - DNA, 3318 bp, Xenorhabdus sp.
  CDS (1238)..(2569)
ggcatccacggcacttagcctcaaaagggagatagtgaggatcggcaatcacattcatgctttcacctttcagtcccacattaacctgatggctgattaagcacgagcggctgtcaatttctacacttaaattgccgactttcactaaatgaaaaccaaaaattttcggccaccacggttccaattgatgttccaaagcgacacggtaatactcaccccatggtaattcagcccaggaagcaggcagggttatttgtttgattgcacgtgctgattgcatgtcatcttccttccaacctactatactctccgtctttcaagttgcctctttgttggtggcgttcacttgcctccacgatgcatcttgaaacccattaagaataaaatcgattgctaaacgaggcatatcatgaagcttatcaggctcccagccctttcagataactacatttggttactttgtgacgagaacaggcattgtgtcattatcgatcccgctgaatcacagcctgttatggatactttagcagctaaccaacttattcccattgctatcctgttaacacaccatcaccacgatcacgttggcggtgttgctgggctacttaagcaatatccaacattacctgtatatggcccggaagagactcaaagtaaaggggcaactcacgttgttcatgaaaatgatcttattgtgacaggtaatttttcttttcaggttcttgccctaccgggtcatacccttggacatattgctttctatcaggccccttatctattttgtggggataccttgttttcggcgggttgtggcaggctcttcgaaggtaccgctgaacagatgttttcttcccttgagaaaattgcctcgctgcctgatgaaacgttgatctgttgcgcccatgaatatactgccgcgaatatgaaatttgcgctggctgtattacctgaaaatcaggctattaacgattatcataagaaaattatcgagttacgtgaaaaagatcaggcaaccgtccctaccacattgaaaatagagaaaaaaattaacgtttttctaaattgtcacgatattgatttacaaaaaaatatcggtattaaacctaattcaataccactttcttctgtttttcagcaattaagggcttataaagatcgattttgactttttcgggttgtcttctgcttaataggtcagtatgattgctcaccttttaggcaaacatcaaagcagaatatgaagacaaaagcgatcctattcgcatctgtcttgcttgccgggtgtcagtcggggctacaaccaaagtccccttcccagcagcatacacagaagatgtcttcgacgaatcagaaaacaaacggtattgcagtaccagaggaaactgcaaactggaaggagagtccgacagctcaacaagatttgtggggacatatccgtgatgagttgaagatggaaattcctgataataacagggtgcgtgaacagcagaattattacctgaaacacaagagttatctccaaaatgtggcgttacgctcggaaccatatatgtattggatcgttgagcagattgatcagcgaaatatacctatggaagtggccttgcttcccatagtggagagtgcttttaatcctcatgcgacatcttacgccaacgcggttggcttatggcagattattcccagtacaggccggcattatggtctgacgcaggataaatggtacgatgcacgtcgtgatgttgcggcatccacaaccgcagccctgaatatgcttgagcgtttgaatgtccgttttaacggggattggttactgactatagcggcttataacagtggtgaaggccgcgttgcacgggcaatcagagaaaatcagtctaaggggaaaccaacagatttttggtcattggagttgccacgtgaaacgatgcattacgttcctaagatactggcactcagtaatgtcattcgtcaaaacgaaaaatatggctttacattaccgaaacccaatattcagcaggcacttgccaaagttgaggtagggcagcaaatcacgctatcacaggctgctgagttgtccgggctttccctgacctccatgaaagcttataaccccggctataaacagggcatgacctctcctcatgggccgcattacattatgttgccaaaggagaatgctggtcagcttaaacactcactggcagataagagtgtgttgaaagagattagtctggccgttgcgaaaaatcttcgtcagttacatcaacaaagtcattacaccgttcgttcaggtgataccttatctgctattgcaaagcgatttaagacatctcactatcaactacagaaattgaacggtctgaagactgctgacaggctcaaaatcgggcaggttctgaaggtgaatatcagtgaaccgattaaatatcaggttcgcaaaggggattcttttaccagcattgctaaacggcatggtgtaaatcttaatgatctgatgaactggaataagggcatcaagctcaaagatatgaaaccgggtctggcgctaacgctgtatctgaactgatttcaattccaacctatacatccgatatacccaatggatttcgagttgcatcgcggcggcaagggagtaaacccccaggagcatagataaccgtatatttataaaaacggtgactggggtgagcgagcgcagccaacaaagaggcagcttgaaagacgaagggtataggtatagatatcgctccctgatcgaaagactgggagcgattcttttttgagatatattcagctatacacaatggatttcaagatgcatcgcggcggcaagggaacgcatccccgggagcatagataaccgtatgtttataaaaacggtgaccggggtgagtgagcgtagccaacaaagaggcaacttgaaagacgaagtgtatcagggcgagatctcacatttttcataaggttatttaggtcaaataaaagtcaatatacggacttttataagcatttctctccttaaaacgttaagatcacgctattccataaacagtgtgcttaataatgaatatttttaattttatcagaaaaatagatgacccacgttctgacatcaataaaaaacatgaattgatggatgtcatttttttggccttttctgctgtgttatgtggcgcttctggctggaaatcgattcaagaatttggtgagttacaaatagagtggcttaaacaatatacctcatttactcacggcattcctcgtcgtcactgtgtggctaatattatcaaaatgatagatcaactttagagcaca

SEQ ID NO: 176 - DNA, 5005 bp, Xenorhabdus sp.
  CDS (2814)..(3392)
ccctaaaaagggatcccctcatcagcaggtttctgtaatagtggtaatatggcataaaacgtattatcagaaattagcaagtcagaatcttcaaccaattgttgcaattgagggtacagtacgggaattggcgcagcaaaaaactgcttaagggcaaacgatgtctgagcatttcccggaggatgcaaggcacgctcaggaaatgtctgctccagattgcgataatcagcatctacaatcgaatcaaaagcaacaaaacgggctcctaaggcctcagactgctggcgaaaaagcgctccactgaatattgtgatatcatgcccttgcccgattaagtgtcttgcaatagtacagattgggaaaacatgcccaggagttgcaatagccgctaaaacaatacgtgccattaattaaatcccctcaattaatttgtctaacgatctaaatatggaatatcaaccatcttaaaacttttgttattacatatgggtgttccgtgaatatgaactctctggagatgacgggaagagcgggtaacaaatgactctctaccgtgtagtagagtaaaattatcgctaatcaaaacatcatttgtttgccactgatgaatatagagataacatggtgcataaagccgatctttcaactcattctcaaaagcactctgttgtgctgatgaaaaaccctcaaacttaactgagtgatgatcagaatatttttcactatcaacagccataggttcgttgtaacgcattacccatttacgaccattaggatgaaggcatatcagtggagacactacctcaccaccatagtgcgtcacgagacttgtgcgataagtgaccatgattttttcccagatatgacgctcatgttcattagcatcaataattaactgctcagtatttacaaatgttgtacgccctccctgagtgacagctggagcagaaacacaatggaatatctgaaattccggaatagtttgcctgtacataccatcccagtgcagtggtatttcagttctatctaatacatgatcagaaggctcagcttgctccattacatccaataccgcgccaaaaggccacatcatgatttctccccaattctgggaatattcagttaattttttggggtcggtaaaaccagaagaaaagcctcgcaatacaaccaacaaatgattacgaactaactcacgtagcatattaactggtaatgaggtaatttcctgtccttccctaccaggagtaattaacactccaaaaggtgtaataggttcagtatgacaagcaagttcatttatatgcataatgttttttctcaagataaaatataattttgaatttctttcagaacaattaactcactgcgccaatgatgcaacagtcaaaaatgtttggttttgacttgcttcctcaacctcatcgatcacgtaatgactgggaataccacggatttctactagttttcctttcatttttttcacctcatcacttttcatcaatataaactgaccgttgatattggcagcaacgccatgccacggagttagccaatcatcccgagtaggcatcatatggataccaattttaatactgtttataggctgaggatgaatggaaagacgaatagcatcggggaatagtccagccaataaatgtccccaagcccagctccgttgaattaccccaatagcccgctgacgtgcatctttctgtaaagcatttttagacccaacatattccggtaataagctgtcttcgtaaagaaaacgagtaattgccctatataattgaattccttcttcacttccttttaatatagatttcactttttcactagaaaatgcataactattaaccaaaagattacgtaatttattataatcattggtatattgagagaacaattcaacattactcagagtaaaaactgagagattagttgctcccaactcatgtaataacttttcaatctctaattgataatgagtaactgtttcatcattaactcgaattaaatcactaaatacatgcccgtcagaacaaatagcaatatttgctcccggtgggtaataaagctgaatccgttgacataaagagtttaaaaaaatcaatgataatttttctgccatatcaggtaccgtacccagtactttccgaagatttggtgatttcgtcggaaatgccggtagaatacattggattgttttactctgtttgacaaatgcacgaatacgtggtaactgaaccacggcaacgtattgttcttcgtattcaattgtatactcagatgtgggaaagcgacgccgatattgtagtaattcatgcaagattttttccgatattttttctatatcaaagtgttccataatgcattcctaatttattacattctcatcaatacaaataaatcctaattgcggaatatttgtattagatatttactgaaatccttactgatataacaaaaatcaatcgcgttataatcatttaaaataacagagaaattaatcccataaaaacaaatcaaatgatacataaatatcaacatacaatgcatataactaattttattatatgagttacataaaataaacatccccgccgcaagcagcggggtatttaggtatgaaatcacccgctttgcatcgttcaattcttatttattcgtcgcaagcgacggggaattaaaccctgagagattaaaaaaattaatttatatatattgttacatttatgaatggaaattattttaagactataataaatatcatcacaaacaatattttttaagtgagaataaaaatgacagacaacagcctagaaaaaaataatctcatcacgccacttttccacgacaaactcttccaatcacgctctataattatctccggtgaaatcaaccaacaactggttgaaaaagtgataactcagcttcttctactacaggagctcaataataaccctataaaagtttttgttaacagccagggtggacacgtcgaatccggggatactctgcatgatatgttcaaatttattcagccagagattcttatgattggtactggctgggtcgccagtgcaggtattactctcttccttgccgccaaaaaagaacatcgttattgccttcctaatacccgatttatgatccatcagcctttaggtggcgttcagggaagagctaccgatatcgaaattgaaacaaaagaaatattaaaaatgcgtggtcgtataaatcagcttatcagtgaagccaccgggcaccctatagataaagtggcaaaagacactgaccgtaatttctggatgggaccagaggaagcccgtgattacggcatcgtcgggcaaattatcagccactggagtgaattaaaagtgggatagcaacggctgtttagcaatttatcaggccatgatgtgtgacctgtaatggcgttggcgatttataaggatattacagccattgcaggctcaatcaaacacatgagatcttctctggaaactccatcgcgagcctgaaatgaaatggcctgcataacccccaaaaaataagatgctaattttcctgtctctgtttcacccgataattcaccatctgctactgctttcgctatccgtgtatgaattagcttccatgtatattgacgaacctctttcaggtaagcataagcatcctcgttttcttgtaaattattgactattcccagaacgagtaaacatccgcctgactgattcgaagtagctacttccacagaaacctctaacatagcacgcaacccttgctttacactttctgcattgttaagactatccatagctttagcgcctatggttttaatatataaatcaaccgccgcataaaaagcctgttttttactgccaaatgctgcataaaaactaggaggattgatattcattgccgcggttagatcaacaagttgtgttccttcatatcctttagaccaaaaaacctccattgcttgttggagagcaacctcacggtcaaaactcaaaggacgtccacgcgatgccattatatgtaccttcgtcatttctgtagtgagaataacataaatcccttgatcaattttagcaagtaagataattttgtaataaccactacaaaataaacattcgataagcaaggcgataaaatggaaaaatgtaaaggcaatatcgctattccagctgcaataactaaaagtacgatccctctgtctatttatatactggcattcggcgtcttctctatggtcaccagcgaatttcaggtcacaggtatggtgacaatcatggctgatgacttaaacgtttctatttctgaaattggttatctggtctctctatatgctttggcaatgacttttggtggtccgttacttacactgggattattaaaaacgcctcctaaaactgcgttacttagcctttatttgatttttattatcggcgaaatacttggagcattagctgattcttataccgttctagcaattgctcgagtaataaccggagctgtttctggtgccttttttggtatgtctgtatctatttgcgcagaaattgtggcaaagcagcaacgagggtgggcaatttctattgttctctccggtattatgataggaaccatattaggattaccaatggcgaacctgataggcacatatattggctggagaatcagcttttggacaacctctgccctcgctactattgccggaatcattagcttattctggcttccgtttattccaaagcaatcttcaatcagtttacgagctgaatttcatactcttaacaatccagaattatggcgagttttttctaccagtttactgattattggtgctacttttgccgcctttacttacttcacccccatattaaaagacgtgacaggttatcaagaagaaacaattgccagcctgcttatcctctatggtatcgcgacaataataggtaatatcattgttggaaaattagctgactttagagca

SEQ ID NO: 177 - DNA, 2126 bp, Xenorhabdus sp.
  CDS (1787)..(2086)
acatcttggagaggttacgatgctattgaggctgacaacatatggcgataaagacggatttttgtttatgctagataaaataaaacctgtcttgacggtagatgacttgatagaggcttcggcatcaaaagataaagcgaaattaatagataaataacattccccagcgtatttttcttttccaaagccgcccagtgcggtttttttgcgtcctaacaatggagagtagaagtatgagtgaagaaattaaaaattgcagtaagtgtaatgggactagaattcgagtaaaccattacgataaacccggattcaaatgtgagctgacctgtttatcatgcggttactatattgggtcaaaattaagcatgaagaatgcgattaatttatggaataaaagagagggctgatggaatgtaattttctcttccatgcatcgacgaaagaattagcctggcaacaactcaaagaagttctcgcaacaaaccaacctcaccgcatcatcatcaagccttggaaaaacaccagaagtcaatctcagaacgcgaccgctcatatgtggtttggcgagattagccgttacctgaaagcccaaggcgcgaattactcaccggaagccgttaaggacatgctcaagcataccttcttgggctatgaggtcgttgatcgggttgatgccagaacgcaggaaatagagcacgtcaggacactccgccagacatccaagttggacactggcgagatgtttagattcatggagcaagttgaacagtgggcagcgggtatccattgctttgtgacgataccggaaaactcagagtatatgagactcaagtggaggcaggagcagtgagtgaaatcagaaacggacattatctaaaaatagatggcgatcaatatcatcgtatttttgtggttggggacttgcacggatgctatcagcttctaatggataaactacaacagattgattttgattataaaaacgatttgttgatatcggtaggtgacctcattgatagaggggatcgaaatgtcgaatgcctcgacctgataactcaaaagtggttcagagcggttcggggtaatcatgagcagatggcgatagatgcgctattccataacggtaatagtgacctgtggtttaacaacggcggtcagtggttcttgtctctggatgctgagcaggaaatattggcaaaggatctattggcaaaagcggaacagttacctctggttattgaagtggacacagggcacaaggcaattgtcattgcccatgctgactatccagacaatgagtatgaattcggtaagttggttaattggcaatctgtcatctggagtcgagaccgaatttacgatgcgaccggaagtggtataggcagggaaatcaccggcgctgatctgttcatattcggacacacgcccgcacacgatgatgcccaatattggaatcagcgatatatcgatactggggcagtgtttggttatgggttgactgtagagcaaatcaaatgaaatacctcccattcacactcttttggataacagtcaccctgatgatgggactggctttagggggataaggtggacaaattaccacgtaattacggttggaacagggttaagttagctcagcatagttatgaggatttagagcggctaagtgttgacgttaaggaaaatcacgcctgtcaggatggcatttacctcattgatgcgaaaggccggaagaaactcgatgccatcagctgggcgatatactacaagaataaggcggaaaggaatgaaaaagcaggtacggagaaaatgtaaaatctgtcgtgagtggtttcatccaaaagctgaccatatatggtggtgtagcccagaacatggcgcagaattgggaatgcgacaacaagacagaaaatacgaaagagccaagcagaagttagaacgagaacgacgacaaaaagaagtagccaaccgagataaactcaaagcccgcaagttagccgtaaaaccccgcagttattggattcaacaagcccaacgcgccgtaaatgcctatatcagagaacgagaccgcgactgccgtgaataacatgtggcagaacagtcttatcagtggatcggggcgtagg

SEQ ID NO: 178 - DNA, 2126 bp, Xenorhabdus sp.; identical to SEQ ID NO: 177
  CDS (868)..(1518)

SEQ ID NO: 179 - DNA, 4382 bp, Xenorhabdus sp.
  CDS (504)..(809)
ttagagcactgattgtgcataggtgcgataattctcttcctgcatcgcatcaagtttcttttgcggagtaatgtccgcctttctgtcgccgtctaaatatgtccggtgcagataacacagtatcccttttgaatcggtagccagtgcccatatcgcttgcagtgttccgttacgcacaggctgttcagcacaatacttcacattgtcagcaggcaaaacatgaatgccccggttacgcagataagcctcaccctgtgtgcctctcaggtgggataaattggcatagcaggccgtgactctgtttctgaacccggtgatattggtttcttttttcgcggtactgcgtttgtccgattggatacccagcagcagatcaatctcgtccgctaatgtcttgtactcttttccctgcgtcagggtgagtagcttccagccatccccggcgttgcaggtacaaatgaacgtgcctctgccttcacggtcatcaatacgaaagctgcctttccgatcgcatagcttcggggtatggtgccacaacccagcaaatcacgaacaatttcaacagaaacaaatctcgctttattgaaggcaagcattaccaccgcatcgaaggtaatgaagtcgaaattttgcgcaactcatttagaggtgtgcaaatttcgagtaaagcgcgctccttttatctctggacagaacgcggtgcggctaatcattccaagatgttagaaaccgatcaggcttgggactacttcgatgatctgactgagttctatttcacccgccgtgacagcatcacaaccgaagcggaactgttaagtaatcccgcgaagttacgttccatgttgtctgtatatgccgaaaatgtcgagcgccttgagggcgagaataaaaccctgagtgcaacggttggcagtctggaaaaacactttaccaaaggcataaccctccctgctttctgcaaaggtcttaacggggtaaataccgccaaaatcatgtggtgggcaatggagcggaactggctctacaacgagcagaaagacccggagaaaaaaccacgctggcgtgtcgcttcctacgcccgtgatcgctatctcaccgaagacgaaaacgagataaagccgcatggacaagatccctttatcacccgtactgctgtgttactggaaaaaggctgccatcgcctctatgccctgtacatgaagggtgagcttcccatgaagaagagctggaacggtgaataccagcacgacaaagcggtttatacgctggaggtcaaataatgaaaaagcctcatcacactgaaacgggatttgattacggcaaacatggtgtgattgtcatcactgaggcggctaacaccgaaatcatcggttatgtggatgcactgaaatcactggacgcgggtcagtatgaccgcgatttattgctgggttttgatttggtactggcgattcttcatggctggaaagcaggcttttatgagcccaccagcgaacagagtgtgatgctgtggcgctggattgtctcagcctcatttatccgggagcaaatggacagaaacggcactcgtgaggttgataacgacgaaggcggcactgataccgcagctatttatcttaatggtgcctctgccatcacggtttacccgttttcagagcgcctgatgctggcagcccatattgaggggatcgcctttgagcagttcggcagagaagcgggcgcagatatggccatcagaatgtacatggacttcatcaatatacagccagaaagcggtaactggctatctgagaaagggcgtgagggtctttctatgttgcacgatgacttaatcaagtcagtagaagcgggtgaatttggtgatatccccgtcattcattaattaataggaggctcacatgataacaaaaaactttcgcctcaacgcgctggcgaacagctattcagccgctatctataacgatgtagtgacccgtaacggcggcgctcacttcacgatgcaagtcggaaaaacggaaatcaatgtcgctattgtcgaaggggtaaaaggcattcgtgaactggtggacagttacgcactggaagcattacagcagagttatccagcatgggaagttatcgccattgctctgatggagaaatgtgtcgccaatggtggtctgacaatctacggacgtgagatatggcaaagcatgatcaatgacataggaaacacactggcggctaaggggatgtttcaatgaaaatcgaataccaagacaaaggcagtacaccagtcatcattattgccagtttcatcacagaacgccgcaagcataaccgttgtgttgatgctgctctgctagccacacctgtttgggctgcttcttccggtgtgcttttcagaagaaccgttatcacaggtaaatcagcacatatgctgcgtgcttacaaaattatcagcaaggaggcaagccgtgactgaggaacaccgccagatggtggacattgacgacgaactggtcagaacggtagtccacatcgacgacggcagggattggacgcaaagacatatccataccatgagacgcaacttttacattcacgagggcatctgccctcctcttccaccagcacccaaagtgtcggtagtgaagataacaccagcgaataaaaagcataacaaacggggtaaaaaatcatgagtaaatgccaaaagaacgaaaacaaattaactacctgcaacggtttaacaaaagcactccaatacggtacaccaacaaaaaagagtaagggtttgtatctgccaatgaggattaatgtgcgaactggaaagcccggaaccgatatcgttcagctgcattcgggtgagtttgtcggctccggagtcatgctgaatttctgccctttctgtggggaagatatagacaccgttagtcatcaaggagaagaacaatgatcaataactcattccacctgactcagattattgcctcagtatggggtgatccgtctgatatcactgatgtggtctggcattctggatatcgtaagcctgaaagggaagcaacagaaatagctcagctcactatcgacattatggaaggggtgcctgatggggtgccctactccgcaagaccgaagaatttgaacgatattctcatggcggaactgagcgacattattttcggtgcaacgtggagtgataaggcaaccccggcgagtgtagcaagggtgatattggagagcgggcatcagaaaggagaagaaaaatgaatcagtcaccttatatcaaaactcaggaactggcagaacgttatggcgtaaaaccacacactataagattatggtgcggtaatgggaagcaacggcgtgaaggcttcccattacccaaatttaaatccaatcagcttaattttctacgacaggatattcttgactgggaggacgggaaacagttttagtcagtttatcccaccagcgttcataggcttctctctgctcatttaggtaggtgtgcttatcgtacacctgccaaattcccggcagtttatgaccaaccataatttcagccacatgcggggctgttaattcagatacgcctgtacgcatggttctacgtagatcatgaattgaaaaaggcttacaattaggaaagtgaagagacatttttttgtttagcatggtcattatgcttgcgtgtccccccactggtaaaaatggattgccacttcccacaacaaataaatactcgctcccaccgtttaatctcttggcttgctcaattaactctttagccacagggataatgggtctaataatgggctttttagattttcttcctgttttgtggttcttagggggaatgatccagatatttttttcataatcaaaatcactcactttagctttcagtaattcaccaatgcggcagccaaataaaagacatagttttattatcagtgtatcacgtggattatatcgggaagaattgataacctgaaaaagaacaaccaactcatcctcgctcaatgctctctcattcactttagaattagggcgtgttgacgtttgctcgaagggaattgggtggcatgataatttggtctcttattttcgccaaaaaactcgttacccgaactatcatgccacgacctatgttatcagatcctgtgtgggataagctatttgtcttcatgcaacaaaatcggcttacctatcataaaaaaacgcatcgcctcatcatggaaggtattctttttcgaatgagaaccgggataccctggcgggaactacctgctgaatatgggaaatggaatacggtctttaagcgttttaatgtctggtcaaaaaaaagggtttttaattcattattcaacgaattagctaagaattctgatact

SEQ ID NO: 180 - DNA, 4382 bp, Xenorhabdus sp.
  CDS (354)..(992)
agtatcagaattcttagctaattcgttgaataatgaattaaaaacccttttttttgaccagacattaaaacgcttaaagaccgtattccatttcccatattcagcaggtagttcccgccagggtatcccggttctcattcgaaaaagaataccttccatgatgaggcgatgcgtttttttatgataggtaagccgattttgttgcatgaagacaaatagcttatcccacacaggatctgataacataggtcgtggcatgatagttcgggtaacgagttttttggcgaaaataagagaccaaattatcatgccacccaattcccttcgagcaaacgtcaacacgccctaattctaaagtgaatgagagagcattgagcgaggatgagttggttgttctttttcaggttatcaattcttcccgatataatccacgtgatacactgataataaaactatgtcttttatttggctgccgcattggtgaattactgaaagctaaagtgagtgattttgattatgaaaaaaatatctggatcattccccctaagaaccacaaaacaggaagaaaatctaaaaagcccattattagacccattatccctgtggctaaagagttaattgagcaagccaagagattaaacggtgggagcgagtatttatttgttgtgggaagtggcaatccatttttaccagtggggggacacgcaagcataatgaccatgctaaacaaaaaaatgtctcttcactttcctaattgtaagcctttttcaattcatgatctacgtagaaccatgcgtacaggcgtatctgaattaacagccccgcatgtggctgaaattatggttggtcataaactgccgggaatttggcaggtgtacgataagcacacctacctaaatgagcagagagaagcctatgaacgctggtgggataaactgactaaaactgtttcccgtcctcccagtcaagaatatcctgtcgtagaaaattaagctgattggatttaaatttgggtaatgggaagccttcacgccgttgcttcccattaccgcaccataatcttatagtgtgtggttttacgccataacgttctgccagttcctgagttttgatataaggtgactgattcatttttcttctcctttctgatgcccgctctccaatatcacccttgctacactcgccggggttgccttatcactccacgttgcaccgaaaataatgtcgctcagttccgccatgagaatatcgttcaaattcttcggtcttgcggagtagggcaccccatcaggcaccccttccataatgtcgatagtgagctgagctatttctgttgcttccctttcaggcttacgatatccagaatgccagaccacatcagtgatatcagacggatcaccccatactgaggcaataatctgagtcaggtggaatgagttattgatcattgttcttctccttgatgactaacggtgtctatatcttccccacagaaagggcagaaattcagcatgactccggagccgacaaactcacccgaatgcagctgaacgatatcggttccgggctttccagttcgcacattaatcctcattggcagatacaaacccttactcttttttgttggtgtaccgtattggagtgcttttgttaaaccgttgcaggtagttaatttgttttcgttcttttggcatttactcatgattttttaccccgtttgttatgctttttattcgctggtgttatcttcactaccgacactttgggtgctggtggaagaggagggcagatgccctcgtgaatgtaaaagttgcgtctcatggtatggatatgtctttgcgtccaatccctgccgtcgtcgatgtggactaccgttctgaccagttcgtcgtcaatgtccaccatctggcggtgttcctcagtcacggcttgcctccttgctgataattttgtaagcacgcagcatatgtgctgatttacctgtgataacggttcttctgaaaagcacaccggaagaagcagcccaaacaggtgtggctagcagagcagcatcaacacaacggttatgcttgcggcgttctgtgatgaaactggcaataatgatgactggtgtactgcctttgtcttggtattcgattttcattgaaacatccccttagccgccagtgtgtttcctatgtcattgatcatgctttgccatatctcacgtccgtagattgtcagaccaccattggcgacacatttctccatcagagcaatggcgataacttcccatgctggataactctgctgtaatgcttccagtgcgtaactgtccaccagttcacgaatgccttttaccccttcgacaatagcgacattgatttccgtttttccgacttgcatcgtgaagtgagcgccgccgttacgggtcactacatcgttatagatagcggctgaatagctgttcgccagcgcgttgaggcgaaagttttttgttatcatgtgagcctcctattaattaatgaatgacggggatatcaccaaattcacccgcttctactgacttgattaagtcatcgtgcaacatagaaagaccctcacgccctttctcagatagccagttaccgctttctggctgtatattgatgaagtccatgtacattctgatggccatatctgcgcccgcttctctgccgaactgctcaaaggcgatcccctcaatatgggctgccagcatcaggcgctctgaaaacgggtaaaccgtgatggcagaggcaccattaagataaatagctgcggtatcagtgccgccttcgtcgttatcaacctcacgagtgccgtttctgtccatttgctcccggataaatgaggctgagacaatccagcgccacagcatcacactctgttcgctggtgggctcataaaagcctgctttccagccatgaagaatcgccagtaccaaatcaaaacccagcaataaatcgcggtcatactgacccgcgtccagtgatttcagtgcatccacataaccgatgatttcggtgttagccgcctcagtgatgacaatcacaccatgtttgccgtaatcaaatcccgtttcagtgtgatgaggctttttcattatttgacctccagcgtataaaccgctttgtcgtgctggtattcaccgttccagctcttcttcatgggaagctcacccttcatgtacagggcatagaggcgatggcagcctttttccagtaacacagcagtacgggtgataaagggatcttgtccatgcggctttatctcgttttcgtcttcggtgagatagcgatcacgggcgtaggaagcgacacgccagcgtggttttttctccgggtctttctgctcgttgtagagccagttccgctccattgcccaccacatgattttggcggtatttaccccgttaagacctttgcagaaagcagggagggttatgcctttggtaaagtgtttttccagactgccaaccgttgcactcagggttttattctcgccctcaaggcgctcgacattttcggcatatacagacaacatggaacgtaacttcgcgggattacttaacagttccgcttcggttgtgatgctgtcacggcgggtgaaatagaactcagtcagatcatcgaagtagtcccaagcctgatcggtttctaacatcttggaatgattagccgcaccgcgttctgtccagagataaaaggagcgcgctttactcgaaatttgcacacctctaaatgagttgcgcaaaatttcgacttcattaccttcgatgcggtggtaatgcttgccttcaataaagcgagatttgtttctgttgaaattgttcgtgatttgctgggttgtggcaccataccccgaagctatgcgatcggaaaggcagctttcgtattgatgaccgtgaaggcagaggcacgttcatttgtacctgcaacgccggggatggctggaagctactcaccctgacgcagggaaaagagtacaagacattagcggacgagattgatctgctgctgggtatccaatcggacaaacgcagtaccgcgaaaaaagaaaccaatatcaccgggttcagaaacagagtcacggcctgctatgccaatttatcccacctgagaggcacacagggtgaggcttatctgcgtaaccggggcattcatgttttgcctgctgacaatgtgaagtattgtgctgaacagcctgtgcgtaacggaacactgcaagcgatatgggcactggctaccgattcaaaagggatactgtgttatctgcaccggacatatttagacggcgacagaaaggcggacattactccgcaaaagaaacttgatgcgatgcaggaagagaattatcgcacctatgcacaatcagtgctctaa

SEQ ID NO: 181 - DNA, 7386 bp, Xenorhabdus sp.
  CDS (378)..(1604)
taaagctgaacgcgtggctagacaggccatgcaccggatagcaaatccgtcaacctgggttcgactccgggacgcgccttcaaatttagcccatgtggtgaaatcggttgacacaaagaatgtaaaatccctcggctgtaaagctgagcgggttcaagtcccgccctgcgcaccaaatataaattcactaacgtgtacactaggaaactaactcctagaaagacctgattaatcaacacggccttttatttttaggtctactctagtctatcccaatcaatatgcacggcggggcataatcaggggcacctacacttctattttaaatgtgccccttataatgaaactaaacgcacgacaaatcgaaacagcaatagcccaaagaaaaaacctacaaactcgccgatggtggtggtctctatttagaagtcacgacacgcggctcgaagtactggcgtatgaagtactaccgccccactgataaaaaagaagaccgactggctttcggtgtctatcctgccatctctttagctgatgctcgcaccaaacgagatgaagcaaaaaagctaattgctcaaggtattgatcccaaagccgagaaaaaagacgcacatgctggagcaaaaggaaaacatacctttgaaaaagtcgcccgtgactggcacgccagcaacaaacgctggagcgaagatcacggcaaccgcattctacgcagccttgaacattatatattcccgcatattggcaggcttgatatttccactttacggacaagccaacttttagcgccgatcaaaaccgttgatgctgatggaaaacatgatattgcccagcgattacagcaacgtatcacttccatcatgcgttatgctgtccaaaatgatatccttgaattcaacccagctaatgatatggctggcgcactttccactgttaaatctcaacatcaccccgcccttccccacgaacgtttacctgaatttttaagccgactttctcgctatcgtggacgcttaatcacccgtatcgcggtggaactgactttattaacatttgtccgttccagtgaattgagatttgcccgttgggaagaactcgaccttgaaaatactgtctggaaaatccctgccacaagaaaatccattgaaggcgttaagttttccgaacgaggcatgaaaatgaaaacggagcatattgtgccgttgagtcgccaggctgtcgttttgttcaaatcattacgcgagctgagcggtgattgtgaagtcatgttccctaacgatcacgatccacaaaaggtcatgagtgaaagcacggttaataatgcccttcgtggcatgggatacgacaccaaaaccgatgtttgcgggcatgggttccgaacaatggcacgtggtgcaatgggagaatcaggattatggaacgatgacgccatcgaacgccagttaagccatgtggaaagaaaaaacgtcagagccgcctatattcacacctctaaacatctggatgaacggcgactgatggtgcaatggtgggccgattatctggatgccaaccgcgaaaaacatatcacgccgtatgattttgctaagaaacgccggaagtaacatttattaatacttctaatatactgaataaaagatgattttttagactttgttggtagtgccaacaaagtctgctttttatacaacccatagttgtattatttcatctttaatctgatagccagctttatgcactgagtcattcaacaaactttttattcattcgcaatggctaatttccattgatttagaccacatatgctgagtatggtagtttcacaatccacaatggagaaaactatgagcaagtcgctttcctcaatcgtccaagccgcagcaaacagcctttttgagagaggtgaaatgcaatcaatcggcgagtttttctcgtcagactatgttgtacatcttacgagccaagactatttcggggggcacaatgtcatccaagcagccatcaaccaagttcgtaaggcgtttcctgagccacaagtagaagtggaaattcttcttgagggcagcgatagagtggcatggcaaaggacactacgcggagtacaaaaaggggcttacaaggggttcccagcctgcaaccgccagatcgtgtggcgagaaatggtggtgagtcgctttgaggataaattgatcgtagaagaatgggtaagtacagatctagcagagcagcttctatcatcaagaaagaaataaaattcatctacattttctggttcgaaagaaaagcggcgatcattaaatgattctcgctcactattcgtaaccagtgagtacataccctgaattacctgaaagtgtaattcttagggtgtgagtgtacataattcgctcatcgccgactttcagatttagccgtaccttcctacagaatcctgccagatagagtaacggataaatccatcatagtataaaaatcatcatatggtgatttttatccttttctggcagtgccagcaaactatttacgtgcaattcataaactatgaagaattttatgttctgatcttgtcaacaatttaccttacctttcttttgattaaaacttacgcaaaagacgattttttaaacttttttgcccaagacaacaaagaccatttttcatacaaaaaataaataattaaagctccacgctctgcataaataatatatttccttatttttcaattcattaataaaaagcattcattatacatatgattgttttttaatcttctgtgcccgtggcacgcagggctattttccatacagtcaatatccccgcatttaattttacgaattgcataaagagtttacgctttcaattaaacagaatttttaaataatcctctgtcatcaaataacgtctaccaaggcatttcaaggactcgataacagggggtatacatgccaacgattacaacatctaaagaaagtcttattcgcctgccagaagttcagcgcagaacgggctatagcaaggcatggatctacaggctgattaaagaaggtcaattcccgaaacaagtcaaaatcggccctcgttcggttgcgtttgttgaatcagaaattgatggttgggtagatcaacgaattgctgagtctcgtgcctgataaagtactggcctgaattttagtgcattagttcacaatgcagataattctttcattaagagatatgcaagttttgaaattattatttaaacaacaaaaggatagcaacatgggagctatcctcctgatgaactataggttggttcaacccttgggttcaataccacgtgattggagttctttacgaagtacacgcttgatccaagtagcaagggaagcatcaccatcagtttttgcttgttcttcaagttgttgcctaaattcttccgtcaatctcatttggtattggggagatcgcttttctttttgtgttgacatggtaattacccaaggatattttaaattacatggtaatgaccattttaattttagtaaccaaataaaacaacgccccatagtgctcgcaacacatacagggcgtctgaccaataaccgttgagagataacgataatggctgatacacagcataaccaaactcgccctaaatttacatctttggataaatcagacagccaaaaaccgctcgaatttatccaaaccgtgaagcaatccgctatgtaccattgggaaaatctgttacctgcctgtggtatcgatattcctgcaaagggtaaacatagcgcttgccctgtctgcggcggcaccgaccgttttcactttattgatgaccaccatcacggcaactggcactgtcgccagtgtgatcttccgaactacggcgatggattggatttagtagcgaaaaccaaccgtctctcagttcttgaggctgctaagattgttgctaacgtactggcattacctttgccagaatccaaaccagccaaagaaatcacttatccagtacagccgattgccgaaagagtcgcggcactaatggctcaaactgttgctgggccatcgccctatctggctgcaaagggactacaacaccataatcagcgtttactggaagatgattccctattattggtactgacagcgttagataaaaaggtcactggtgcacaaatcatcaaacctgacggtgagaaaaaattactgtctggcagccagaagaaaggcgcgtttattactgtatcagtactggaaaaaaatcccgacacagtaatcattaccgagggttatgccacggcactgacggttagcaagctctataaaggcactgttctggcggcactggatgctggcaatttgctttctgtcactaaagccgttcgtgaacactggcctgatacgaaaattattctggcagcagataacgactggcatcatcccgacgaactggataagaacggcaaacccaaagtcaatatcggtaagatctcagcagaaaaagcagcccttgcagtgaacggttggattacgttgccaccaacggaatacaaggctgattgggatgattatcgtcagcagcatggcattaatgcagcaaagcaggccttttctcaagagctctatcaaccagtacccgtcaagaaaaaatcagccactcagtccaatgataccgagccttcgaaactgacattatgccagatgggagccagccaacgcggagaggtgttactggcgcgttataacggtgatttagcgctggatggtgcttcagaaaccgtccatcattatgatggtattgtctggcgtccggtcagtgaccgtgatttaaaacgggaaatggtcgcggcctttatggaagagaaacaaccgtattcaccgcatggtattagttctgccgtagatgcactgaaattgcagcttcccatgatgcaaccaccaaaacaccacttaatcgggttcaataacggcgtgtttgatttgaaacgctgtcagttccggcctcatcgcaaacatgattggctattgcttgccagtgatgttgaattcaattcacccgttccgggggaaaccctgcaagattatgcgccacagttctggcgctggttgaacaaggcaacagctaactgtgaaaacaaatttgatcgggtactggcagccctgtttatggttctggcgaaccgctatgactggcagctttttctggaagtcaccggtgctggaggtagtggaaagagtatctttgctgaaatctgctcgatgctggcaggtaaaggccacactgtttccgccagtatggccgcactggaaaacccacgagaacgagcgttgattgtcggatattcactgattatcctgccagaccagacccgctatgtgggtgatggctccggcatcaaagccattactggcggtgatgaagtagccattgatccaaagcataaacaaccctattccacccgaattcctgctgtggtgctggcagtaaacaataatgccatgagtttcagtgatcgtagtgggggtgtgtcacggcgtcgggtaattttcaacttttccgaagtcgtgccagaaaatgaacgcgatccactcctgcgggataaaatcgcggcagaattgcctgtgattatccggcacctgctgcatcggttcgctgaaccacaagctgcaagacgtttactggccgaacaacagaagtcagaagaagcattggatattaaacgcggcaccgacccactagtcgatttctgcgggcacctgctcgcatctgatgaagccgatggcctgttaatcggtaatgcggagattgtgccgttcaatccccgtaagtacctttatcacgcctaccttgcttatatgaaaggtaataatctgaataaacccatttccgtaacccgctttggcatggatatgccgggcgcactggcagagtatggacagcattacctacgcaaaaaaagcaaatacggtattcgcagcaatatgaacctgaatattgacacggccagtgagtggatgccaaaactgacaaggaatgatcagccagaagaataaatttcttctatcaaaaacagttatcagataaatataaaaaagtattcaccactgttcactctataatttaaaccagatatatcaatgcattatagtatgaagagttattttagaactattcataagtgttcaaccctgttcacctttttccggtttaaggtgaagggttggatgaagactaatgatgagtttgctttcaagttatcatcatttaattaattgaatttaaataaaaatatttacaagtgaacagggtgaacagtcttatctctaattctttaatagggtaggattgtgaaaaatagtttttctggcaggaataatatttttcagattctatgggttatctggttaatacattagccaggtaacccatagaagacaagcgtagcgcgtcagtgtaatttgaatctattgtgttacgtgaaatttaaatgatgtaattaactgattttatttaagaagagaagttaatcacaattcttttgaggtatctctatttacacttgaatagataaattattctgttatatcttattcggtatatgtacttacggtaagtcgttgtcattgataagaaacaggttttagtcggcttagcttctcagatgtaatgagatcgtagctattaatttaactgtggcacggaatcctaaattttctttgcttctgatgaatggaaagagcaaatatggtgaaaaaaactatgttactggctttggctgcttttttaggtgcgggtatcgtaatgctaatccagtggatgcgtccccccacagaagatccttacttttttttaaatcctaaaccaactacacttggtggttaccacgcgatcgaagctccgattaagctgtatgaaaaaggggaaaaagtagatttggtgttttggaaggttcctcaacctaaacctaaacttctctatcttattcctgctaatactccatcacctaaaattagtttgaatattaaaaaacgcgaaaattctaatttagggttctatgttagtgacatatttagaggaagcggccctatacataaccttaaaggaaagcttatttttgatataaaaatatataaaataaatgatgatttaacagaaagcatagtatatgaaaaaactcacacaagagtaacttcttcatctgggtggtcaggtaataatttatttggtttagtggattttggatccccatatcaatatgggcaatatcggttgacagtggaagtactagctgatttgtcagcattaaaaatggatgacttaagttattccatttatattgatcagagatcaataaactcaactaccaccgactagagtcggtgggttagtgattaacggct

SEQ ID NO: 182 - DNA, 7386 bp, Xenorhabdus sp.; identical to SEQ ID NO: 181
  CDS (3601)..(6039)

SEQ ID NO: 183 - DNA, 4492 bp, Xenorhabdus sp.; identical to SEQ ID NO: 58
  CDS (3521)..(4213)

SEQ ID NO: 184 - DNA, 4993 bp, Xenorhabdus sp.
  CDS (263)..(1078)
ccacatcttaccgcatccgtcaggggttcagatttctatcgcagaactgcccgcgggtgaatttttcggcttctacggaacgggcttccagcctttcggtcaggccgcttttgcacaataaggtgaacaatgaaaaaccctaatttaatccccaagcccttcgcgcagaacgggcaaaaagacgcgatccctacgaatcacaaatcagacctgcccagtcaaaaggccacatgggatactgaaaccgagcggcagcctgtatatgttctgcggttcgcgcctagcctcggatacggaactgctggtacgggaacggtttaatgtgctgaaccagattatctgggcgaaaccgtcaggcccgtggcgcaggcagcataaagaaagtctgcgtatgtattttccggccactgaacgtattatttttgctgaacattaccaagggccataccacccgaaaggcgatggctatttcaaacaatgccgggaactgaaacagtcggtgtttaaaccgctggtggattattttcgtgatgcccgcaaagctttaggcatcacggcaaaagccatacacaaagccaccggaaagcagatggccagtcactggttcagcgacagccagtggcagttacccagtgaaacggactaccaaaagttgcagggactgtttgaccgtatcgccaaagaaaagcaccagcgtggcgaactgaacatcccgtattctgagctggtggcgtctcatttaaccctgtcgcgtcagtatgacgaactgcggaaggaatacggtttaatgcgccgctcgttcacggtgacggcagacgtgccttataccgatgtctggcacttttcccctgtacagtattatccgggcaaacatccgtgcgaaaagccggctgatttaatggcccatattatccagtccagcagccgggaaggggagctggtagccgatttctttatgggttccggggcgacactgaaagccgcattaaaactgaatcgtcgtgtattgggggtagagttggaagaagaacggtttaagcagacggagcaggaaatcaaattattcacaaataaatgaaatggatttcagtggattgtaaaaatgaccacacaaggcgaatcgatatattcaatcataagaatttattaatatattcatcctgtttaacagcaggaggaaattaaatattaaatttaacttcccattatttataaatataaggaaataatatgtctgaatttgttaagcctgaacatgagtgcccttttgatccaaaacaatatcactgtgattgttttattgcaccggtgggttctttttcttgggctttgattcaattaaaactacgcaagcgcgttacccgttctgtttgggtgaattgccaagggaataatgagatgtatttggctatcactccacgtgtaaataatttagtcgtagagaaagagagtgcttatgccgttgatggtgttgctattgggactaaatacgattatttgacgcatattgaactgcgcaatgaacatggtaattttgtaccatggcagccaacgcaggaagatatgatggcgtgtgattggaattttgtagaacagaaagaagagcgcattaaacctaaaccatttgttaagcctgcgcatcaattgaaagtacggttaactgttggtgaatatatttcctctaacaaaactcactatgttggttatggagatctacatggtaccactactgactacagtacaggagcatgggaagtcattagtaatgatacattgcttccaaataaaattcgtcaattcagagtaattcattcgaattcagaacctaatcgtgactttgttcttgatgagatgagtaactctagtaaaatcaaagaccaacttggttcaaaaaaattaattattaaatatttagataaagaatatgatttaggaatcgctaagacatactattctgcgactctattatatcctcgaacagaaggttcagcagcattagaagaattatttatctcatcaattggaaaaatactagaacttgaatttaatttttttgaggaataattgatataaaaaatatattcatagtactggattagattatgttaagactgtgttttatgaagtgtccagcttaatgaagtcacttcacttcacttgacgcagttttttgtttttgccactgcaattacgttactactttttgttgctggtgccttacttactacaactcacaggggtggatatatttcaccccacggatgctcattgctcgaatagggggtgtataaaaatgaaagaaaactctgatatctgggtatacctcggtgagtggattatatcagtaaaagaacaaggcatcggagctgtactcgcaggaataatggcatttatccgaggccgctataacggtgtcggttggttaaaagtctctatcgatgcctttatatgtgccatgttcgcttggtttattcgtgatgtattaaatctgtttggtctgaatcctgatttggcctatatcggcagtgtggtaattggttatttaggtacggactttatcggccaattgttgcgtaaggtggcagagaaaagagcaggagcatcctctgatggaaatcagtgataaaggccttaagtgcatcaaacagtatgaaggcctgaaactaaaagcttaccctgatcccgcaactggtggcatgccgtggaccattggttatggtcatacaaaaggggtgagaaaaggtgatgtgattacagaacagcaagccgaagcatttctgcgtgatgatctccaacctatttacatcacattaaagcaatgggttaaagttccgctgaatcaaggccaattcgatgctttgtgttcgtttatcttcaattgtggtagtggtaacttttcaggttccactctattgaagaaactcaatcaaggtgattattcaggtgcagcggcagagttttcccgctggaatagagcggcaggcaaggttatgcgtgggctggataatcgccgggcatctgaacaccagatgtttttatcatgaagctcaatttcacctctggcgttgttattgcattgattattgcttcagttgcagccttcttataccgctctgggtataagaaacagattgggattaatagtgagcagataacggaaattcagcaactgactgacaccattaactatcagaacacgcatattgacatgctgcatgaattggatagtaaacacactcaggaactcgccaatgccaagactgaaattgacactcttcgggctgatgttgccgctggtcgtcgcaagctgcgcatccaagccacctgccccgtgtctgaaaccacttcttccggcagcgtgggcactccaacctccgtcgaactcactggagaagttggatcaactgttcttgatatccgagaaggcatcatcaacgaccgggcaaaattaagctatttgcaggattatgtgaatattgaatgtgggagaaaaaataatgactgaaacaaacgaacttaatccctgtccgtcttgtaatagtgggtgtacagaaatgaattaatattcagatgacacatggttttttgtgcaaactatctttatggattacatgttaatacttgtgaagaaaaattgaataatgaaatataaattcccgcagtgtatgtaaaattgatcaatatgccaattgcgacaaaaatgaagtataggaagcatctaaccggtactgatttaatttttccactgatttctttcaatggtatgtgattcgaaaaggtatctaataagaagagtgcaaataggaaagcaaccaaaaaacttaccatagatcctataaccacttcatattgcgagtatttgcaaagtgctcttagagcaaagaagccaaccagtccatttacgactgaataacttgcaagattagtcattatcgcgctgcctctactggcaaatttaggtactttttcaaataaatcttcaatcttttctatacacgaacgaaaattcatacagactccttgtttgcaaatagtcttagaaatggaagaacaaatttacctatttttaacatattaaaatttgagataaatcacttaatgaagttaaagtaacggtggcaatttctttattttgacaggaattgcaataccgatactccctttgcgtcgtgttatcatcgtttgtcggtattagctaaggcatatttccttaacattgggcgtataggcagaatcaaaaataacccattccactgaattatatgggtcattgtcagcaatattccctgtaggcagacgaagtgatgtgatagtaggagagacagcaaatactgaacagggtatttgcggagtgtcttgtgcagaattttatatctgggaacctctaaaaactctcaatacaaaaaataagatcaattttgaactcaccaataactgaccttattgtgtatgactttttcttgcttgttcaggggaaaaaaacaaacgcatcactttttcatcacatctcgaaattaaaaagcatgaatacccgattttccgaaataaaccaaacgttgcaaatcatagcaggttgccttcatcgtcatcgcaaaattggctcgcagctggcctatcgtccgaataattttttcacccatctgagagagtgagccaaagatatgttctacgcgtgcccgagttttcgctattttcttatttcggcctttttggcagtgtgataagggcttattacgtgccgcttttctctgaatatgcacacgatagccctgctccttcagcacacgttcacggttttggctggcataccctttatccgcataaatgtcccgacggggatttgacctgtccaaaacagcttcaaaaaactggctatcatggacaaccccggttcctgtcgcgatggggcggatcactataaaatttggatcgacatttagggtaagtttataacccaaataacgcctaccgtgctttttctttagagcgcatt

SEQ ID NO: 185 - DNA, 4993 bp, Xenorhabdus sp.; identical to SEQ ID NO: 184
  CDS (2384)..(2623)

SEQ ID NO: 186 - DNA, 4993 bp, Xenorhabdus sp.; identical to SEQ ID NO: 184
  CDS (2610)..(3044)

SEQ ID NO: 187 - DNA, 4993 bp, Xenorhabdus sp.; identical to SEQ ID NO: 184
  CDS (3209)..(3505)

SEQ ID NO: 188 - DNA, 8964 bp, Xenorhabdus sp.
  CDS (400)..(2712)
gccctaaaggatttggtactttacgttccgctgccgctggatgagaaacgcgaatatcagacactggcaggcttattgatggagcatctgcaatatattccacaactgggcgaacagctaaagatcggtgattatctatttgaaccgatggaaatcaccagccaccgcatcaataaagtgaaaattacatcactgaaagtggaagaagaaacggtcgaataatctattaaatatagatatgacttactaaaaaaccggcattatgtcggtttttttagttctgacaaattttattatatcgatttaatgtgaattttcagataattaagccttaaaatcttacgtatgcaattgtatgtcttacttcattgacttgtcattcataaatatgggggttacatgagtaataaatattttgcattattgacggattcaggcgccaataaactggaaaatgcagcaacttcaggaaataagcttgagatcacacatatggctgttggtgatgggcatttaccaacacctgatgccaatcaaagccaattaataaatgaaaagcatcgtgcagaaattgacaggctattcatcgatcccaataaccctaaccaaattattgttgagcagataattccggaaactgagggtaactggtggatccgagaaataggcctgtttgatgaagataatacgctaatcgctgtcggaaactgtgctgctctgtacaaatcacaaatgcaggaacaaacagttcgcatggttttgcctattggtgatagaaatttaactggctggatagcagaactaatttctggcttagccactcgtagctatgtcagagggaaaattagagatcatgcagaaagtcgtaatcatcccgatgccacattaaaaaataaaggctttgtcattctgagtaatgctgtagacagtaatagtgaggctcacgcagctacatccaaagcggtgaaatccacccatgaattagcccagaaagcctataatttagccgatccagttaatgccatgaagaaatgggttccgctaacccgtaagatcaaccataaagagctggtcaatgatatcaatctaaacgcggcggacgtggatgcctataacaagactgagaccgatgcgctgattgcacccatccagcaggacatcgcgcaggcaatgaaactggcagataccgccaaccagaatgccaccagcgccatcaacaatgcggaaaacaaagtcccgttaacccgtaaaattaatgataaagagctggtcaatgatatccgcctgatcgcagcggacgtagatgcctacaacaagactgaaaccgatgcgctgattgcacccatccagcaggacatcgcgcaggcaatgaaactggcagataccgccaaccagaatgccaccagcgccatcaacaatgcggaaaacaaagtcccgttaacccgtaaaattaatgataaagagctggtcaatgatatcaatctaaacgcggcggacgtggatgcctacaacaagactgagagcgatgcgctgattgcccccatccagcaggacgtcgcgcaggcaatgagacaggcggataccgccatcaaggaagcggaaagtaaagtcccgttaacccgtaagatcaaccataaagagctggtcagtgatatcaatctaaacgcggcggacgtggatgcctacaacaggactgaaaccgatgcgctgattgcccccatccagcaggacatcgcgcaggcaatgaaactggcggataccgccaaccaaaacggcgccactgccatccgtgatgcagcaagcaaagtcccgttaacccgtcggataaacggaaaagaattagtaaatgatatcaaattgatagcatctgatgtaaatgcttacgataaggaggaaatcgatcagcttattgatggcgtcaaagaactggccaatgctgccaacaataatgccgatagcaaagtaccagttttccgtacgataaataataaagcattattgacagacattatgctaaacgcatctgatgtagatacctatgctaaaggagaaattgatcaacaaatcaattctgtcagaaaactagcaaatgatgccaataataatgtcaatggcaaagtcccactgacccgtacagtgaacaataaggcattactaaccgatattacccttacagcattcgatgtaggcacttataataaaaacgagatcgattcccgcctagacaaagtcactaaaaacgctaatggccgactggcaaaagatgaaaatggtgccgatattccggacaaaaacgcgttcgtaaaaaatataggcttaggtgatttgattggatcaaaaattgaatcccaactaatcggacaagatgctacgatcattaaccttgggaaaattactcaaataagcggcgtagcgatagccggtacaccaattaagcaagaaaacacatcgattgtcggtggagtaacgtactataccaattattacaaaatacggttaccggtcagcctgcccaatggcattatttcgtgtcacgccagtatcgcttgtaataatttcgatagccaactcccaagccatctggctgatgttagaacccaaagaagtaattcggatggagtcggattatctcaggatactttaaccatatcagttaccacaccagaattaggctggactcctgagttttattatgaagtgaccgggtattagcagtagcaaggagtaaaatacccactttattactcatcaggtgattggcaaattaatcacctgatgatgctcaaattatctatttttctgtggcctttttcttattcttactgctatcaatattatcaaaccagttctttatagattgtttaactttttgttgtaattcatcgtgcaagatggattcaacattcagagcatattgcaaattgttccaatcaccataaatccgcaatggtacttttaatttttctaaatggctgactaactcattttgttgcccccagccaccggttaactgcaccagcaatgcaacatcaacattttgtttcagtaagtttgctttgccctgcccttcaatctttgaatgctcagagtttgcagaaaggctgttaattttaatttcgccttgtgcaaatttcgcctttactgacaaattttgtgcgccagtaaagctctgcgtattagtgggctgtttaacctgatcggttactcgtgaaaaagattgctgaatcaacattggaatattcaacccatctaaacgcgcattttttagattaacgttcaggtctccctgccagtaatgagcgacggcatattcatcatacccttccccaaaaagatccccgtccagagctaactgtccactgaatactgacggtaaatccaatgctttcagcagaggctgtaagtcaatattttgtaataagggtttcgcatgcagtttagccggattgaccgttgcatcaactgttgcaggaagcgcaaaatatcccccaaatgcattaccactcagctttgagatatttgccattcctgcgttattgacagccttgaaaacaaagttatcaatatccatcccctgataaataaatttatttgctttaaataacaggtgagcattaaatcctttcaagaaactgagatcataattggataaaggtgaaactgactttgcaataacaggctttaccaaattattttccatccgataatcaattttttcctgaaaactattctttactaatttatcccatcccagcaggttatctaaatttaattctggtgaagataaattgatggaataggccggtttatctttcagattaatatccactccaccagctaattcactctcatttatcttaagcgctattttttgtaacgaaataaatgaagaaaaggcatcatatcgtacgaaggcagaaccctccccagtaataccttctgaaggtaaaccaacacctgtaagctgatatttaaatgaattcatatcgcctgttatatactgtggataatcagcaatattaatgtcagcatcaagttcaaaagcaaattcctgctgatttttattaatcttactattaagctcaagattaatatgatgctgatcctgacgcttcatcagcaggttaatatcccgtatatttaactgcgaatgggagttggtttgccagattagcaaactgtcttctactttgatcctgtcaatatccaatttccagctttggccattgccttctaccggataatgaatatcactttccggtgcaataggcgcttcaggcttttgttgtggctggctatcaggtgtatggcggaaaacagcccctttgagcatgacttccttaactgccaactggtgggataacaggggcaataattcaacatccaggcgcatattttctgccacaattgcaggcttttttgcgccgggagcagtcagtgatacctgtccggtcaaaatactcagttttggccagacatgccaacgcagatcatcctgtaacacgagctggtagccactctttttttgtacttgttttactatgtagttacgaaaatcgttcggattaatcaacatgactaatgccgtcagacctgcaacaactacgactaacaaaataatgagtgtcgtcaacaatcttttcatgacttccccagtctcatgtccacaagatgattattttcaccaaatgactatacccttcgtctttcaagctgcctctttgttggcttgcgctcgttcaccccagtcacatagttatctatgttccaggggattctctcccttgccgccgcgatgcaactcgaaattcattgggtatattttactagatatctgcatcagaaaagattaatcctcgctgattcggctccctacagctcctttctgatttttatatttggcatcctgacgtcggttataaggacgttcagcatcacctgaaagcggttcaaagcttaaagcaccaatcaccattccagggcgcagagctaatggcagttttcctgagttatagaattccagaacaatttgaccatgccagcccggatcgatccgatgagccgtaacatgcaccatcagcccaagacgagccaaagatgagcgaccatccagccacccaacaagattagcaggcaatgtgacagattccagtgtgactgccagtgccaattcaccgggatgcagaaaaaaagcttccccatccggtaaaatgatttcatcgctcatgacacgatcaagcgcagcattgacttcagccttagggccgctcaagtcaatataagcagcggtatgaccacgaaaaacgcgaaactgattcccaaggcgaacatccgcagttgccccattaatacgttcgacgggaggacgtggggtaattaccagtttaccttcatcaagccatttaataatgtcacggtcacagagtcgcattacttcctctcaaaatacgatgattcttatgaatacctgttcaacaggttattcgcaaaattggccaattttagctttcagtatgtcaatagccacacggttttttccaccacggggaacaataatatccgcatattgttttgatggctcgatgaattgcaggaacatcggacggacagttttcttataccgttccattacagaatccaatgaacgcccacgttcatttacgtcacgcttaatgcgacgcatcaggcaaatatccagtggtgtatcaacaaaaatagagaagtccagttcctgacgcaaacgcttatccgttaataatagaataccttcaaggataataacgcgctttggttcgaagtggatggattttgattttcgtgtgtgttcagcgtagtcatattggggcaattcaatggagttaccggctttcaaagtctgaatatgctcgaacagtaaatcgtgatccattgaacttggatggtcataattgactttaatgcgttcttccatcggggtgttagtttggtctttataatagcaatcttctgggataacaccgatattatgatcgccaacctgagcccgtaattctcgataaagtgtgttggcaataaggcttttgcccgaagcggaggcacctgcaatgcctacgattgtacacttatgtgcttcatcagccatactaaaaataacctggttagaaagaaaaaataaagtgggaaaaatagcatcctttcatgctatgtttggcggattatagggagttaacagccgctatgccagcgtaaacaggataagtcgcatttttttcgatacgcttcgcataaaaattccacaatcacttgttcaaaaacaaaaaaagacctgccaaagtaatattcaaaagccaaaatcaaggtaatccgcgaaatcattcctgaacaccatacctaaaaataatctgaagattgaatccaaagtaatttctcattttttaagggaggtgaaatgttcgttatttatttgatgagcaactgttattcatatgtggtgaatttatccgaccattaaataagtcaggggcgtatttaataaaaaacaaaggatagtgatgcataaataatattgacgattcatcgcaccgagctgtattaaaaagcatctttcgaaatgttaacaatgctagtccgattaaacctgatttacattttaaatcttagtctaaaggaatttgctatggaaatattcgatatcatgcagccgctatcgcggtacgatctggacgtcaatttttcatcaactctgcatatctctggcggtcaacatactatccacgtcgaagagaataatactgcttatggattcgttcatcagggagatttaactgtctccatcgatggtacttcacaacaactacgcgaggggatgtacttttccattcccggacctgcggagctttctccctttgtcggtttgatttgcatcagaaatggctacaaaggcttcctgtcatttggtggcccagtagaacgactgggacgactgaaatacatagatggctgttccgatagccttctcatatcgccgccactcaagggagacccctgtctaaattacctgtatgttccaccaaggctgaatcaaacagctcatacccatccttcggttcggatcgggatcgtcatcgaaggggctggctattgtctgactgaaaagtcgaaaaccgacctgatagccggaggaatattcttactgccaacagacgaaattcacagcttccatactgatgataccccgctgcgaatcgtagtctatcaccctgattctgacttcggccccacccatgaagcgcacccgatgattaatcgaacctgggtagacggtatttctttagcgggagaaaaccgctatcgcacccgccagataaacgaattcggaacggaataaaataagcatgaagcctgatgtatatatcggttcacccaatccacaggtaagatcagattcgttgggcggcatactgccaacattaccagactggctgacccataacccgaaacctgttatcagccagcttccttggcctgtatgttcgtctcagacaacgacaaattctacgctggctgcgctgacaatgggggaattctcccgttcgctcaagcaggctggcatttgtgatctcggtgtcgtccccattcctggtgcaaccgttctactcccctggggagtagcattgagcgaaatcatcgccacaaggataagaacggcttatgaggcaatagagctggacgagtacgcctatccgcatgttatagcagaaagctgttttgaacctatggctgatttacttgatacagagcgtaatctgttgagagtcgcaaccaccatagacactcagagccagcgtgagcgcggtatattacttccgacaggtgagcaggtcattgccagtcattggaaaaaaatgatcaatacgccagacgtgatgccaatccgcatgttccagcgagctcgctatttccgccctctcagttcggctgatcgcagtggtaaaggggtattcagtgcacttgaagcagcggacatattcgaatttcactgctgccatcggactcaggatgccgcattactggatttgcaacgtatagatagctccctgactgcactgtctgcttccttacctctgccacaaatagtgggtgtacgccctccgtggggcaaccgttcagaactgtatcaatgggctataggcagcgatactccccttcccagtggtgaatgcgtgcaaacgtcagcactatattttcaggggcaggaactgtctcgtcgttacgatatcggctttggtaaaggagaacaaaggcagcatgcctggcagttggatggttttatcagtcgcagggtgctatacgcgcagctttatctgtcagccagagccaatggcttacttactgttcatccccggcttgctcccacacaagtggttattttggtacgtagccggcacgatgatgaaaaaaaacgcatgcaggagttagctagtatgctgcaagctgccggacttcgccctgtactgcgttactgtgaggaaagtaaggcgctgaccgcagcacaaaaacactggcgagatcgcggtgtccctcttctgctactatttttcggccgccgtagcgcaaacgactctcctcgcatccgtttgctacgcgctgataaagagctggagttagaccaaccgggaaatagctctgcggactggctaaccaaacaagtcactcacgccattacagatgtggaaaacgatgtaaattacaccattattcatcaggctcgaaatcaaatctcatttgcctcctcagaggctgaagcatgtcaggcattatcagcacgtcagtgcgttatagctccgatctgccccacaagatcccacacagataaagtggcatcctggaaaatgggcgaactatgcagttttactgctgctctcgaaccacaaccctgcattctgtcaggaaggccaacctgggcgcgggcattattgtcacgcc

SEQ ID NO: 189 - DNA, 8883 bp, Xenorhabdus sp.
  CDS (4213)..(5535)
taaattctcgttgggctgcgttaatttggcttgcaactttccatcattagtcagaaccagtaacccttcactatccctatccagccgtcctgcggcataaacatcactaaaaggaataaaattctttaaggttgttcttcccatttcgtcagtgaactggggcagaacatcgtaaggcttattaaatatcaacacccgacgcgggcccgctattctttttgtggcattggtattttttctttgactgaatcgattaagtttacgttttttaaaagagaaatttgtcatgataagttattgcacaaagtgaagggcaatattatacctgaaatctgcgccattggcgtttgcagaatattcaagtaatattgacacgtcccttacaaaaaattaacaaggcattgcgcttacttgaaaggagaggttaatggaaagcaaagtagttgttccggcggaaggtaaaaaaattactattgataccaaaggtaaattaaacgttccgaataacccggtaatcccttatatcgaaggggatggtattggtgttgatgtaacgccggtcatgctgaaagttgttgatgctgcggttcagaaagcatatagcggtgagcgcaaaatttcctggatggagatttatacgggtgaaaaatctacacaggtttacggtaaagatgtctggctgccggaagaaacacttgatttgatccgtgaatatcgggttgctattaaaggtcctctgacaacgcctgttggtggcggcatccgttctttgaatgtggcactgcgccaacagctggatttatatgtctgcctgcgtccggttcgctattatcaaggaactccaagccctgtaaaacaccctgaattaactgatatggtgattttccgtgaaaacgcggaagatatttatgcaggtattgagtggaaagccgggtctgcggaagctgataaagtgattaaattcctgcaggatgaaatgggcgtttctaaaatccgtttccctcagcagtgtggtattggtgtaaaaccatgctcggaagaaggtactaagcgtctggtacgttctgcgattgaatatgcaattgataacgaccgtgaatcagtgactctggttcataaaggcaacatcatgaagtttactgaaggtgcctttaaagactggggttatgaattagcgcgtacagaatttggtggtgaactgctggatggcggtccatgggtgaaaattaagaatcctaaaaccggcaaagatatcatcatcaaagatgtaattgccgatgcattcctgcaacaaattctgctgcgtccggctgaatatgatgttattgcttgtatgaacctgaatggtgattacatttctgatgcgctggcagcacaagtgggtggtattggtattgccccgggtgcaaacattggtgatgagtgtgccctgtttgaagcaacacacggtacagcacctaagtatgccggtcaggataaagtaaacccaggttcagtcatcctctccgctgaaatgatgctgcgccacatgggatggttcgaagctgctgacctaatcgttaaaggtatggaaggttcgattgctgccaagactgtcacatacgattttgagcgcctgatggaagacgctaagctgctgaaatgtagcgaatttggtgatgctattatttctcatatgtaataatcactttttaaaataaataacgggggcttaatagttcccgttgtttttaacggtatgaaaattcttctgcaaaactcctgcaaaactcttctgcaaaactggttataaattgaccgctatttcactgccaaaataatccaatctttacctctatcatcatggtatttatcagtcattgactggcttttatgaccgagtaatgtttttgtatcaacgccctgttcgcggtacaaacgttccgatagcgttattgcgtgaaggggcgaaatacaagcagttactaaccaagtccgataaattgggattaacggtccctaatgggttaaatcagcaactcaccgatttaaatggcacggtaaatgaacttaatgcctcatgggagggatttaaaacccgcgccagtaatgcgacggcaaactttttaacttcggatggtacggttaacgatggtcttaagggcgtcagtgacatattgacttatggtccagacaactttgcaatcatgcgcgccttgggggcgacaagaggcaatgagtcagaccagttgcgatggggttataacacgccggaattttataagacgctcagtacgtatgaaaaaacgatgctggattttggtctgatgacggacggatacaaggataaataccaaaaatggcatgaaaaaaagggggctgaaaaaccgcaatctcccactttgcctgacaatcaaaaacattatcaggatatttatcaaatacctaatgatcctaatagggtgaataagtctgataaacagccaagaggtatccggaataataatcccgggaatttaatcgcggctccgaatgccgtaggggaggatttcggtaatggtcaccggtatgtgaagtttggtaccgcacaggatggtatctctgcaatggggcgtcaaatcatgttggatgcagagcgaggactgaatacgattacatcgctattatatcgatatgccccacctgaaggtcgtaataatactcccgcttatatcgattccgtttctcagcgtacagggtattcacctgatcaacctcttgatttacacaatcctgatatattgaaaaatgtcatggttgggatgattcaacatgaaaataataatataaacccctacagtgatgagcagatgcaagctgggattaatgccgctattcatgatgcccgttggtcggggttgcgaaatcctcaaagactcaagaaacagcgcgctcaatatggccctaataatgttatcactgacggaatagacggagtaaatgataaaaacgtgcaaacacagaaatctcagcctcctgataaaaaaataccgtctttgtacaataaaaaagactatgaacccacaaagttgggggttgaaatggcagaaggcatggcgaaagcagtgcgagatgcttttggtgatttaccacttaagctggaggtcattttagttaatgataagacgggagaacggcaaagatttcagtcaaagcttgggggaaaagtgacaacttccatgcagcaaccttgatgtgattattttttgttcaaaatgttacttttattatattattaatatgataactcacattgaaattttctgtcggagggagataagtgctaaagaaaatagctgctttcttgtttctggtatcaactgtggctagttctgccagtttcgattgcgcaaaggcaacaagcaagactgagaagctgatttgcgccacaccgatcctgtctcaggctgatgatgccctacttgtcgcttatacgcacgcaaaaatagctacaggtaatagtgacggttttaaagcattagtcagacaaaactggaatctacgtgagaaaaattgcgatacggtcaaatgccttcaagattggtacagacaatcatctgaaatataccatcgaattgcagccaccagagaagaaggtgaaaaagtcaacagcacttatttttacaatacgtcagcaaaatttaaaggcactttaaatagtgaatcggagggctttccgtcattaagattggatcatcttatttctgtttcacctagtgatggtgtttacgatgaaacagagccttttgagcatggtgttgccgtgatgcaattggctatgactaaaaaagaacaatggaatatctttgaaaaactaataggaaagaaagtgtcagtaacatgcaatatataccatgcgcacacgatacatcacaaaacccctattatgtgtcttgtggaaaaaatagaaaaaacaaaaagttaaatcaaaacagccccctacggggcttttttgttgagtagttgctcaagcagggattcgattttatctcaatcgcgttaataatctaatttaaagttttatcattctcacaattttgggtatttctgaacacccataaattaaagtaatgtagggtattgcgagtattttgggtaactctcgatggctagttacgtcatgacagggtttcttccctgctggggggtggcagtgatgcgtcatggcaatgggcggagcatttgcacccggcttcattccggggcgtgccttttgccgtcgtgtccggggaaagcgtcttcggtcgccgtcaggcggtgcatgaatacccgtaccgtgatacggcgtggctggaggatttaggccgggccacccggcggattgcgttgcgcggttttatcattcagaacagtgcggtgtatcacgcgccggatgtgatcacccagcgtaagaatctggtcgccgcctgtgaaaccggttcaacgggcaccttagtccatccgacactgggggaactgacagtcagtgtgaccgaaagtggcctgcgcatgaatgagagcaaggagtttggccgggtatttgagttcacactcaccgtgattgaatcggggctgaaagtctttgcagtcaccaacagcaccaaatccgccactgaggtgaaaaagcactggttacaaacctataccaccacgctggcgaaatatatcgcgatggtcagaggtgaaattcgctcggtgacgcagggcatacggattattaaacaaaccgcgaaccagtggatcggtatggtgacccgttcaatggatgaagtgaccaacctcagtgatatgctgaaaaccaccttcggtagtgagcgctacgggcgctatcaacgcgggaaaattggcggcaccgtttccggggctaccggtctgcggtcacgggatgaccggcagcataatgaagcggacatcatcagaaaaaccacggcggcggtggtgatgagccgcaaaaccattaccgacaggctggatacattaaacgctgcccacaccgtggaaaccttcagcgaggccgccgggcaggtcgtgatcgcgattattgattcttccggtagcgtggatgaaaaagtggcaattttcgaggcattggctgcatttcagaacacccgctatcagcaaggagcggttgaccgccatatcacggcaatgaccgtgttgctgttggttgtcctgtcagcgggggcgatggcgcaggttgccagtgactttacgccgtccagcaatcaggaagcccatgatttacaaacgcgggtctgtcaggcactggatacggcgctggtgatggcgggtgatttgggtgtggatgaggtgtatcagtccctgatggccttgcggcatgaatttatgaccagtgccgagttaaaaggtgcggagtcaggacggttagcccagtttagtctgccgactgtcctgccggccctgacggtggcgaaccggatttatcaggacgccgggcgcagtgatgaactgatacaggccacggatccccgtcacccggcttttatgcccacccgatttaaggcactcagacaatgaaaaaataggatgaactgtcgctggtaattggcggcaaggcgatttatggctgggacagcgtgcgcgtgacgcggggcattgaacggttaccgtctgattttgaactgatgctgatggactattaccccggcagtgatgaaaaacaacaggtcgaggccggacaaccctgtcaggtgctgctgggtaatgacccggtgataacgggttatatcgatatctggaactcctctattaacaaaagtacccaccagatacgggtgaccggtcgcagtaaatgtcaggatttagtggattgttcagctaaatggccgcagaacgtgatcagccgggcgacagcattgcagattgcccagaaactggcgcagtggtacggcattgatgtgacttccgatgtggcggacatggagccgctaccgcaatttaccctgaactggggcgaatcctcacaggagattatcgaccgcatcacccgctggtctgctttgctctattacgatacgccggacgggaatttatttctgacccgtgtcagcgataaagtcgctgccagtggggtggcgcaggggaaaaacatcgaacaggcggattatcagtcttctatgaacgagcggttctccgaatacattgggctgtccatgaatgtcagcggactcagtgaactctcgtccgggcaagggtatcaggcggttgaaatcgccagtgcccaagacccggaagccgaaaagatgcgttaccgtaattacgtcaccatcatcgaaagcacattgtactcacaccagcgacaacaggaggccattgactgggaaatgaaccgtcgttatggccgttcaaaggtgctcaaggtgctggtcgacagttggcgcgatgtcagcgggacgttgtggacacccaataccctgataccgatccacttgccggtctttggattggaatccgaacaatggctgttatctgaagtgtcttatgtgcgtaataaagacgatggcacccgggccgaactgaccctgatgccgccggctgcctttactgtccagccgtatgaattttattccactctgatggaactgcgcaacggaggttactgacgtgatggacgttaagaatttatatcgccgggcgatgatgatgctcggtttaggtcgggtcaccacctgtaatgataaaggggttatccagcaaattcagtatcagactgaaatggaagtccgggataatacccaccggatagcagagtttggtttttcctccgggttaccggcgaataccgatgtggtactggcatttttaggcggtgaccgctccaatgcagtggtgattggcagcaaccatcaacagtaccggcatcagggattaaaccccggcgaagtggtggtgtataaccagtgggggttgcatattttgctgacagaatcggaaataaccgttgaagcgaaaggacagccagtgacagttaacaacgcatctaaagtcactgtgaacgcctccactgaagtgctgctgaatacgcctgtgctcaaagtcaccggtaatgtgattgataactgcaacaccaataccaccacgatgaaacaattacgggagagctataatcgacatacgcatcctgtctcgggggtgagagcaggcgactccacggtgcagagccagataacgggggagacggtcaaatgagtgatatcacttcatggtggaatgtgaaaaacatccacgctgactggttagccgggcgtggggatatgggagcgagacaatgccgtttaaacgaaagaccctgaccgaacttcgggcacagaaccgcagttatttacagtcagaattacaggaaaccggtccgttactgcgcttttccaatatgggcgtactggcagatatggatgcagggatggcgcatctgcattacggttatcttgattacatggcccggcaaaccaccccgtttacggccaccgatgaatggctggcaggctgggcggcgttaaagaaaatcttccgcaaaccagccactgctgctcagtgtgaccattatcagttcaccggcgtggcagggacggtgattcccgcgcatacaaggctgaaccggggagacggttatcagtaccagaccgtgacagaaacccggattaatgagtacgggagaagcgctgttcggctgatggctatactaccagagagtaccgaagatgattcaggcggtggtgcggcagggaacgccccggcaggcacgatattaacattggaccagagtctggcgggtgttgatgtggaagggacggcgatagtgccgattaccggtggggcaaatattgaaagtgaggccgattttcgctcccgtatgttgttggcctatcagggtacaccacagggtggctctgatgatgactacaagcagtgggcgctgtccgtgccgggcgttacccgtgtctgggtcagaccgagagcggcgggagccgggacagtgggtgtctatatcatgtgtgataacaacggtcacgatggctttcctgtcggcaaggatggcgtttcctcgcaggaatcgtatgctgttcatgctacgggggaccaattgcgcgtggctgaccatctttatgtcttacaacccgtcacggctttagtttgggtgttatctcccattaaacatctgcttgatttcactatcagtggcttgtctcatgttgggacagcggtgactggtcgcattaatgacgcgattgataacgtgttgtttgaaagtggtaatccggatggcaccgggcgcattctgctctccgaactgcaatatgccatagctgacgtaccgggcacggcaggctttgtgatcacctcaccgactgacaatattacactgccggtgggacatttgcccttgcgcgggaaggtgacttacacatgaaacaatacagcgtggcagcgtataccgccgcccttaatggcttattgcctaccggaatggcgtggacccgaacaccggattcggtgatgagtgcggtggtacgggcgattgcccggagttatcaccgcagtgatcaggatacgcatttgttactggaaggcagttttccgaccaccgcaaccatcatgctgccggagtgggagaagtctttaggcttaccggatgactgtgcgattggggaaattgacagtatttccctgcggcaaaaagcggtggtgtcgaagttattgcgcaccggtgggcagtcaaaatcctactttatcggtctggcggcagagctgggttttcgtatcactattacggaattccgacaggccagggcaggcatatcagcctgtggtgctgcgctgaatggcggtgactggccgtttgtctggcggattctttagagggcactg

SEQ ID NO: 190 - DNA, 8883 bp, Xenorhabdus sp.; identical to SEQ ID NO: 189
  CDS (5550)..(6620)

SEQ ID NO: 191 - DNA, 8883 bp, Xenorhabdus sp.; identical to SEQ ID NO: 189
  CDS (7286)..(8425)

SEQ ID NO: 192 - DNA, 8883 bp, Xenorhabdus sp.; identical to SEQ ID NO: 189
  CDS (8434)..(8874)

SEQ ID NO: 193 - DNA, 8883 bp, Xenorhabdus sp.
  CDS (6952)..(7080)
cagtgccctctaaagaatccgccagacaaacggccagtcaccgccattcagcgcagcaccacaggctgatatgcctgccctggcctgtcggaattccgtaatagtgatacgaaaacccagctctgccgccagaccgataaagtaggattttgactgcccaccggtgcgcaataacttcgacaccaccgctttttgccgcagggaaatactgtcaatttccccaatcgcacagtcatccggtaagcctaaagacttctcccactccggcagcatgatggttgcggtggtcggaaaactgccttccagtaacaaatgcgtatcctgatcactgcggtgataactccgggcaatcgcccgtaccaccgcactcatcaccgaatccggtgttcgggtccacgccattccggtaggcaataagccattaagggcggcggtatacgctgccacgctgtattgtttcatgtgtaagtcaccttcccgcgcaagggcaaatgtcccaccggcagtgtaatattgtcagtcggtgaggtgatcacaaagcctgccgtgcccggtacgtcagctatggcatattgcagttcggagagcagaatgcgcccggtgccatccggattaccactttcaaacaacacgttatcaatcgcgtcattaatgcgaccagtcaccgctgtcccaacatgagacaagccactgatagtgaaatcaagcagatgtttaatgggagataacacccaaactaaagccgtgacgggttgtaagacataaagatggtcagccacgcgcaattggtcccccgtagcatgaacagcatacgattcctgcgaggaaacgccatccttgccgacaggaaagccatcgtgaccgttgttatcacacatgatatagacacccactgtcccggctcccgccgctctcggtctgacccagacacgggtaacgcccggcacggacagcgcccactgcttgtagtcatcatcagagccaccctgtggtgtaccctgataggccaacaacatacgggagcgaaaatcggcctcactttcaatatttgccccaccggtaatcggcactatcgccgtcccttccacatcaacacccgccagactctggtccaatgttaatatcgtgcctgccggggcgttccctgccgcaccaccgcctgaatcatcttcggtactctctggtagtatagccatcagccgaacagcgcttctcccgtactcattaatccgggtttctgtcacggtctggtactgataaccgtctccccggttcagccttgtatgcgcgggaatcaccgtccctgccacgccggtgaactgataatggtcacactgagcagcagtggctggtttgcggaagattttctttaacgccgcccagcctgccagccattcatcggtggccgtaaacggggtggtttgccgggccatgtaatcaagataaccgtaatgcagatgcgccatccctgcatccatatctgccagtacgcccatattggaaaagcgcagtaacggaccggtttcctgtaattctgactgtaaataactgcggttctgtgcccgaagttcggtcagggtctttcgtttaaacggcattgtctcgctcccatatccccacgcccggctaaccagtcagcgtggatgtttttcacattccaccatgaagtgatatcactcatttgaccgtctcccccgttatctggctctgcaccgtggagtcgcctgctctcacccccgagacaggatgcgtatgtcgattatagctctcccgtaattgtttcatcgtggtggtattggtgttgcagttatcaatcacattaccggtgactttgagcacaggcgtattcagcagcacttcagtggaggcgttcacagtgactttagatgcgttgttaactgtcactggctgtcctttcgcttcaacggttatttccgattctgtcagcaaaatatgcaacccccactggttatacaccaccacttcgccggggtttaatccctgatgccggtactgttgatggttgctgccaatcaccactgcattggagcggtcaccgcctaaaaatgccagtaccacatcggtattcgccggtaacccggaggaaaaaccaaactctgctatccggtgggtattatcccggacttccatttcagtctgatactgaatttgctggataacccctttatcattacaggtggtgacccgacctaaaccgagcatcatcatcgcccggcgatataaattcttaacgtccatcacgtcagtaacctccgttgcgcagttccatcagagtggaataaaattcatacggctggacagtaaaggcagccggcggcatcagggtcagttcggcccgggtgccatcgtctttattacgcacataagacacttcagataacagccattgttcggattccaatccaaagaccggcaagtggatcggtatcagggtattgggtgtccacaacgtcccgctgacatcgcgccaactgtcgaccagcaccttgagcacctttgaacggccataacgacggttcatttcccagtcaatggcctcctgttgtcgctggtgtgagtacaatgtgctttcgatgatggtgacgtaattacggtaacgcatcttttcggcttccgggtcttgggcactggcgatttcaaccgcctgatacccttgcccggacgagagttcactgagtccgctgacattcatggacagcccaatgtattcggagaaccgctcgttcatagaagactgataatccgcctgttcgatgtttttcccctgcgccaccccactggcagcgactttatcgctgacacgggtcagaaataaattcccgtccggcgtatcgtaatagagcaaagcagaccagcgggtgatgcggtcgataatctcctgtgaggattcgccccagttcagggtaaattgcggtagcggctccatgtccgccacatcggaagtcacatcaatgccgtaccactgcgccagtttctgggcaatctgcaatgctgtcgcccggctgatcacgttctgcggccatttagctgaacaatccactaaatcctgacatttactgcgaccggtcacccgtatctggtgggtacttttgttaatagaggagttccagatatcgatataacccgttatcaccgggtcattacccagcagcacctgacagggttgtccggcctcgacctgttgtttttcatcactgccggggtaatagtccatcagcatcagttcaaaatcagacggtaaccgttcaatgccccgcgtcacgcgcacgctgtcccagccataaatcgccttgccgccaattaccagcgacagttcatcctattttttcattgtctgagtgccttaaatcgggtgggcataaaagccgggtgacggggatccgtggcctgtatcagttcatcactgcgcccggcgtcctgataaatccggttcgccaccgtcagggccggcaggacagtcggcagactaaactgggctaaccgtcctgactccgcaccttttaactcggcactggtcataaattcatgccgcaaggccatcagggactgatacacctcatccacacccaaatcacccgccatcaccagcgccgtatccagtgcctgacagacccgcgtttgtaaatcatgggcttcctgattgctggacggcgtaaagtcactggcaacctgcgccatcgcccccgctgacaggacaaccaacagcaacacggtcattgccgtgatatggcggtcaaccgctccttgctgatagcgggtgttctgaaatgcagccaatgcctcgaaaattgccactttttcatccacgctaccggaagaatcaataatcgcgatcacgacctgcccggcggcctcgctgaaggtttccacggtgtgggcagcgtttaatgtatccagcctgtcggtaatggttttgcggctcatcaccaccgccgccgtggtttttctgatgatgtccgcttcattatgctgccggtcatcccgtgaccgcagaccggtagccccggaaacggtgccgccaattttcccgcgttgatagcgcccgtagcgctcactaccgaaggtggttttcagcatatcactgaggttggtcacttcatccattgaacgggtcaccataccgatccactggttcgcggtttgtttaataatccgtatgccctgcgtcaccgagcgaatttcacctctgaccatcgcgatatatttcgccagcgtggtggtataggtttgtaaccagtgctttttcacctcagtggcggatttggtgctgttggtgactgcaaagactttcagccccgattcaatcacggtgagtgtgaactcaaatacccggccaaactccttgctctcattcatgcgcaggccactttcggtcacactgactgtcagttcccccagtgtcggatggactaaggtgcccgttgaaccggtttcacaggcggcgaccagattcttacgctgggtgatcacatccggcgcgtgatacaccgcactgttctgaatgataaaaccgcgcaacgcaatccgccgggtggcccggcctaaatcctccagccacgccgtatcacggtacgggtattcatgcaccgcctgacggcgaccgaagacgctttccccggacacgacggcaaaaggcacgccccggaatgaagccgggtgcaaatgctccgcccattgccatgacgcatcactgccaccccccagcagggaagaaaccctgtcatgacgtaactagccatcgagagttacccaaaatactcgcaataccctacattactttaatttatgggtgttcagaaatacccaaaattgtgagaatgataaaactttaaattagattattaacgcgattgagataaaatcgaatccctgcttgagcaactactcaacaaaaaagccccgtagggggctgttttgatttaactttttgttttttctattttttccacaagacacataataggggttttgtgatgtatcgtgtgcgcatggtatatattgcatgttactgacactttctttcctattagtttttcaaagatattccattgttcttttttagtcatagccaattgcatcacggcaacaccatgctcaaaaggctctgtttcatcgtaaacaccatcactaggtgaaacagaaataagatgatccaatcttaatgacggaaagccctccgattcactatttaaagtgcctttaaattttgctgacgtattgtaaaaataagtgctgttgactttttcaccttcttctctggtggctgcaattcgatggtatatttcagatgattgtctgtaccaatcttgaaggcatttgaccgtatcgcaatttttctcacgtagattccagttttgtctgactaatgctttaaaaccgtcactattacctgtagctatttttgcgtgcgtataagcgacaagtagggcatcatcagcctgagacaggatcggtgtggcgcaaatcagcttctcagtcttgcttgttgcctttgcgcaatcgaaactggcagaactagccacagttgataccagaaacaagaaagcagctattttctttagcacttatctccctccgacagaaaatttcaatgtgagttatcatattaataatataataaaagtaacattttgaacaaaaaataatcacatcaaggttgctgcatggaagttgtcacttttcccccaagctttgactgaaatctttgccgttctcccgtcttatcattaactaaaatgacctccagcttaagtggtaaatcaccaaaagcatctcgcactgctttcgccatgccttctgccatttcaacccccaactttgtgggttcatagtcttttttattgtacaaagacggtatttttttatcaggaggctgagatttctgtgtttgcacgtttttatcatttactccgtctattccgtcagtgataacattattagggccatattgagcgcgctgtttcttgagtctttgaggatttcgcaaccccgaccaacgggcatcatgaatagcggcattaatcccagcttgcatctgctcatcactgtaggggtttatattattattttcatgttgaatcatcccaaccatgacatttttcaatatatcaggattgtgtaaatcaagaggttgatcaggtgaataccctgtacgctgagaaacggaatcgatataagcgggagtattattacgaccttcaggtggggcatatcgatataatagcgatgtaatcgtattcagtcctcgctctgcatccaacatgatttgacgccccattgcagagataccatcctgtgcggtaccaaacttcacataccggtgaccattaccgaaatcctcccctacggcattcggagccgcgattaaattcccgggattattattccggatacctcttggctgtttatcagacttattcaccctattaggatcattaggtatttgataaatatcctgataatgtttttgattgtcaggcaaagtgggagattgcggtttttcagccccctttttttcatgccatttttggtatttatccttgtatccgtccgtcatcagaccaaaatccagcatcgttttttcatacgtactgagcgtcttataaaattccggcgtgttataaccccatcgcaactggtctgactcattgcctcttgtcgcccccaaggcgcgcatgattgcaaagttgtctggaccataagtcaatatgtcactgacgcccttaagaccatcgttaaccgtaccatccgaagttaaaaagtttgccgtcgcattactggcgcgggttttaaatccctcccatgaggcattaagttcatttaccgtgccatttaaatcggtgagttgctgatttaacccattagggaccgttaatcccaatttatcggacttggttagtaactgcttgtatttcgccccttcacgcaataacgctatcggaacgtttgtaccgcgaacagggcgttgatacaaaaacattactcggtcataaaagccagtcaatgactgataaataccatgatgatagaggtaaagattggattattttggcagtgaaatagcggtcaatttataaccagttttgcagaagagttttgcaggagttttgcagaagaattttcataccgttaaaaacaacgggaactattaagcccccgttatttattttaaaaagtgattattacatatgagaaataatagcatcaccaaattcgctacatttcagcagcttagcgtcttccatcaggcgctcaaaatcgtatgtgacagtcttggcagcaatcgaaccttccatacctttaacgattaggtcagcagcttcgaaccatcccatgtggcgcagcatcatttcagcggagaggatgactgaacctgggtttactttatcctgaccggcatacttaggtgctgtaccgtgtgttgcttcaaacagggcacactcatcaccaatgtttgcacccggggcaataccaataccacccacttgtgctgccagcgcatcagaaatgtaatcaccattcaggttcatacaagcaataacatcatattcagccggacgcagcagaatttgttgcaggaatgcatcggcaattacatctttgatgatgatatctttgccggttttaggattcttaattttcacccatggaccgccatccagcagttcaccaccaaattctgtacgcgctaattcataaccccagtctttaaaggcaccttcagtaaacttcatgatgttgcctttatgaaccagagtcactgattcacggtcgttatcaattgcatattcaatcgcagaacgtaccagacgcttagtaccttcttccgagcatggttttacaccaataccacactgctgagggaaacggattttagaaacgcccatttcatcctgcaggaatttaatcactttatcagcttccgcagacccggctttccactcaatacctgcataaatatcttccgcgttttcacggaaaatcaccatatcagttaattcagggtgttttacagggcttggagttccttgataatagcgaaccggacgcaggcagacatataaatccagctgttggcgcagtgccacattcaaagaacggatgccgccaccaacaggcgttgtcagaggacctttaatagcaacccgatattcacggatcaaatcaagtgtttcttccggcagccagacatctttaccgtaaacctgtgtagatttttcacccgtataaatctccatccaggaaattttgcgctcaccgctatatgctttctgaaccgcagcatcaacaactttcagcatgaccggcgttacatcaacaccaataccatccccttcgatataagggattaccgggttattcggaacgtttaatttacctttggtatcaatagtaatttttttaccttccgccggaacaactactttgctttccattaacctctcctttcaagtaagcgcaatgccttgttaattttttgtaagggacgtgtcaatattacttgaatattctgcaaacgccaatggcgcagatttcaggtataatattgcccttcactttgtgcaataacttatcatgacaaatttctcttttaaaaaacgtaaacttaatcgattcagtcaaagaaaaaataccaatgccacaaaaagaatagcgggcccgcgtcgggtgttgatatttaataagccttacgatgttctgccccagttcactgacgaaatgggaagaacaaccttaaagaattttattccttttagtgatgtttatgccgcaggacggctggatagggatagtgaagggttactggttctgactaatgatggaaagttgcaagccaaattaacgcagcccaacgagaattta

SEQ ID NO: 194 - DNA, 9731 bp, Xenorhabdus sp.
  CDS (5622)..(6821)
tgctcatccatgtgctctaaaatctatagaagtccaaagcgtgaacaaacatatctctatcttacaaaaaaaggagatttttcctctgttcctgaagagttattgaaagcttttggcgagccgcaattttctatgatgatttcgttatcagaaagaaaaaaattagctaatgcggatattgaaaaagtaaaagcggcattgagtgagcagggtttttacttgcaggttccccctcccgttgaaagtttaatcaatgaacatctggcagcagccaaatcatgaaaaaattcgtcatccgaagagccacggatagtggcttgatcctgaattaagagggtgatttatgaaattaatcatcaaggtacctttattattgagtgtaatactgctggctgggtgtatttcacccgataaaaaaatacagcaggattcagggttgacggttttatctcaagtggatgttaaggtactggaacagcagtttccacgcgcttcacgtgaatcatcgcagtttcctgcttatgtggctttaatcaggcagcaggcgcggcaacaggggatcagtgaggagaccttaaaacgggcatttgctgatatacactttattccacgggtcattaaatcggatcgtaatcagccagagaagaaagcgacgctggatgagtatctgaaacgtgttttgccggactggaaaataaaacagggtgttgaacaatatcagaataattccctgcaattagaaagggtcggccgtaaatatggtatccctgaatcttatattgtcgccttatgggggctggagagcgggtttggccgtattcagggtaaggaagatgtcatatccgcattgtctacgcttgcttttgaagggcggcgggaagacttctttatcaaacagcttctggccgctcttgagattatggagaaaaaatacattggcgcagaccagactctgaaaggttcttgggctggagcgatggggcaaagccagtttatgccgacttcgtatctgacttatgccgcagatggtaatggtgacggaaagatcgatatctggaacaacaaagaagatgtttttgcttccaccgctaattacctgcataaagaaggatggcaaaaagggctaccgtggggttttgccgtttcattgccggctaattttgataaagcgctggaaggcgttaaggtggagcagggtaaatcgatttcacaatggcagtcattgggtgttttttctcctgaatttgcacaattacccgctaaaaccaacggttggattataatcactgatggggtcgaaccgcaggcgttttgggtgacgcaaaatttccgtactattatgcactggaatcgttcttactattttgccctcagtgttggtatgatggctgacggtatcgaacagagaatgcgtcatctcactcattaaatatcagagcctgagtaatcaggctgatgacagtttaaggaagagtactatgtaccagcatagagactggcagggggcactgctggattttcctgctaataaagttgtttgcgttggcagtaactacgctaagcatattaaagagatgggttccagtatcactgatgagccggtgatatttattaaacccgaaactgcgctttgtgatttgcgccaacccatatctattccggaaaaactgggggcagtgcaccatgaagtagaactggcggttttaattggttcgacactcaaaaatgccaatgaggaacgggtcagtaacgccattgctggttttgccgttgctttagatttgacactgcgcgatttacagcgtgaatttaaacaatcaggccagccgtgggagaagagtaaagcatttgatggttcatgcccgatctcaggttttattccggttaatgtctttgaagatccacagaacgtccatctttctctgacagtaaatggcgaattacgtcaaaacggcaatacgagtgacatgcgaacgccaatcatccctttgattagctacatgtcacaattttttaccctgcgccccggtgacattattctgaccggaacacctgagggagtaggggctttaaaatctggtgatgttctgaacgtctctcttaatgaacacgttttaacgaccagagtgatttaatgatgaggaatggcagcaattatgtctcaacctttctggcagatgaaaaccttggagcaaatgaccgatcaggagtgggaagctctgtgtgatggttgtggtcagtgctgtctgcacaagttgatggatgaagacactgatgaaatttatttcaccaatgtcgcctgtaatcaactgaatatcaaaacctgccaatgcagaaattatgaagatcgtttcagttatgaacctgactgtataaaactgactcgtgaaaacatggtgacttttgagtggctacccacaacctgtgcttatcgtctgattgacgaaggaaaaggccttttgccgtggcatccgctagtcagcggttcaaaatcagccatgcacgcagaacgtatttctgtcaggcatattgctgtgcgtgaggttgatgtagtggactgggaagaccatatcttgaataagcctgagtaggcattttacttattgatataaaagggaatttatatcatagagtagatgcttggggtattccacgtagctccagatgatcccatagaatagcaatcaccgccttttccgtttatggctgtttgtcgaggaacaaaaacgaatgtgcattcatcagtacggactcgtccaagtgttttaaataatgggaggagcgtttgccataattctttaaattcggtaggggattactacatccaaaatctgccatattaattccggttatttatttggttgacgtattttataaatagagttttgggttttgatatatccatcagttttataagttttggcgttcatcactaatgaagtgattatttcagtactgtcagaaaattattggttgctgttattgaatatctttccgaatgctactgctttttcttcgttatttttatagaagtcagttaattctatttcgtcagtatatttttgtgataatttacttgaaaaatcagcggatgaggattcttctttaaattcattttttatttctgatctcctgatttattactttactgtattaggcgtacaaaatttgatgatttaaaaaaatacattaggagtagtatttaaaaaccatttctaaaaaatagaggtgatatatggtatgggtagttgatgacgaacgtgccgaatgggtacaaataccacgtgctgccgaaaataaatatgatgaatgggtgagaattatagtagaaaataatagatctccaagtgatgctgcacgtgatataggagactccaattttaaaatgttgagcggtgcaaccgaactatataccatcagacttagtcagaggcacagagttttatttacaatagacagtgtcaatgaagtagttagggttcaccaggtgggtgggcatacttagcaatgttggctacctaataaaaaccgactgtcgggtcatttaaataggtgacccgctatcaggaattattggttactcaggaaatgcattgcaacctctgagcaaatgattctggggtgcaggagtattttagggcgcagtgtgggtgaattggaaagagtaaaaaggaggttggaacacttccaccttccctcagttttatgatgaacaagttcctcccggatacaatgtgcatacaagttgacagtctctatattctgggctgcccggagcgtataaatctgaacaaatattggcataagtctgcattgaggctaaaagagtcgagccagccactaggcaaagaagaacgtattttctcaaaggtatactccatattggttacatcattactatcgaaaaaactggtaaatctaataaacccatcacactgcaacaacaagcgaataattcttaacaattagttacctgttgaaactaaagtcaatatttcttcacccattccctgagtagttaaaggaatatccaagccatcacatcccgtggtcttatatctgaatttcaccatgcattagcacgcgcaccctgtggttaaggccgtacatgctaatggcggagtgatttttgcgcaattatttcatcagggtgctgatgattcagggcggcttgacccgtcactggcctggagcccgtcgggattttctgccgcacatggctcatatggcaaagccatgacgctggacgacattgatgagattattgcttcttttgcggaaacggccagttttgcccagtcagtaggatttgacggtgtagaaattcatggcgcacacggctatttaatcgatcagttcctttgggcaaatacgaaccgccgcgaagatgtatggggcgggtctatccgcaatcgtgcgcaatttgcggcgcagataattgccgcggtgcgcagagttaccggccgctcgttcccgatctctttcttgttttcgcaatggaaaatgggtgccaataatgcggctattgcaaccagtccgcaggacttagaaatcttgcttgatccgattgttcaggctggtgtaaccatattgcatgcttcggatggctatttcgaccaacctgcttttcggaattcagatcgtagtttagctgtatgggtcaaagaattgacagaacttcctaccattgcaggtggtccgatcgatttgtcattatcagggtggccatcttacagtactgacttagaggtgctgatacggcagttagataaccagcaaattgacttagtggctgtcgggcggcaattgttctctgaaccaaactgggtttcagaactacagaggatgtcacaataaccgccataaatatctccggtgcttaaattgccattaatgccaaatttcttctcgtttttctcacttttatcagagaagaaaaactgatagtttgactatttggcagtcaagacaaggaaagagaaatggcaagttatttaattcgagtggaactgtatggtacggggtctgcgggatatgaaaagctacataaaagaatggtaggcaatcagttcagtcgctctatacgtttccccgatggaaagtggcatcgccttccaagtggaacgtatattggtaattcttcattaggctctcttcagctggcagaaaaaatcaaatctattgctaagtcttattcaagcaaagacccttccatatttgtctgtacttacagtaactggagcgctgcgctgtatattgataaggaacatccagaaaactgattaatccagtaaataaaaaatgacagtctgaaaaataaactgatgtaagtgaattttcttatatttcaaattaataaaccagtaacaaagaataaaatagcttccgattcattgaacaaatatatagggatacattggtaaagtcataccatgttgtattactttatgtttttgtgtttgcgtgaggttttattattttattataaatcatgtgagataataaaaaattacactgtctattgttccagtgtttattgacgttttcccattcttgcagcacactatgtataaatatttgtataaatatcttaggtgatcatggctaacgaactaaacaagctcagtgacaaaaaacttaaggttttacttggcagaaagaacgacaagatagagttttttgccgatggagcgggattgagtgcaaaaacatctaaagtaggtggcattagttgggtctttacatatcggcttgatggtaagaagctaaaccgccttaccattggtcgctatcctgatatgagtctcaaacaggctcgtgaaacgcgggacaaatgccgtaactggctggcttctggtaaagatccaaagctacagtttggtttggacatgcaggaatcattaaaaccagtcactgtaaaagatgctatcgaatattggatagaaaactatgggaaagacaaccgcgtaggtattgataaacatatagctcaactaaataagtatatttatcctaatattgggaatatggcattatcagactgtgaaacacgctattggcttcaatgttttgataatataaaaaagaaatctcccgtttcttctggaattatattccaattatgcaaacaagccttaaggttctgccgtgtaaggaaatttgctattagtaacgctttggatgatttaaccattccagatgtaggtaaagtgcaaaataaaatcgatcggtttttaagcgatggtgagttgggtcaattatggaaatccataaataccaatacttacattccttattacagtaacttattaatagtcttgattgtgtttggctgtagaactcaagaggttagattatcgaaatgttcggaatgggattttaattccatgttatggactgttccaaaggaacatagtaagtctggtggtaaaataattcgcccaataccagcatgtatgaaacaatttttagaagaacttatctaccaaaaccataaaagcagttattttcttggtgaattaaaatacggtgcaacagtagcgaaatatggggctaatatatggaaaaaattaggccatacggaaaaatggacattacatgacttaaggcgcaccttagcaactaaactaaatgatatgggcgtagcgcctcatgtagttgaacaactgttaggccatgcactgccgggcattatggcgatatacaacaagagccaatatttaacagagaaactggacgctttaaaccagtggtgtgaacaactggatgtattggcgggtaattatgaaaacgtggttatattaaagactgggcagaaatgagaattaataaaaaaagcgatttaccaaaatggtttgagattgaaaaatacaataaaataaaagcattacctgatgatgaaattgcttatttaatatgctgtagatgcaatgacttacttacaggaagatataacaaggagggatatttcgataatgatttatattgtggtgagttttattctgatcgggatgcaatgacaataaaacaatctgatagtaatttaaatatcagctcatcatcatctattactcctatttctatcggtaatttaagtgtattcatagatgactttcgtgatattaatgttcatatcaaaaatgaaagtgtaaaaaacaatcatctgtctgcatatgaaattcacggaatgagcataacatcttggaatggtgttatttgtggtataaatttaatgactcatcaagatgagacaattattgaagatttacgagtgttattaaaaaaatggcgaaaggaattagacctcgaagaaactctgtcattaattaataattcttggggagttattaaaactaaaataattaattacaatattttcgctttcttcgacttgcagttatggcaacttgctacaggaaactcaataaccagtggagtgctatctgtgacactatacccagaaggggaatatgattctattcagatcgctcaaaccatcaaaccattttcagagaaattatttacttatgaaactttagaaaaaatagagcgagaaatttctaataaataattgaatgataaatttataagattaaattattttttcctttctgatgataggcttactttaagcgtagaaaataccctcacaaaaacaacgaaacagtgagggtaacatgaccattcaatatacaactcctacgccagaagaacgtcgctctatcctttccgagtatggcgaaccttatgatcgtcttgtgcgtgaaaaggaacgccagcacatcacttctatttccagaacatcagcatggaaactggaaaacgaagggcgcttcccagcccgtaagccgttaggccgcaattcctgtgcttggttgctcagtgatctgggggagtgtgggtacgtaatccgccaacagtacaaaacgtaaataacccctataaccgaaaatcaaattaattaagacagggtaaatatgacatctaaaaatatggccttaaatggtcagggacttgctcacgctgaaaacagccagaatgatattttaaatatccgcaaagcggttatttccggtgactggtcatcgattaacaaaggtatttgtacactgactgatttagggctgcgtcataacggtcaggggttagtttggctcaattcaggtgtatcggttcatgatgcagaaggtgatacagggttgacaggcaaggctaaaacatcatttgattatcatacggcgttatgtccaagtaatgctttggaaaataacactttttatcgtggtgtccaccctcataaagtggatagttattgtctgttaatcctgtcagagtctgattcatgggttgaatactggcatcgaaaagacggtaaggcgttaacgacttttgcagtacaggtgctcactaatgaaaggcaggaggcttttgataattgggttatctatcgtcaccctgtacaaccggataaatataccgttatcaatgcggaaaaagataaggcgttggtgcaagaatatattcgccacggctggttatgcgaatcaactcatgaactttccttgctggtgaaaagcaatattgagtttggtcgcttaatgactcgattgggttatatcaaaatccgaaccgccaagatcacaggacacaaagaaacgttctgggtttatcgctccgctgagaaagggttaagcaccagagaaaaacagcctcaaattgataccagctatacccgtgtgatagcacgtgtttctcatggaaaacagtcgttatgtccgaataattcattgaaaaataatggatttattccatttgtccagtgcggtaaacgaccaattagaacctttgagcgcattgctgtagacggtcagtggctctacgtctatgccgatcacattcgctttctaacaaagaaacgtcaccgtgttgagggtgttcgggttcagggttacacggcaaacggaatagagctgcgagaggtggtgtaatgatcactatgtctggtgactccttgaggttaaggagtcctattaccgtagtcctcagtttgggaggctatccgataatttcggggtggttacttaactcattgatatctaatcaagctgcaaatatgcagtctgcttgtaatttgagcatctcattgcgtagagcacaaaaagaaaaggatagcacggcgaatgctaccctttggcgaaaaccaaatttggtttacgaggaattacaacagtttaaaaacctcatatctttaagaggtttggttggttattgctcaatgccgcgagattgtaactcatcttgtgaaggtgtcaccattttgatcatgcctgataccttcccatctacggcaactataacgatttccgtgatagttgatttgagctcagtgaacagtattcacttggttagttattgctcagatgatgctttggttttgcgcttcattggcttaagttttttctcacaggcatcaatgacccatgatgaaaaattaacattgggattatttgctttttcaatttcaacgcttgcatttatcccatcaatcagttcatggggaaaacggatattctttttatccgatttattgtttttgttacctgtagccacgatttacaacctctgtcacattatttgtgtacatacaccttactataaaaaattaacaaataaaagtgttgacatgtgcgcacaccttaaaataaagtgggtgtacaccttgagagaggtct

SEQ ID NO: 195 - DNA, 6002 bp, Xenorhabdus sp.
  CDS (4550)..(5440)
ttttcctggctaatacggcgttcaaactaggtgggaattaccagccggattactggacaatccagtcaatagatgaccggctggcctatatggtgccgacagcgaagaaaatgtattcggttttcctgccggaaaccgcattcagcgtcacgctctcagcggaggcgtttggtctggcggtgacgtcggtactgttaacccgtatcgctgtgctggatgaatccggtgcgactgctttccgcttcagtgccctgcgggaatatgcgcaacaccatccggaagccgggcttatcaactcagcattttcgctgaagtttgaggaagacattgtctgtccgtcatttatacatacccaacataataacaatccacaataacgttatcagccgatgaggttgttaacccttttctttagcgcctgaccggggagccgacaacaccttcctgttaccgggcgggtgttgtcttttattgacctcaaatcaaggagagccacaccatgaacccgatttttttacctgcgccggagagcacgacaccggcgtcgcaggaagctatttttaccgtacaggtcaccggcctgatacagcatccccaacgacctcaatcgctgcgggaggaaactctgaccgtgcgtgagaccgactccatcactgaagcggtacagcggttgaaagtgatccatcttttgggtgactggccggtatcggaaatgccctcagctcagtgccggcgggctttttttccactcacggtgatgatttatgacgcccaagataacaaggtgctcggtagccgcttttatgacgagattgtctgggcacagccggtcaccgtgacatcagagcgtttatcactggtgcagaaacaacagcgcttgtgtcagtcggccacgtttgagctgagctggcagaataccggggcggcgcgtgtcctgtggcatgaggcgaatttactctccctgcatgtggtatcgccgcgttatcagcatcatcatgaagtgcaggatattctccggcacagcacaaccctcagcgtgtaaaggtggggtatcaccccggaacctttacgtttaacggtctggcagatgattgccgccgcgcggctgaaacgccattctggcctgagcctgaacgatacggtgaccgaacttatcgctcacggtgtcagaccatccgaagccattaatgactgagtggataaatacgatttaacccgattggacgcgtcggcaatgacgcccggtacaccgtatccggggggtgcatgatgaactgacggtcattttcgacagtcaggttgccggtatcttcagacgggatttcaactgacacttttcttcaatcacccatcgggggaactgactcccgtgggggaacagtttctccggtttttaaacttaaaaatcaaaggaacttaaccatggcagaatgggtcactaatcaactggaagttacgggcaaatctgtgtgtctcgatgtgatgcagcaatgggtctgcggagaagaagtcccccgttaccgtcaggcggtattacagggcctgcgcctgtttctggccggctgtgcggggatattaaaacccaccaagcccctcacttacacaccgtatccggaactggtgcggggtacggcagcaccgaccgcgcagaatctggcgtttgagcaatggttggtgttgttacaggacaatgtgccgttaaacagcgacaacattaaacgtatcgataacctgtaccgtcagtcgggtctcagcctgctgcgctgggagcatgtcccggtgccggcgcgtgacatcattgcccgcctgctgacccgccagtataccgactggtttggcatggtgagctggtctgagacgccggatatcagcgtgtgctgggataaacttaatacgtacccggcaacggcacaaccctgcgatatgttgatgatgatgccgacccggctggcctatgagattaacggcaacagtggcttgctgaaaggcatcgccagtaccgtgcagttttacggcgagcaatacggtctggagtggccgttcggtcatcatgtccgctgggaacggcgccatgtcagcagtctgacggtgcggtttgataccccgtgggcagcgccatcagccgaactgatgggcgaactgtcatcagtgtttgactgtgaaatccgccactggtacagcgaaccctcaggcagcctcaaaggctatgactgctatgaccagggcgagcatgtggacagtcataacgggcaggtaggacacgaaaaccgtccggccctgtatctggttaacggagaaaaaaccgaaccggcactggcactacccgcgatggccgtcggccagtaactttttgttcaacacagtatccacttatcttgacttcaaccgaaaggggaaacacattctccttccggggggtgttttcctttttgactcttatcaggaaaacacgctatggcttctcgttctgactaccaaaaagactttatttcgctgtttaaacaaactgctcgttactgtaatcgttatcgggtttttcaggatttttgcaactgtgcgatggcggccattcataataaatactgtttcagtgaggaactggaacagttctatctgaaaaccatcaacaagtatgaacgggaagatattgaccggattgtggaacttttttcaactaccgtgctggcactggcggaagaccccggtgattttctcggcagtgtgtttatgcaactggagctaggcaataaagatcttcagcaattttttacgccctggagtgtggccagagtcatggcacaattgcagttgaatgaggtgtctgacttgttgcagacccgaccctttatcaccttccacgaaccttgctgtggagcggcctgtatgatgctggcagccgcagaggtattaagggagcagggacatgatccgttgtccagtatgtgggtatctgcgattgatatcgacccgctggcggcggtgatggcctatatccagctttccctgaccggtattccggcggcggtcacaattggtgatgctctgcatgatggtggcagccaacgaacccgctacacaccggctcattatctgggcaactggtcgcaacgtttgcaggcctatgatcaggcagcctgatttctgttttcccctctttgtttcacgactgcgcctttcggggcgcttttttacgtttaagggtaagtcatacaaataattttcattttcgcaaaaagagtttcgccttgtttccgagtgggattgaccgacactgagccaaatttgacaaggagaaaagtgatgtttacacgttttaaatcgcattttacccgctcgccggcattacagaaaaaatcatcagggcaaaaaacgagcggggcctgtgataacggggactatttccggccacaatcagtggaggcgttgctggcaacccccttgcgccatcagtgcctgcaacaattatggcaaaacagtacgctctctgaagggttgtaccagcgtttttatctcgccccgattaaacaattattgggcagtgttcagcagatacccgcggccccggaagggaagtggtcaggccgtggcggatttgctgacctgacactgcaatttaccacctgtgccgtgcggctggcgaaggggcatttactgccgcccggtgtggcaccggaaacgcaggcagcacagggtgtcttatggcaggcggtggtattctgggccgcgttgttttaccacctgccattgttgcggcaactcgaaggggaactggaagacgggcaggtctggcaaccggggatcggtattcccgacaaaccgtttcgtttccgtttccgcgccccggagaacataccgtcggctccgcaggaagtgttgctggccgtctgtctgttaccggaaaaagccatgatgtggctggtgacggtaccggaggtctggcactgtctgatgcagcatctcaatggccgtccttccagcgttccgctgatagataccttgcttcaggatgcggccggacaggttcaatccccgttgtgggtaaaacaggcggtttctccgtctccggtgaaagaggcggcggcgtcttccgaaggcaatccggtaccggaaacgatatccacgcctcctgtcagtgaaatcacaaccccatcgccctctgtgtctgacgatacgctgacattattgtcattatttcagtcaccaaatgcatcgtcaccacaaaatcagggaaaaaatcatcatcacggttcgaaactgaccaaacagccgggacgggagaaagaaagtattgccactgacagtcacccatattcatcatttaaaggtaaataatttaaagggttatttgtattttattgccgcaaattgtttttggacaggacacggcaggatgcaccgaggaaaaaataacatgttgaatacagcagaaacgctcagttgggaagagctattagaagagtactttttttcacatattctgcgaccggataccgaatggagttatcgcaaggtcatacggggttttatccggtttatgggagaagccgcatcaccggcacaggttattcaccgggatgtgctgcggtggcggcgccaccttctggtagagaaaaagcagtcaagtcatacctggaataataaggtggctcatctgcgggcgatttttaatttcgacatagagcgaaaactgctgcctcacaccgaaaatccgtttaacaacgccgtggctaaaaaagagaagaaaaagaagaagattttgagccaatcgcagataacccgcattaatctgctgatgggcaagtttgctgaggaagaaagcatcgagatgactccgcggggagggcggtgtgccctgtatccgacctggtattggtcaacagtgctggcgacattgcgttttacaggaatgcgtcagaaccagttactgcacctgcggctgcgggatattaatctggacagcaattatattgaactggggctggaaggcagtaaaaaccacagtgaatgggaaataccgatcattccgccgcttaaacgccggttgacaaaattagtggaaagggccatcgctgccggtgcgaaagcccacgatccgattttcgatctcagccggttgagtgtcccgcacccaagccggctttcccgttaccaatacgatatcaaccgggaaaaacaacagctccgttctttctttcgccggctgtccaaagagtgtgattttgcggtctcgcctcaccgttttcgtcatacgctggcgacgaccctgatgaaatcgccggatcgtaatctgccgctggtgaaacgcttactggggcaccgtaatgtggcgaccacgatggaatacattgatcttgatatggaagtgacgggcaaagcgctggaacgggaactggggttgtatactgattttgttgatgagcatgccgatgagaatgaataaaacggcgtaaaaaagacagggcaggtctcagacaggattgaggtggaggtgtgagtgaactgccctgcatcaatatcgatggtatgaaaaaatggctaattccgatcccctgtcacgtgaagttttcaccttacttgacatcagaatcaattactgaaatcattaccttaaacgagaaaagggtaactgttaaaacagctaccctgttatcttgtcttaaatgttcttttcaactaaacagtacaaattgagctgattaggatttaacatttaattaacgattgattcttttttgcgcttttgtcaggaaatttaacaacccagaacaaacccgcatggaaatttggtgccggaggcggaatcgaaaatcattataacttgttgaataatcaaagtctataaccttgccttccttttatgccccttttaatgcccctaagtttttttgcttgctttttattctatatctgactgatttttattatttataatactaattgtggacttttaaatcatcttaaagcaaaaaagccgtgagggttataaaatggtctaaattggg

SEQ ID NO: 196 - DNA, 9372 bp, Xenorhabdus sp.
  CDS (6927)..(7385)
gctcgttccatgtgctctaaagcttgtacacttgataaaatgcgaaattaacattatcttgttattacagttttatttaccccctatatattgtgtttctggacgtttcactgctactagttcccaactggctttcagtcttcttgggggcatcgtgctgtcaacggacaggaaaaacaattcaaggcgagatacgaaaaagaaggtgtatttcctcatgaaccagagtctgctagtaaccaagcgtgatgggcataaagaacaaattgatcttgataaaattcaccgggttgttgcctgggctgccgaagggctgaaaaatgtctcagtatcacaagtagagttgcgttcccagattcaattttatgacggtattaaaacatccgatatccatgaaaccatgattaaggcggctgctgacctgatttcaggtgatgccccggattaccagtatctggcagcgcgtttagccatttttaacctgcgcaaaaaggcctatggtcaatttgagccgccagcgttatatgaccacgttgtacgtatggtcgatttaggtaagtatgacaaacatttgctggaagactactccaaagaagaattcgagcaaatggacagttttattagccatctgcgtgatatggatttttcctacgcagctgttaaacagctcgaaggcaaatatctggtgcagaaccgtgttaccggtgaaatttatgaaagcgcccagttcttgtatgtactggtagctgcatgcttgttttccacctatccgaaggaaacacgtctggattatatccgccgtttttacgatgcggtttctacttttaaaatttcattgccaacgccgattatggcaggggttcgcactccaacccgtcagttcagctcctgtgttctgattgaatgtggtgacagccttgattctatcaatgcaacatccagtgcgattgtgaaatatgtatcccagcgtgcaggtattggggtgaatgcaggccgtatccgtgcattgggcagcccgatccgcggtggtgaggctttccatactggctgtattccattctacaagcacttccagacagcagtgaaatcctgctctcaggggggggttcgtggtggtgcggcgacattgttctacccaatgtggcatctggaagtagaaagcctgctggtgctgaaaaacaaccgtggtgttgaaggaaaccgtgttcgccatatggattatggtgtgcagatcaacaagctgatgtatgagcgtttgatcaaagggcaagacattactctgttcagcccgtccgatgtaccggggttatatgatgctttctttgctgatcaggatgaattcgaacgcctgtatacgcaatatgaaaatgacagcaatatccgtaaagagcgtatcaaggcagtagagctgttctctttgatgatgcaggaacgtgcttcaaccggccgtatttatattcagaacgttgaccactgtaatacacacagcccgtttgatccggctattgcgcctgttcgtcagtcgaatctgtgtctggaaattgctctgccgaccaaaccgctggataacattaccgatgaaaatggcgagatcgcattatgtacgctgtctgcgttcaaccttggagccattgagaacctgagtgagctggaagaactggcagatttggctgttcgcgcactggattccttactggattatcaggattatccgattgttgcggctaaacagggttcaatggggcgtcgtacactgggtattggtgtcattaactttgcttattatctggcgaaaaacggtgttcgttattctgatggcagtgcgaatggtttgacgcataaaacatttgaagccattcagtattatttgctgaaagcttccaataagctggctaaagagcagggagcatgtccgtggttcggtgaaacaacgtattcacggggcattctgccgattgatacctataaaaaatcactggatacattgaccagtgaaccattgcatatggactgggaagctctgcgtagcgatatcctgcaatatggtctgcgtaactcaactttatcagcgctgatgccatcggaaacttcttcacagatttccaatgcaacgaatggtattgaaccaccaagaggttacgtcagcattaaggcatcaaaagatggcattctgcgccaggttgtaccggaatatgatcgtctgaaaaggtcttatgaattgctgtggcaaatgccaagcattgacggttatctgcaattggtagggatcatgcagaaatttatcgatcagtctatttctgccaacactaactatgacccagcgcgtttccctaacggcaaagttccgatgaaccaattgctgaaagatttactgctcgcttacaaatatggcgtgaagactctgtattaccacaacacccgagatggtgcggaagatgctcaggatgatttggaagaagttgtcgaatctgctgattccgattgtgaaggcggcgcgtgtaaaatttaatctgaggaaactatgtcctatactactttttcgcaagtaaaaaatgatcagttacaggagccgatgtttttcggccaacctgtgaatgtagcgcgttatgatcaacagaagtaccctatttttgaaaagctgattgaaaaacagctctcgtttttctggcgtcctgaggaagttgatgtttcccgtgatcgcatcgattacaacgcgctgccggatcatgaaaaacatatttttattagtaatctgaaatatcagacgttgctggattctattcagggccgcagcccgaacgtagcgttcctgccgctgatttcaatcccggaattagaaacgtgggttgaaacatggtcgttttcagaaacaattcattcgcgttcttatacacatattatccgtaatatcgtgaatgatcctgctgttatatttgacgatattgttacaaatgagcagatcctgaaacgagcacaagatatttcaaagtattacgacgatctgattgaaatgaccaattactatcaccagttgggtgagggtacatataatgttgcgggtcaggaaatcacagtgagtttgcgcgcactgaaaaaacagctttatttatgcttgatgagtgttaatgcgctggaagcgattcgtttctatgtcagctttgcttgttcatttgcgtttgctgaacgtgaattgatggaaggcaatgcaaaaatcattaaattgatcgctcgtgatgaagccctgcatttaacaggcactcaacacatgctgaacctgctgcgctctggtcaggatgatcctgaaatggcagaaattgcacaagagtgtgaacagcagtgttatgacctgtttgtacaggcagctgaacaggaaaaagaatgggcagagtatctgtttaaagatggctcgatgattggcctgaataaagacattctgagtcaatatgttgaatatattactaatattcgcatgcaggctgtaggcttgaagctgccatttgaaattcgctcaaacccgattccttggatcaattcgtggttggtttctgacaatgttcaggtggctccacaggaagtcgaagtcagctcttatttggttggtcagattgattcggaagtcaatactgaggatctcagcggtttcgaactctgatatggctgattacaaagttaccctgcctttgaggcagggattatctgtctattactcttcccatcttcacagtaatttgttggaagctttagaacaaggcaaagtacagattgaatatcaatgtcgtgaaggatattgtggttcttgtcgtgttcgattgctaaaagggaaggtagggtatccttgtaagccattagcatttgttaatgagggcgagattttaccttgtagctgttatcccctttctgatattgaaattgagccttgattgatattgacggcaattttctttccggtagatagtaaataaggcaaagaaattgtaaatttttactgctgtccaatattaaaatcattattaatagtaagtatattagagatatgaatcgatatgcttactttttttctcgttgtttccctttcttttgcattgcttcttgttattaattcccttatctttataaatactattcaatccttactgaatattgacagtgccagaaagataattttagttaattcagtgattatagatattttatgagattttaatttattaggatttaattctctgctgtttttggcagagtgtttcatttaaaacaatttaacctataagataagtaaaaggtaaggagcatatctatgtataaaattgattataactcataccgttcaatcaaaagttttaatcgacgtccccgttttttagtgatgcattacactgcattaaatttcgaaaaatctattgaggcattgacgggtgagggagtcagtgcgcattatttagtgcctaaccctgatgacccaacatataaagcagctggatttgacagtattcgtatatttaatctggttgatgagcctgaaagagcctggcacgcgggaatgagtagttggtcagggcgaaataacctgaatgatacatctatcggcatagaaattattaatgaagccagtgataattgtggtgtcataacttttccaccctatcatccagagcaggttaatgcgatcaaggagttagtcattaatatactacagcgatacccggatattaccccgactcatgttatcgggcattctgatattgctgtgggtaggaaaagtgatccaggccctgcgttcccctggaaagagttgtatgaagcaggagtaggagcgtggtatgacgaagaggtaaaacaaaaatatattaaaaagtttaaccagtcttttcctgatagagccaatattctggagaaatttagccagtatggttatgatgtccctgacttgaatgataatgacggttttaaaaatttgattaaagcatttcaaatgcactttcgccagtcaaattatgatggaatttctgatatagaaaccatcgcaattatatatgctttagttgaaaagtattttcacaaagcctaggaaataatagaataattattcgtaatatgatttcatgaaattttcattaatgtcttatcttagagtttgtttgtattaaatacagtcccggcaaacgataagaacgaattacactctttatcttttaagctgtctctttgggactacacctcttcaaccggtcatcttatttataaaatatggtgaccagagatgtatcaaaatctcaccaaaaattagccattggctgagctgatttttcctttactgccagaatacaattctaatcttcactgaatataattccatttatatctttatcatataaattaaccaattgataatattggtaaattattaatatcgtgcctttttgaaactctatgccattattaatataaattataggtaatatctgttttaggtgaaatttattgttttaatcgtatatattgttattgttttaatcgtatatattgttatgcttttttgtttcctccttgctctttggtaaatgctaatctaatcttaatgttttctttatggatttttttaatccatggattatataaagtgttttatgctgaaaatatcttaaactgtgttgtggtagcaatagaataaattttctggagcatagacaaataactatgcgtttatggttaacgatagtcatcagaggtagggtgcagccagaaaacaaggcaacttaaaagacgacgagtatagaccattacgaagattgtcaggagtctatgatgggagtacggttagttgtgattgtcatgacggtaggggtagttacagccatatataataccgctgaagcaaaatcaccttatgatggcgaatatttatgcaaaataaataaggaattgaatgatgctactcttaagagtggcgggatgtattttttttctgcaaatcaggatacagctacagtttcctataagaatgcgagttttattattcatgaaataaaacctcaagaattcgtcagtcctaaattaacccttatcactaaatttggcatcttaaataaaaaagagctcttagagataggtgaaaatactttgatatatggtgggaaaggttatgggttggggtattttagaccgggtaaaaatgagttttttatttctaaaataaatatccctagcctaaaaagggcttatattctctctttagagtactgtgtcaaaaaacaatgagtaatactggagacaattttacctaaaaaaatcaggttattgagttaaattagcctatgttgttaatggatttttattataaaacgttacaaactactgagtaattcttcatgctgccgctcctcatagccattcatctgaatcttgcctttcaatctaatgtgatagctcacattgcgactagtacattttagagaatcagtcagactattttgagaattgaataataaaaagccagttttttattttaactggcttattttttcagcattggcatagttttttacatgaaacgttttgttgacagacgaataacaacacaatgtacattagagaagaaagactttacagatttcatgatggtttcctttcagagtttataaattgtgatttacttcacgaaaatctaaattctgagtggcattttatgcacaaacagaaaagagtcaaggtatttattaaattatttttttaaaatttaaaatatttttgcaacttaatgtaaccaattgaaattaaaattttaattggttagttgtgtaactataacctgttgatttatcaccatttgcactgtgacatatgcgtataactttttaatctgtctatactttatccaaaagaataagttttaacctgatagtgagttcaactattggagagcgcttatggaaatcagtgaaaatggtatcaatgcaataaaaagttatgagggcctgagactaaaagcttatccagaccctgcgacaggcgctgagccttggacaataggttatggacatacaaaaggagttgttcccggtcaggtgattaccagccaacaagcagaagcatttttacgtgaagatttaacccctatttatgccgtcttacagcgattcgttaaggtagctttaacacagggacaattcgatgcgttatgttcgttcatttttaatgtgggtattggtaattttcttcgttcaacgttactgaaaaaattgaatgagggtaattatcaaggtgctgcgcaggaatttctgaaatgggatcaggccaacgggcacgaattatccgcgttactggcccgtcgaaaatccgaacaaaaaatgtttctatcatgtgctggctctttcaccagcacataattaatgccccagataactattttatatcagcatcaatgacttgatagaaagcattggacgtatcagcgattgtccagacaccaaggattacgtggtagcctgagcgatcaggaacttcacagttaatattcacttcctgttctggccgtttcccatgatcttcctgtgaacagaaaggcgtaagatcgaattgtgcgcgagcaagaggtttattcggatcccagtcaggtttagttataaaaaactgccatgatgtcgtactgtgtcgggcagttaaatgccacttaaatgtattttgtcctttattaaccggaacgtgatgccaacgatctgcgctttgttcattgagctgtttgaattgtccaacacccgcactggctatctggccatcaggtggccctgcttcaggaaatcctttcgggccttcaacagattggggttcatacatgacaggcccacaatttttattgattccttttttacacaaaagcgctggtgcttggagggttttctatatagccatggcgattctgagactcagcattagcaaatagaggagtagagaataaagctgtcagtcctactaacaataatggctttttaatattcatgataaaagtcctattttccgtgcttgactgtaaaaatagtaaatttattaatgtgttatattaaatcactattataaaatatatgtgatttatacagtaatacatatgagtgtttataacaaaatcattaagttataaatacttaatttatattacaggtgtaatagaaggagagaatttctaaaagaaggtgggtatatataacaaagaaccctcccagaaaacagggagggttaaggaataataagaagcaaatgagggtgtgtgaaaacatactttgataataatatatgttacatgaatctagcatacaataaacagctaataaatagctctctctttttttataaatttgaatacaatacgtgtcataacctgtaatgataacatcgatctttaggtggttaatactttgattattaattgaattttctggatgatttttctcatgaaacggttattgcgttttttagttctatttttagtgctgcaataatctcatcaacagaaattccttgcactggcggtgaaatttctttctcgcaaaattcacgccaaataaaaaaagttagctcagctccatcagtaaggtgtgactctgatgatttcccaaaatcacctaatatccgataacgttcatcactccagaataaattcaatatccattgtgatacaggtataaaatgaaagtgaaatggtgtattgggtgtatgaccatatcttcctatatagatatattttggaaagataaatttttttaaggttttttcaatatatcccatcagaattcccatttcctgtatggctttgtttgataaatcacaaagattcatgtggttatgactggattgtagtatcacatagccaggaagggatgaatcaatcctatgattaacaatccaattatttgtttttagaattattttttcgtttgggattttcatgtcataaatttctcagtatttaaattttattaccgcataataagctaatttctatcaatttatatagattaaataaaatttgttgtcttaattattctattatgggtggaaaaattaaaatttaatatttttttatccactttattatttcattgttgaagaggattttattaataaggaaagtaacatgaaaaataaacaaataacgattgagcaggcaaaggaattcttttgtgatggaatgaccattatggttggcggatttatggcggttggcactccaccacatttagttacagcgttatttgatacaggggtaaaagatttgacccttattaccaatgataccgcgctcgttaatattggtctggggcctttgattgtcaatgggcgggtaaaaaaagtcattgcttctcatatcggaactatcgg

SEQ ID NO: 197 - DNA, 7655 bp, Xenorhabdus sp.
  CDS (6128)..(6865)
gaaagttttatatcaaatattgcatttttttttaatatgatatttcttcggtgctactgatcgatatttgttatcttcatctctcacccttaaatttaaagccattgctaccttcggcgtgggcgatgcaaccaccgcgaactccctatagaaactggacaagctgttctcgatatccgtgaaggcatcatcaacgaccgggcaaaactgatatatttgcaggattatgtgaatactgaatgtaggagagagaaatgattgaaagccaaatgcccacaacagttattgaataccgtgtacaaaccaatcaaccatcattctcacagtcattgtttaggctgtactgtctggcgttgcagttagagaaggtgatggatgaaatgcaagaaagagcgaaggttattcgggcaaataatacaccatcaccccagagcaaataattctggggtggcaggagtatgttagggctgaatgcgggagagagaaatgagcataaaatcagagttggcctatttgcaatctgccagaaatagagttttggatatattgagtgagactcctcctgaacatgtaatttcaatccttagttttgaaggtcagctcgatagactaaataagtccatagaaaaactaaaatgttcgcaggagtatgttaggacgcagtgtgggtgagaggacggtgggaataaaccgtcctcttagtattattgatgatgtccgtgtccgacacatattcctctaactggatctgcaaataccttgcatgactcctcgcaaattttccttgctttttcgtcatgaatataagcacaggcggcataagtttgcattgaggcggaaagtgttacgcctgccagcaagcaaagaagcaaatattttttcatttgactctccgtttataacgttattaacaaaaaatggataagcctaattatcttatctctactgaataatacgtgaactgcatttaacaattcgttaacgttcgaagttgagatcaatatttctttacccattccctgagtggttaaaggaatacagataactcatgctgccacttcgttctcaccgcgtaccctacgcatacgaactggtggcatttttatttcaactgtaaagattacctctatggttattttatgcgctggacaaacgcagtaaattcactgtatttcaatgaattacttggacataacgtactggacaaaacgacttaataccttgttttaactcttctattttgggtacacctcttcaggtgtatcgataccgatatccctttgcgccgggttatcgccgtctgtcggtattagccatgacatgtctccttttcatcgagcgtactgaccgaatcaaaaataacccatgcccctgagaataacaggtcattatcagcaacatccgctgtaggcagacaaagtgatgtgacagccggagagacggcctgtattgccatcctgattcacagagtcacgaatgccatacagaaaagcaaagtcccattatcggatattgggttaacacaatgagggatagacatgtcacaaagcgcaggtacacacgacatcaccgttgccatcaaatacgacactgaagcattaagccaacttgaatcacagctggaacatatcgttgagttattagatcgcattcatggtcggcgttatgacgaggatatgacactggcagtagataaaggtgttgttgccgagggcttcaagctatttgattcagaaaagaaactcagagtagctattcctccactgagagaagcgatatatggtcctgtacagaccactgaaataatcaacgatgatcacctccgtcagatagtccgtgaagaactacgtcagttcgttgcgcgtgagagtgagcgcggcggattattctctaagtggtgatactatgccaccccgtataccgagagcctgtcgcaagcagggttgccccaagaccacaacagatcgcagcggttactgccctgaccatctgcataccggctggcaggctcaccaacaaggcaagaaccgacatgcccgcggttatggcagtcaatgggacaaactcagagccactatcaagcaacgggataagcacctgtgtcagcaatgcctacgacaggggcgagcgacgacaggtaccacggtagaccatattacacccaaggcacagggcgggacggatgcgttatcgaatctgcaattattatgtgaggcctgccatagccgtaagactgccacggagcgactgagatagttacgcgaagacaggtaactcatcctcacgtgtgaatatatcggatggcattatctcaatggaacaatggtcggatgatttaattccaaattgaaaccattaccgctgtcatggtcacatcaggggagggggaggtgaaatcgctacccctctcgccccttgaggaccgccgccttacctcttttcagatcgccgcgaaatacaaacctttttttggggtgccccaactgcaccgtttgacaggagaaatcacatggcaggacgaccgccaaccccgactcacctgcgtttggtgaggggtaacccatcaaaacgcccgatcaacgtcaatgaaccgaaaccggaaaaaggggtgcccccgatcccgaagcatttcggcaaaatgggccgctactggcatgaacgtatcgccggggaactggataaagtcggtgtactgaccagtctggatgcgaaagcccttgaattgctgattgaggcttatgtcgaataccgcacccactgcgacacgttagagagcgaaggttacacctaccgcaccgatcagggattaatcaaagcgcatccggcagccggcatgaaagccgatgcatggaaacgcattcacgccatgctcagtgcattcgggatgtccccctccagccggacgaaagtcaatatggtcggggaagataaagccgaccccctggctgaatttttacagatgagggattaagcatggcaaaagtggctgacggtattcgttatgccgagcgggtcgtgtccggtgagattgttgccggggaactggtgaaactggcctgccagcgcttcctgactgacctgaaaaccggtgaggcgcgcgggattaccttcagtgaaccccgtgcccagcatattctgaacttttacaagtttgttccccatgttaaaggggcgctgaccggcaagcccattgaactgatggactggcatatctttattctgattaacctgttcggctttgtctgtccgctggtcaatgaagccaccggggaagtggtgctgcgcaatgacggcagtgggcgaccggtgatggtacgtcgtttccgtaccgcgtataacgaagtggcgcgtaaaaatgccaagtctacgctgtcgtccggcatcgggctgtacatgaccggggccgacagcgaaggtggggcggaggtgtattcggcggcgacgacccgcgatcaggcccgtatcgtgtttgaggatgcaaagagcatgatcaagcaggcccgacccacgttaggccggttgtttgagtttaataagctggcgatttatcaggagcagtcgtcttccaagtttgagccactgtccagtgatgccaataaccttgacggcctcaatatccattgcggcattgtcgatgagctgcatgcgcaccgcacccgtgatgtgtgggatgtactggaaaccgccaccggcgcccgcttgcagtccctgctgtttgggatcaccacggcgggttttaacaaagaaggcatctgttacgaactgcgtgactatgccattaaggtcttgcgtgggcaggccccggacgacacctttttcgccctgatttatacgctggacaaagacgacgacccgtttgatgaaaccgtctggcagaaagccaaccccggcctcgggatctgcaaacgctgggacgatttacggcgactggcgaaaaaggccaaagagcaggtttccgcccggcataacttttttaccaagcatatgaatctgtgggtcaccgctgaatcggcatggatggatatgctcaagtgggatgattgtgaaccattgccaccgacgcatgagctgaagacctacccgatgtgggtcggggtggatttggcgaacaaaattgatatctgtgcggcggtcaaagtgtggcagggcagcaacgggcatgtgcatgccgactttcggttctggttgccggagggccgtattgagcgttgttcccgccagatggcggagctgtaccgtaaatggggcgagctgggcatcctgaccctgaccgatggcgaggtggtggatcacgcacagataaaagacgagttattgcactggattagcggggaaaacctgaaagaactcggctttgacccgtggagcgcggtgcagttcagtctcgccttagcggaagaaggcattcccttagtggaagtcgctcagaccgtgcggaatctgtcggaagcgatgaaaacactggaagcgctggtctacagcgggaaattccaccataacgcccacccggtgatgaactggatgatgtcaaacgtcacggtgaaaccggataaaaacgacaatatcttcccgaataaatccacgccggaagccaagatagacggccctgtagccttgtttaccggcctgagccgcttactggtcaatggcggtgatgtacctgacttcctgtctaacctcgacccggacgatttcttaatgctatgaaaaatttactgatggatatcacggccctgacgggggtcggggcggtgctggctggctgttacctgaaatacggattagcgaataccctgattatcggcggtagcctgttgatcgtctacgcgctggcggttgtccgcaggaggccccatgctacttgatgcgctgtttcgcagtgaaccgctggaaaatccgcaaataccgctgacggtggagtcggcagagcaagatggcctgttccgcgccgatgtctatgtcagcccggaaacgtcaatgaaactggcggccgtctatgcctgtatttatgtgctggcctcctcggtggcgcagatgccggtgcatgtgatgcgcaagaccggtaaatcggttgagatggcacgggagcacccggtgttttatctcctccatgacgagccgaacgactggcagaccagctacaaatggcgtgagctgaaacagcgccacatcctcggctggggtaatggctatacgtgggtcaaacgtaaccggaaaggcgaagtgaccacgatggaagcctgtatgccgtggcaaaccacgctgttaaacaccggtgggcgttacacctacggggtctataacgaagagggcaattttgccatcagtcccgatgacatgatccacatccgggcactggggaataaccagaaaatgggtttaagccccatcctgcaacatgcggaaaccatcggcatgggcatgagcgggcagaagtacaccagtgcattctttggcggtaatgcccgcccagccgggattgtctctgtgaaaggggaaatcagcgagccgggctgggaacgacttaaactgatgtggcgtaaagcggcggcggctctgcgcagtgaagaaaacaaaaccatgctgctgccggcggatctggattacaaagccctgaccgtctcgccggtggatgcgcagctgattgacatgatgaaacttaaccgctccatgattgccgggctgttcaatgtgccggcccacatgattaacgaccttgaaaaagccacgtattccaatatcggcaatcaggctattgagtttgtccgccacactgtgatgccgtgggtggtgaactgggagcaggagctgaaccgccgcctctttacccggcaggagcgcagggccggtttttatgtccgctttaatctggcgggattgctgcgcggcactccgcaggagcgtgctcagttctaccattttgctatcactgatggctggatgagtcgcaacgaagcgcgggcctttgaagatatgaacccggttgacgggctggatgacatgctggtcagcgtcaatgccgccaatcccattgttaactctcaaccgcctgaacaggaggatcaaaccgatgtgtgaccgagaaatgcgctgttacccgcacttaccatccgtagagaacaccattatgacgataaacacgacactccagcaacttgagccggggagcaaagtcttattgtttgcccttgatggttcgtcgtttggtggacccgagctatacttccataaccacccgatagcgtacaccgaagcggagctggaaagctcggatagtttacccgctaaatcgatttggtggcagggcgtagaatataagccgtggccggttgaggttaaggggctggaaattcagagtgatggcagtaccgcttctcccgcgttaagggtcgccaatctggacggcacgatcagtgccctgtgtctggcttaccataatatggcacaggcgcgtatcacccttcatatgacgtttacccactatctggatgcacgtaacttcccggagggtaatcctgaggctgacccgacacaggaaaaaatcgacgtcttctacattgacagtaaaacccatgaagataataccgaggtgcattttgctctgtcttctccggcagatttgcaggggatccagatccccacccgtcaaattcatagcctgtgtacgtggtgtatgcgcgggctgtatcgcaaatccccctgtaattacaccggaacgcgctattttgatgaagagagtaatccaacggatgatccgtcaaaggatgtatgcggtggcctgatgaatgattgcaaactgcggttcggtgaaaatgcgcaattgccgtttggtggctttcccggctcggctttgctgaggagataatagtgcttctggatattaaaagaactaaaggttaatatttgttgatgtattgacattatgagggcgcattaatgggacttgatgataaaaccattgatcctttatttgatgatgctgttgaatatttaataaccaatgaatatgcatccattaatgatgtaaaagagtattttggtataggctacaatagagcagccctgctattgcaacagatggaggagatgcaaatagttacatgggagcataataatggagcctcccgatataaaataattactccgctaacaaagaaagcaacgagacaagaaaaaaaagaacctatcaccagtcctagcgtagctaatactaagaaaagtgattctaaggtattaggatatggaggctttgagtggcttatggcgggtattggttttatcgctattattgtcgtttttgtctcctgctctagccggacgccagcgcctgcaacagattattgcacagatgataagactgcgtatatctatgctgaaaaacttatatcatctcatttaaaagccccgtcgactgctaagtttgccagttactacgatgttaaatcatataagcccgaagaatgtaaatttaattttattgggcatgttgatgctcaaaatagttttggcgcaatgataagaacgaaattcaatgtggttgtgcgttacgaacctaagagtgataagtattatttggaaaatttagatatgtgatttatttgttgttttaattcaataccccgcttcggcgggttttatatatctttagagcacat

SEQ ID NO: 198 - DNA, 7655 bp, Xenorhabdus sp.; identical to SEQ ID NO: 197
  CDS (4855)..(6078)

SEQ ID NO: 199 - DNA, 7655 bp, Xenorhabdus sp.; identical to SEQ ID NO: 197
  CDS (2983)..(4707)

SEQ ID NO: 200 - DNA, 7584 bp, Xenorhabdus sp.
  CDS (4826)..(5692)
acgacgtatcttacggaagttctcacgaatacgatccgaaaccacaatactgtcattcagtgaataaccgataacagacatcaacgatgcgacgatggtcaggtcaatttcaatgtggaataacgacaatacacctaatgtaatgataacgtcatgagccagtgcgataactgcccctagcgccagacgccattcgaaacggaatccgacataaatcaggatacagatcagcgccaccaacagagccattgccccagtctgtgctaattcgcttcccacacttgggcctacaaattcaactcgtttaacaaccgcgtctttatctatatccgcgttaatgaccgagatgattttattacccagctcctgacccgcgttacctgttgccggaggcatacgaaccatcacatcacggctgctgccgaagttttgcagaagtggatcagcaaaaccatttttcgccagactctcacgcatcttgtccagatctgcgggcttgctcaggtttatctcaatgaccgtaccgccggtaaaatcaagcccccagttaaacccacgtgttgccatcatcgcgatggaagcaaccaacagcagcaatgagatagtaaaagcaacgttgtcccagcgcataaagtcaatgactttacgcccatagtttaattgttcaacagtataatcctgtgccacaacgtgctccttaaattgacagcttattgatgcgcttaccaccatacagcaggttcacgattgcacgtgttcctacaatggcagtgaacattgacgtcgcgacaccgatactggttgtgattgcaaagcctttgatggaccccgtccctacagcatacaaaatcacagcggtaatcagcgtcgtcaggttggcgtcaataatactggaaaacgcacctttatagccttcatgtatcgcctgctgtacagtacgcccgttgcgcagctcttctttaatacgctcgtttatcaaaacgttcgcatcgacggcaacggccagagtcagtacgatcccggcaatacccggcatcgtgagtgtcgcccccggcaacagagacatgacgccgacaaccagtaccaggttcgccaacagtgcgctactcgcgatcagaccgaatttacggtagtaaaccaccatgaacagtacggaggaaatcagcccccacagacaggcttcaagcccctgttcgatgttctgcaaaccaagagttggaccgattgtacgctcttcaacaatctgaattggtgcaatcagagcacctgcgcgcaacaataacgatagctgacgggcttcgttcgggttactaatccctgtaatacggaaactattacccagacgagactgaatagtcgcaacgttgatgacttcttcatgtttagccagaatcgcacgaccgttagcatttttcttaccgctgtctttatactccacaaacagggtagccatcggcttctgtaagttatctttggtgaagttagacatcgcagtaccaccggcgctatccagtgagatattaacctgcggataaccgttctcatcagtgctcgaggttgaatcggtgatatggtcaccggtcaggatcacacgcttatacagcacaacaggattgccatcgcgggtatatttcagctctgaatcgcccggaatacgccccgatacaatggcactctgatcaacattggtgtttaccagacggaattccagtgttgccgttgcaccaaggatttctttcgcgcgggcggtgtcctgaataccaggtaattcaacaacaatacgatccgcaccctgacgctgtaccagaggctcagcaacgcctaactggttaacacgattacgcaggattgtaatgttctgctgaacagcataagagcgggcttcgcgcagacgctcatctgtcataaccgctttcagcgtactgttattaccagtagagaatacaaggtcacggtgacgaggttcgaggtagtcttctgctttagagcgggcatcattatcacggaaacgaatttctacaccgtaattttctgccttgtggatagtggaataagcaatgccctgttcacgcagttcagaacgcaggctatcaatattctgttcctgaagcttgctcagagcggtgtccatatcgacttccatcaggaagtgaaccccaccacgcaaatccaaccccagtttcatcggctctgcaccgattttacttaaccagacgggtgtcgcaggcgcaaggtttaatgccacgacatattgttcgcccaaagccgaaaccagtgcttcacgggcgcggagctgaacatcagtactattgaaacgagcaaggattgccccattttccagcgcaatggacttactctgaatatgatctttatctaaaacattacggacttggtccagcgttttttcactggcggcgatacctcgcgcgccagtgatttgtacagccggatcctcaccataaaggttgggaagtgcataaagcagaccgatgaggatcgcagcgatcagcatcagatacttccacaaaggataacggttcaacacggcagttcccttcgggaaaatcggaaaattaaatagctttcatcgtacctttcggcagaatggcagcaacgaaatcacgcttgacagttatttctgtggtgtcattcagggcaataacaacgtagcccgtttcagacactttagagacacgaccaaccaaaccaccagaagtcagcacttcatctcccttggagatggaatccatcagttttttatgttctttggtgcgtttttgttgtggacgcaggatcatgaaatagaaaatcaggccgaaaacaaccagcatgataatcagagaatatgggtttccctgagcttgtgctggtgcgccagcagctgccgcagcttcagaaataaaaaaactcatcaaatatccctcattgttatcgaaaacacttattttgcgaaaaaaaagtttacaaacaaacagattacgaaaattggttatcgaaaaaattgctatcgaaaatcgacagtggctcgatcaaaaaccagcccaatatgctacacacattgaggctggttagtcacgccaaattatacatttaacggtggaacgggtttaccgatccgctgataaaactcttcaacaaactgttccagtctgtcttcttcaatggcttgacgaattccggccatcagacgctgataataccttaaattatgtatcgtattcagccttgcaccaagaatttcgttacaacgatcaaggtgatgcagatatgcacgactataattccggcaagtatagcagtcacaatgctcatctaatgacgatgtgtcttctttatgcttcgcattgcggatcttgatcacaccttccgtcacaaaaagatgaccatttcgggcattacgggtcggcataacacagtcaaacatatcaataccgcgacgaacaccttcaaccaaatcttccggcttaccaacacccattagatagcgtggcttatcctgcggaatttgtgggcaaacatgttccaaaatgcgatgcatatcttcttttggttcgcctacagccagaccacccactgcataaccgtcaaaaccgatttccaccagccctttgacagatacatcacgcaaatcttcgtagacactgccctgaataataccaaacagcgcatttttattgcccagctcatcaaaacgctggcgactgcgcgcagcccaacgcagtgacatttccatagaacgtttggcataatcccagtctgctgggtatggcgtacattcatcaaaaatcataacgatatcggagcccagatcgtgctggatttccattgatttttccgggctgaggaaaacaggcgttccgttgataggattacggaaatgaacaccttcttccttaatcttacgcatagcaccgaggctgaagacctgaaaaccgcctgagtcagtcagaattgggccgtgccactgcataaaatcatgcaaatctccatgcagtttcataatttcctgacccggacgcaaccaaagatggaaagtattgcccagcaggatttgtgctcctgtatctttaacctcttccggtgtcatacctttaactgtgccgtaagttcccactggcataaaggcaggtgtttccactacaccacgatcaaaaatcagacggccacggcgggcatgcccatccgttttttgtaactcaaatttcacttaacctccagacatcagaaaaacagtctgatgtttgacataaaatgatgcattctaaacactaatgacgccactgtacacgccagccttgtgatatacggtatgtcaatatttgcgaatttttgtgtcattcctacttccttgtgacacaattttgtcaaagttgacacatcattaaaaaagtttgaaggatattaggaaatttttgtgtgccaaatgcgccccacctttttgctaaccttctgatatagcttcggccctgaaggttcaaaaaaacagcatgaagcggcttatctgaattgaatgattttaatccaatatcaatggtgtcagcctacattaataaagtgccaccaatgtttctgataaaaataaaaaacaccaataaaccagcaatgaaccttccaccaaccccatcagttatttgataaatttgattaattactcgcctgtcattgtatgtcatcctgcaacaaaacatgcaacctatcaaatatcgtttaagacagttatttcagtatcgataaaccacgttattgatattcactggcggagaagtcttccaacgcctttatgttacttggcaatgtgtattgttgattaaatgagggaatgattatgcaaaatcaaaaacctgacgtccttgtttcagaagatagtaaccttgctgtcgttacaacaccggaatatgtcaaaaaagcgattgcagaacacgctcaaagccgcaatcatccagatgccacgctgcaagataaaggttttactattctgagtaatgatactggcagtgataacgagactatggcagcaacaccaaaagcggttaaaactgcctatgatttggcaaatacagcaaacaataacgcagataatgcgaacaatgtcgctaatagcgcaaatgacaatgctaatactcgcttagcaaagaaccagaacggggctgacataccggacaaaaaagagtttgttaaaaaccttggaatagaaacattaatggaagaattatccttacctgctggcgttcccgtaccttggccaacagcaacgccaccagagggttggctgatatgtaacggtgactcatttgatcctgtaagatacccgaaacttgctcttgcttatccatctggtgtgctacccgatttgcggggagagtttattcgcggctgggataatagccgaggagtggatgctggccggcatttgctttctcatcaatcagcagatattgctccacataaccacagaattcaccgcatgtggtctagatccactgcgagtgctgagaatttaggtacagggaacgccatttttaacagcgttcaaaaaaacattaactatggcgctgaccccagaggattaggcattgccataggaatgggatctggtggctatggttatatggataatgcggttgctaactcaacaggaaaagaaactcgtccccgcaacatcgccttcaattatatagtcagagctgcttaattatgagtaaccatttaacccgcaatttcctgcgggttaatcattccctcaatccatctattctgattgatcaatatcagtggcaacctctaccatctcttttgcagctattgagttgcgattaataaacatcgcatcaccataactaaagaagcgatacttttcagttactgcttccttataagcgctcatggtatttttataacccgcaaatgcagaaaccaacatgattaaagtcgattccggcaaatgtaaattggtaatcagggtgtcaacaacctgatattcaaatcccggatagataaaaatttgggtgtcatcaaaaaacggcgcaatcagcccatcctgacaggctctggcagcactctccagtgaacggacggatgttgtccccaccgccacaactttattgccacgggccttacatgccagtactgcatcaacaacattttgcggtacttctgcatattcagcatgcattatatggtcttcgatggtatctacacgcaccggctgaaaagttcccgccccgacatgcagtgtgacaaacgccatttcgatacctttttcacgtaaggcagccaaaagcggctcatcaaagtgcaatccggcagtcggtgcagcaacggcgcccgggcgctcattgtacaccgtctggtataattccttatctgattcttcatcaggacgggcaatataaggcggcaatggcatatgaccgatttcatccagaatggtcaatacatcacgctcatcatcgaaacgaatctcaaataaagcatcgtggcgggccagcatggtagccttaacgatctgattaccatcaggcgctttatcttcgccgaggatcagttcagtgccctcttttggagccttggatgcacgaacgtgagcgagtactcgcttatcatccaacatcctttcgaccaaaacttccaatttgccacctgttgccttacggccaaacaggcgggcaggaataacccgggtgttattgaaaaccagcagatcacctgcttccagtttattcagcacatcagtaaaaataccgtgagtcagctcccccgtttccccatcaagagagagcaaacggcagccactgcgctgtggttggggataatgagcaattaactcttctggcagttcaaatgtaaaatcagcgacacgcattttatctgtatcattcaaaaaaacaggcggactagtctagtgctgcacgggcaatggtgcaagaaagaagcatattagtttaactatttgcgttatactctcaccatgaattttctcgcacacctccatttagctacactatctgaaagctctctgctgggtaatttaatggcggattttgtccgtggagccccggaaggccggttcgcccctgatgttgtctctggcattcgtcttcatcgcaggatagacagcctgacagacagtcatccgctggtcaccgaagcccggactctatttcgtagcgaatatcggcgcgtagcgcctataacccttgatatcatctgggatcatttcctgtccaaacactggaacaaactcgaaaagaattactccttgcctgagtttgtgcagctagcgcgcaatcaaatagagcctcacctcagtgttacccctgaaaaatttcaggaactgaatcaatatctctggtcacaaaatctgcttatccgttacgctgacctgacatgtattgccaatgtgctacagggaatggcacgcagacgccctaaattatccgcactggcaggttcttatcaggatatcgaagagcattattctgattttgaaacactattctggcaattttatccgcaaatgatggctcttgtgatgaacaacagcctgcccggacaggaaatttcgccagaacctctttagagcac

SEQ ID NO: 201 - DNA, 11844 bp, Xenorhabdus sp.; identical to SEQ ID NO: 71
  CDS (2626)..(2997)

SEQ ID NO: 202 - DNA, 15052 bp, Xenorhabdus sp.
  CDS (12623)..(13270)
tcgcctgttcatgcgtgcgctggttggcaaaaccgttgtaatcaggagctttcgtggaggatcaacatgggttaatcagtagtaaagaagtcaatgcttttttgggtgatcgtttcccgttatgtttcgccgcaaaaggtgaagcacgtcctttgaaaatcgggatctttcaggatatcgttgaacgtattcagggcgaagagtgtttaagtaaaacacaactccgttctgctctgcgcttgtatacttccagttggcgttacctttatggtgtaaaagaaggtgctcaacgtgttgaccttgacggtaatgcatgtggtgagctggaagctgaacatattgaacatgcgcgccagcagttagcggaagctaaagctcgtgtacaggctcaacgggctgagcaacgtgccaaaaaacgtgaaacagaaaacgtatctgacaagaaaagcgaacgtcctgtgaataaaaaggatgcgcctcgtcgccgtccggaagcaggtaaaaaggatgaaaaacgtccagctcgttcgcaagagcgtccgcagcaatcgcgtaaaccagcagataaaactagcaaaaaaattgcacaacctgagttaacctcagttacagatgtatcctctttgaaagtcgggcagacgatcaaagtgaatgtagggaaaagcctaatggatgcttctgtgctggaaattgcgaaagatggtgtaagagtgcagttacctactggtctggcattgattgtacgcgcagaacacttaaagttctgatacggaggccaacttgggcatgaacaaactcattactttggctttcgttttaaggctatcattttttggtacagggtatgcagatactgtcaatgatggtgctgctcgtagtaatactttggtacctgttgccggatcaacagtggggaataatcagctactggttactataattcagttacccgatcaaaaacgggaaccccaacatgcgacagtaagtaaacgggttgtttcccgttttctcagttctcactaccgccatttcaatcttgatgccgatttctcagacaagatttttgatcgttacttaaatatgctcgattacgggcataatatttttttggcatcagatatcgcacagtttgccacacaaaaagggcttttgggtaaagagcttgagaatggtgatttacaccttccatatgcgttatttaacttacagcaaaaacgtcgttttgaacgctatcaatatgctctttccaggttagagcagcctatccgcttagatggaaatgataagctagagactgaacgtaataaagcaccgtggcctacaagtgttgaagaattaaataatctttgggatgcaaagattaagtcagattggataaatcttaaactgtcagggaaaagtgacaaagagatcaaggaaacgctgacaaaacgttataggactttgctgaaacatttgactcagagtaaaagtgaagatgtttttcaaatcataatgatggcttttgctcgtgaaatagatcctcataccagttatctttcacctcgtaatacagagcagtttaattccgagatgagcctttcacttgaagggatcggtgctgtcttacaatatgatgatgaatacgtaaccgtccgctcactagtagcagggggaccggcagccaaaagtaatttgctcaaagtcggagataaaattattggggtagggctggcaggtaagcctattgtagatgttgttggctggcgcttggaagatgttgttgctctgatcaaggggccaaaaggcagtaaagtccgccttgaaattattccaagtgcgaaaggggcaaaaaatcatattattacgttaactcgtgaaaatattcgccttgaagacaacgcagttaaaatgtcagttaaaactgttggtaaagaaaaagtgggagttcttgatattcccagtttttatgttggtttgactaatgatgtaaaagtacaactgcaaaaactaacgaagcaaaatgtttcggccattgttattgatttgcgtggtaatggcggtggcgcgctgacagaagctgtttcactttctggtttattcatcacaactggtccggttgtacaaatccgggataatacagggcggattaaagaagattcagatactgatgaagcgatatattataaaggccctttggttgttttagttgataatttaagtgcttctgcatctgaaatttttgcggctgctatgcaggattacggtcgtgggttaattgttggtgagccgacttttggtaaagggactgttcaacaatatcgttccctgaatcgcatttatgatcaaatgctcagtcctgactggccagcaattggttcagtgcaatataccattcagaagttttaccggataaatggtggtagtactcagcttaaaggtgtgacacctgatattcttatgccaacaggggcagagcctactgatataggtgaaagtaaggaagataatgctttgccttgggatagtattcagccagcaatttattcttcttcaaagaatatttcagagttagtgccatcattaactaaactgcatcgccagcgtatcgctaatgatcctgaatttaaatatattgaccaggatatcgcctattataaggtactaaaagctcgcaatggtgtttattcattaaactatgcagagcgagagaaagaaaataaagagtatgaagcgattaaactaaatcgtatcaatgagcgcttcaaacgagaaggcaaaaaaccacttgtgtcacttgatgacttagcaaaagattataaagggccagacccttacttagacgagtcagtgcaaattgctctggatttagctcaccagccagttgaaataacccagaataaatagtagtggttttggatatcacaatgcataaaaagccgactttatagtcggtttttttacttttgtattattagctacatcttatgtaaaattgtaaagttacgttgattctatcgcttaacaccttaaagaaattgaataatatggtcttagtccccatcttatgatttacttttagttgaactgtttgattattaaaggaagcaaatttatatgatgagaattgccctgttcctactcaccaaccttgccgtcatggttgtgtttgggataatactttcacttacgggagtacagagaagtagtgttgccggccttatgattatggctggtttgtttggttttggtggtgcatttatttctttgttaatgtcaaaatggatggcattacgttctgttggtgggcaggttattgaaaagccgtctaacgaaatggaattctggctgatggaaactgttcgccgtcagtccgatcaagtcggtatcactatgccacaagttgctatttatgatgcaccggatattaacgcattcgctacaggagcacgccgtaatgcatctttagtggctgttagtacaggcttgctgaataatatgagccgtgatgaagctgaagctgttattgctcatgaggttagccacatcgctaatggtgacatggtaacaatgacgttgttacaagggattgtaaacacattcgttatctttatctcacgtatcattgcacaggcagctgcaagtttcttgtccagcagtgacgatgagagcgaaagcagtagtaatggcaaccctattgtttatatgatcctttccatggttttggaaattgtatttggtattctggcaagtattattaccatgtggttctctcgttatcgtgaatttcacgcagatgcggggtcagcaaaacttgtcgggcgtgagaaaatgattgctgcattacagcgcctcaaaacaagctatgagcctcaggaagaaggcagcatgatggcattttgtatcaatggtaaatcgaagagttttagtgagttattcttatctcacccaccattggataaacgtattgaagcgttgcgtagcggcgaatatattaagtaatactgcttggcttgcatctatttaaaagatgagaatctaaacagttaaatgaaaaaagccgggatttatgataaatcccggcttttttaccattagattatttaatcctggtcaaataactttttatcagttttacccattaactgactggtaattgtaccggcagtcatagctccgttaacatttagagcagtacgccccatgtcaatcagtggttcaacagagattaataaagcgaccaaagtgacaggcaaccccattgctggcagaacaataagtgcagcaaacgtagcaccaccaccaacaccagccacaccagcagagctgatagtcacaatccccactagagttgcaatccatagagggtcaaaaggatcaataccaactgttggagcaatcatagccgctaacatagcaggataaattcctgcacaaccattttggccgatagtcgcaccgaatgaggcggaaaagctcgctatagactcaggaacaccaatgcgacgtgtttgcgtttctacatttaacggaatacttgcagcacttgagcggctggtaaaagcaaatgtcagagcagggcctgcctttttcaagaattttagtgggttgatgcctgttatagctaaaagaataccgtgtacaacaaacattagacctatagcaatgtaagaagcaacaacaaagttacctaattgggcaatatcatgaatattagaactggcaactactttggtcattaatgccattactccatatggggtaaggcgcataaccagcctgactagtttcattgcccatgcttgcatagtatcaattgcgataagagcacgttcaccgcgttcatggtcatctttcagcatttgcagagctgcaattcccaaaaatgttgcaaaaatgacgacgctgataattgaggtcggatttgctccggtaagatctgcaaatggatttttaggaataaaagagaggattagttgcggtacactcaggtctgaaacccgattaatatagtttgtctcaattgctgacagacgagcagtttcttgtgtcccctgaactaatccagcagcggtcaatccaaacatattggcgataacaacactgattaaagcagaaatcgctgtggtaaacagtaaagtaccaatagtcagtaagctgatcttacctaaggaggatgccttatgcagacgtgcaactgcactgagtatagaagcaaagactaatggcataatgaccatttgtaacaattgcacataaccattgccgacgatgttgaaccatttaattgattctttcactatcgggttatgtgcaccataaataacatttaatactaatccaaaaaagacaccaacaactaaggcaataagaacttttttggatagactccattgatctgaactcgtttttgctaatataacgagtagtgctgtaaaaaccagcacattgataatgagtagtaaattcatccctagtctccaatattttgtctaatattcttgtatggtatgtattcactttgagtaatagcgaaacgttttaccattattttattaaagaattatggtatcaatataagtattagctttcttataattttagagaatataatataattatttgtcactatatagcactattagttatatgtatttatgggatttgttttgctttcgttcaatgttagccaatatgtgagagaggttgcctcagagaatatgaagtcatttgagttatctgattaatatataagtttatttattaacaatgacaagctgtaactcagaagttagataccaaatagtgaaattgataagtaaaaataaagaaataatatttatgtttttgattggtcctattatcaaaataggaccattatttgactaaaaataaactcaattatttgtacaaattttgtaatttatcaatgtgtaattgatcaagttgcagtttatcgaattgcaatttatctaaataatccataaatgaaagattgatatgttgtggaataagaatagcaattactacaagtaaaactgctataaatcgctctgcttttttacgttcttttcccctcaagataggaattctaaaacgcattttcagtggccataagagaggaatccctgcgggtgtcagcatatctgcgattaggtggctaatataccctatgagcatggcatggataaaatcagttggtataggccactcagggggaatctcagtctgaaacagaacaacaccgactgtcagagccagtaggctatgagtgaagcctctgtgcccgcaaagccgagcaataggaacggaaataaaacggaatagtctacctaaagttgaatgtggatgatcaatatctggtaataaagaagccaaaagtacaccgggaatcatgtggaaccaatccccctgtgctatttctggagtgatttctagctggtgagccaatacaaggctggcaactgaaaagagaaggtgtccttctgctgtcataattatttatactagattgtttgttgtattgattactggagctgattgctgtttatgtatacagtgcgctagtatagagggttttatcctggttgaacagggggtaaacaagaaaaatcttttatttattaacatataacactaatatttaactggcccttgcccagaacatatatctatactcaatggattttacattgcatcgtggcggcaagggagcagtaaattagtcaaaaatgaacttgcccagccaataaaaaggaaatttgaaaggcgaagagtatatgcttctggtgattaattcacttactttcgcgttacaacttgaaatattttggatatatgcgcatgaggagtatcaatgacgtattcacaggcaaggtatgtagctatcacgaagcggctattgggttggattatttttatacccgcttttttgtcaactttagtttcagtagtcaatttggtatggttgcatggagttaaaggtgatggtattaacgcagtcttgaatgattttttaaaaatgatggctgacgtgattaagttcaatacaccgtttttagattttttctggagacattctccaacaccagattatgtggtggcgctcacaggagcgaatgctagttttttagtcatctatttcctgatgtttgttggtttggcgatgagcgcatctggtttaaggatataccgtcaattcaaatttattagggaacagattgaagatcatgtgatccttgaaaaagcaaaagaaagtgatgtcactaaagaacagctggaagctaaggtagaattcccacgtcactcattattcagtcaaatattcactctctatatatcacctattattattggtgcaattgcctattttttatcaaaattattaggttggtgatgcaatatcatagctgcgggatactgagttccgcagctacatcgtatctgttgtttttcagattgcatctttgttggcaatgcttgctcctccctgtcagtattttcataaacactactccagtggactcgttttcttgccactacagcgtagtttgaaattaattaagtatatatttgtctgtttcataaatttcacaaaaagaaattaatataattaatcttttgttatagtttagctttcttacctcctttgattttttattaataaaataataaacaagcaaatttagattgatctagttaactcttcgattagattttaaatctgattatgtagctattctgaatcagatcggatttttattcggataatatattatcgatgatactttgtgcagtgataaaattatctccgccaaaaaggttacagcgattcaataaataatagagttgatagagaggctgccgttcgatgaaatctgacggtagtggccaaacgctttgatagccatcaagaacctgtagagggagctcagggtaaaaaggaagcatagcgagatcacactcacgatccccccaataacaggcaggatcaaatgcaacgacacaattgtgatttaaagatgcgcaattcgttggccataaatcaccatgcaataaagatggttcaggttgatgagagtgcagtttattactgattttttcaacaattgcatcgatgtttccgaataccatgccattatctgatgcaagttgtaattgccagccaatacgcttttctgcataaaattggttccagcgtttttgccatccattaggctggattgtcgttccaagcatgttgtcaaaatcaaaaccaaatttgggttgttcattccattggtgaagccgggcaagttgctgaccaaaacagtatgcgttgtgggcatcaaatggtttgataggaagatattcgagtaaaaggaagctatgattacgatcatgcccaacgccatagacctcaggtactttggtcgtgttgctacgggctaataattccagttgttccgcttctgttttaaagataggcaacatttctttcgtattggacttaacaaagatatgctgatcgccgtactcaatagaccaagaacggtgaatatctcctcctgataattccgttttgttgcggatttctgcctcttcaaaatgttcacttaatagacggctaacagtttgccacatgactcacctcattaagttgacaattactatgctcatattacatacagatgcagtggttgaacagtttaaaacagaatttaaatcctgattagcgggccatatttaaattagatataggccccctaatttgattttacttaagactcacactgatggggataatatatccctggcctgttttctatgaattttctttctggctaattttatttggtcataaataacggcaaatgcgaagaaaatagcctgaatgataacaatgcatgcgccggtttcaccatcaatgtggaagctgactattgtaccaagcacactggatgtgactgatgctattatggcaacaatcatcatacgttcaaaattccgacataggataaaagcaataatcccgggagatattaacattgcaataaccagaataatcccaacagcttgtaatgaggctacaatggttaaagccaaaagagataataagccatagtgcagcagttttactggcagaccaacaactttagcctgattagggtcaaagcaatatagcatgaaatccttacgtttcagaagaacaacggccagagtgaaccctgcaatgcacattatctggatcagttcattttgggtaataccgaggatactgccgaataaaatatgggtcaaatgttgttctgtatctatgcgggtaaaaaggaccagaccaaatgcaaacatgccagaaaacacaacacccatgatggtatcttccttaacccggctatgctctttcagatatccagtggcaaaggcgcaaaatattccggaaaggaaagcacctattgcaagtggtattcctgcaacaaatgccagaacaattcccggtaatactgcgtgggaaatggcatctcccattaatgaccaacccttcagcactaaatagcacgataatactgcgcagacagttcccacgacgatcgcagccacaatggcacgttgcataaaatcatgcataaaaggttccgtgatgaactcaatcaaggtattcatgagtgctctccctgagtaattgcctgagattcttttttagctcgttggcgataggccaacataccgtgcttaggtgcaaagaagaaagccagcaggaaaatcagagtctgtaaggtaacaatgactcctccggttgcaccattaaggaagtagctaatataagcacctatacaactggttaaggcgcctatggcaactgaaatgataagcagattcttaaaacgatctgtcagtagatacgcagttgctcctggagtcacgaccatagcaataaccaaaatagcgccaactgtctgtaaggctgcaacagtacaggcgcttaataaagtgaagaaaataattttcaggcgtaatggggataacccgatggatcgggcatggttttcatcgaagaacacaaccagcagatctttccagagcagcatcagaacaataaaagatacagcaataatgatttctacctgtaaaacatcttcatcagcgatccccagaatattgccgaggatgatggtttgtacattaacggatgttggatttaaagaaacgatcaataacccggcagcgaaaaaagtggaaaatataaacccaataacggcatcttcacgtaatcgtgtgatgtgacgtacgagagtcatcgataatgctgcaagcataccggtaaaaaaagcaccgccggcataaggtaaaccgagggcataggcaccggcaactccgggcaccacagagtgggagagggcatcccccatcagtgaccagccttttagcattaaataggctgacaaaaaagcacaaacagcgccgacaatggcacttacccacatggctttcaccatatagttataattaaatggttgtagcaacagttccatcataactgttcatccttctgtttttgactttgtcgtggaggaacatgattatcatgaccgtaaaatacggcagcgcgctcatcatctgtaatgacggtcagggaacgaggatcgtcatcgtcatggagttcagggccggagagattgatatgacgtaaaacaccgccaaatgtggtttccagattcttctgcgtgaatgtagtttcagttgggccactggccagaacggtgcgattaatcaaaataacatggtcacaaaattcgggaacactgccgaggttatgtgtggagactaaaattaagtgtccttcatcacgcaggtcacgaagcaaatcaataatggcattttcagttttaacatctaccccggtaaaaggttcatctaaaagtagaacctttccttcctgagccagtgcgcgtgccagaaatgcccgttttttctgtccaccagaaagttcaccgatttgtctgtcacgcagttcaatcagcccgactcgctctagtgagcgatttacgatttgatggtctagcttactgggcctgcgaaggaagcccatttttccatagcgccccatcatcacaacatcagaaaccagaaccggaaagttccagtctacatcttcagtttgtggaacgtatgcaatgatattctttttcagtgctgtttttatggattgctcattaagggtaacttttccttgagatggagtaactaaccccataatagttttgaataatgtcgatttcccactgccattcattcctactaatgcacatatggtgccgcctgtgatatcaaagctcgcatcataaattgcagtatggccgttgttgtaagtgacagtagcgttatcgactaataaatgtggcttttcaaataatgacgatgcgtttttcattgattaaatccttttgcgatagtatctactgtcatattcaacagatcgatataggtaggaacagggccttttactgtagagagggaatcaacataaagtacgccgccatatcgtgctttggtttctttgctgacttgttttgcgggtttatctgaaacagtactttcactgaaaacaacagggattttatgttctatcatcgtatcgatgacacggcggacctgctgtggtgtaccttgtgcttcggcattaattggccataaatagacctctttgaaaccatagtcttgtgtgagatagctaaatgcaccttcactggttaccagccagcgttcattttcaggaatacgagacaggcgctctcttaatggcgcatccagtttggctatcttgtcagcataaattttggcgttacggttataagtatctgcattttgtggatcgtttgtgactaaagccttacggatattttcgatataaataagagcgttattcggagacatccaagcgtggggattagggttctgattataaggcccttcgcggatcgggagtggagtaataccttcggtgattacagcgacaggaatatcctgcatattttcaaaaaaacgttcaaaccaacgttccaaatttaacccgttccagaggattagatcagctcgcttcgccttaatgatatctttgggggtgggttggtaatcgtgaatttctgcgccgggttttgtaatagattcaacaatagcagcatcccctgcgacattttgagccatatcctgaataatggtaaatgtagttacaaccctgaattttttatctgcatgagcttgcaggctgaataaggtaatagtgaagagggtaatagttatacggagtatcgggaaaatagaaaaagaacgttttttgttcattattgtaaaccttatttgttatgcatgcgattgttgataatgattatcaatatcatctttataaagtcaaggtgatacagtgatatgattgataattttgcaggttatcctgaatttttctggtttctaaaatcatcatgcgaacaaaaaaacaacatgttgtctagtgttttgaagttcattgaatataactgcctcaatttattttgatgagatatataaaaatattttcattttattcataaaattatatatgctttataaggttaattttagtttaggagaacttttcgtgagattaaagtttattcatgttcatatttttttgatgatattgctaacaggatgtacaaatcaggagtctcaacaagtaaaaaatgaccataaatcaacatcgaaaagaatattcggcggcgatggtattatggtgtcgcagaataaattgaataatcagagaagagcaacaccctttgataattttattgcacaggctgcaaaacgttatggggtggatgaaattttgatcagggcaattattcaggttgaatccggctttcgcccagaagttatcagcaaatctaatgcagttggattgatgcagattaaagcctctacagcaggtaaggatgcctatcgactgaaaggtaagtcagggcagcccactatgcgtgaattgaaagaccctgaaacgaatattgatcttggcactgcctatattagtattttgaaaaaacagcatctaagcggaattattaaccctgaaactttatattatgcaacaatagttgcctatgttaatggcgctggggcattattgcggacatttgattcagatcgtaagttggcaattaataaaattaaccgaatgacaccgaatgagttttatcagtatgtccagaataatcatcccgcaccacaggcccctcgttatttatggaaagtgaagaatgcctatcttaatttagagtgatttttgtcacactgaattgaatatgtgatttattattttttctattagttatcaagaggacataatagctttcttttacaaatacgctccgtctctccagttgctctttgttggctacgttcgtccatcccaatatagttatctaaatatattttcagaacaatgtaattatcctactactaataattttttaataataaaggaagtgtcatgtcattaaaacgagaaaacagaagacctgaatttattcagcattggacacaaaacgaagaagaagagagagcaggataccccaatagtaatgaaattttcactataggctctgctcttggtaaatctctgggactaaagaaactgggtatccaccacgagcgccttttacccggtcgtagaacgtcttacccccacgcagaaaagaatgaagaagaattcgtgtatgtgcttgagggaacacctgatgtgtggattaacggagaactgtatcgattagagccgggagataccgttggttttccggctggcacagggatttgtcatactgtaataaataatacaggatccgaagttaggttattggttgtcggagaaaaaagtaaacctgaaaacaaaatctggtatccactgaatcaagaatatcaaaaaaccagaagtgatggatgggattcacctcctgaacaagtttttggcaaccataatggtcaaccagataaaaatagataaattaacgcaggttattatctttaaaccaccttcattttggtggtttttacataaggacagaattatctcgtcagcatcagtattagccatgtaagtggtatcaaacaggaaaatttgaatatggcattcatactatagttatctatgtaaacaactatggtgaatgtatgtttgatgacttgctgaactgggtaataaaaaattactctgctatagcatcaatattgtctgctttgacagcatttctcggaggtatctgggtcatgcttaaaaatgtctatagcagcctgaatttttttaggaatagaaggctcacaaacaatattgattatcttgagaaatatgatgaatacctgagtgaggaagataaagtctatattaaagatattattacttctgagattatgtttaaagtgactaagattaaatcaaaggatcttaggcacttagtcatacaattgaccagtttaggcattgaagcagggtatatattcgatattaaaagattaaaaaaatatgtcatggtgaattcggattttgcaaaaataaaaattgatacttcttatgttttcaattattggattgagaaattaatgtctgttgttatttttgttttgatgctttttattgcatttaaaatattatatgtggatggtcaggatatcagtagcctgaatacggtagttatgatatttctgatgattattttagaattgctggggatctgttttttaacgttaagtgtatcaccggggagaataaaaaaaataaatgcagaattgtctaagcataagttgagtgattagcgttcaagtcttttcaaaccttgaagtcaggaaatcttggagactgagaaattacaggaaaactgccgtttttttggctaaaagaatttatgtccattgaataataatacctatgttgttctttttatttgttgctgaatgatatgggtgataacatcctccgtcgagttaaagcggtgtacatgagtcggttgtcattttgtgtacttaactgtgtacataacttgcatggtgcaacaagtgcccgcaattaacg

SEQ ID NO: 203 - DNA, 8093 bp, Xenorhabdus sp.
  CDS (705)..(1919)
gaacccggttgacgggctggatgacatgctggtcagcgtcaatgccgccaatcccattgttaactctcaaccgcctgaacaggaggatcaaaccgatgtgtgaccgagaaatgcgctgttaccccggtgaagtgcgcacggaaaccccggagaaccagccgacccgcattgtcggttacggctcggtgttcaacagtcgctctgaaccgctttggggctttcgcgaaattatcaagcccggcgcctttgatgaagtgctcaacgatgatgtgcgtgggctgtttaaccatgaccccaattttattttagggcgcagcacggcgggcactctcaccctgaccgtggatgaacgcgggctgcaatacagcattcaggcccccgataatcagaccatccgggatctggtgctggctcccttgcagcggggcgatattacccagtcgtcctttgctttccgggtcgcccgggacggtgaacgctggtacgaagacgacgaagggattgttatccgggaaattcaccgtttctcccggctctacgatgtcagtcccgtgacttacccggcgtatcaggaggcggattccgccgtacgctctttgaatcaatggaaagaggcccgtgacagtggcgctttccggcaggctatcaaccaaaaacaggcgcgtgagcgcctgctgactttactgaatatttaggacgggatcatgaaattgcatgaactgaaacaacgccgtaacacgattgcggctcaaatgcgtaccctgcatgacaccatcggcgagaccgcatggactgacgagcagcgcaccgaatggaacaaggccaaaactgagctggacggcattgatgcgcacattcagcgtgaggaatccttacgcagtctggatcaacaactggtggacaacactgaacccgaacagcgtcagcagcccgaagccgagcaacaggcgcgtcgggcggcggcctttgataagttcctgcgtcacgggctgggggaaatgacgacggaagagcgtcaggcgctgcgtgagttgcgggcacaggggacgaccccggacgagaaaggcggctacaccgtgccaacgcagatgttaaacaaagtggtggagtccatgaaagcctatggcgggattgccagtgtggcgcaaatcctcagcacctccaccgggcagaccattgagtggtcaacggcggatggcacggcagaggaaggcgaactgctgggtgaaaacaccgccgccaaagaagaagacaccgagttcggtaccgcgtctctcggggcgaaaaagctgtcgtccaaaatcatccgtgtttccaacgagctgttgcaggactccggtattgatatggaagcctatctggcaaaacggattgcggagcgtatcggtcggggtgaggccaagtatctggtgaggggcaccggcacgggcagtccccagcaacccaaaggactggcggcctcggtcacgggcatggtggaagcggcggctaaattcagctggaaggacatgaacgccctgaaacatgcgattgacccggcctaccgtaatgcgggtaccttccgctgggcgttcaatgacagcacgctgaaaatcatcactgaaatggaagacggtcagaaccgcccgctgtggttgccggaaattgccggtgtcgtcccttcgacgatattaggcgtgccttacgtcattgatcaggcgattgccgacatgggaccgggcagtaagttcatctactgcggtgacttcaaccgctttatcgtacgccgcgtggcctacatgaccctgaaacggctggtagagcgctatgccgattatgatcagactgcgttcctcgccttccaccgctttgactgcattctggaggataccgccgcgattaaggcactggtgagcaagggcaacgccccggctgcctaaccggatacccgacacgtcagccgccttgtgcggttttttttgcgcctgcgatccggtgcggtcgcgggcagacaggaggtactgtgtcttttcccacactggaaattcttcggcagcaatgccgtcttgaggaggataacaccgccgaagatgatctactgaaaacttatgcccgtgctgctattaaccgagtggaaagctacctgaaccgccaactgtatgaagaccgtatccctgctgacgacccggacggactgctggtcaccgaggatgtgacgctggcgatcatgctgaccgtcggctactggtacgaaaaccgcgaggcgcaagccttacccaccggctttaaggctttactggagccgtaccgttttattccgctataggagcacagtatgagagcaggcgcactgcgacaccgtatcaagctgttccgcccggttattgagcgggatgcactgggggccgaaaccctgatcccccactatgtgaccacggtatgggcgaaagccaaagcgttatcgaaccgcaaaacccgcactgctgaccagcagcaggtaattgaaatgcaggaattcactgtcagaccgcgcaaggatattgatatcgactggctgattgagcatcagggacggcgatttaccgtacgtgccgtggataacaaccggcctgaccgcacgattatcagcaccgaagccgaggttcgccatgatcgagcttgatattcacgccgatttagaacgcctcactcaattaccggcttatccgctacttttgccgtcctcggtttcagagggggtgacctaccagcgcatcagcgatccggcctttgataccgggttagccccggcacaattgattgaggggcgttttcaaatcagcatcatcacccaaaattacacgcaggcgctgcaattggaagccacgctaggtacggcatgggaagcaatacaacatggcgttatcggtcgtactccggtgcagtcagtcacccgcggggcactgttgcaggagatggtggaagaaaccaacaaccgcaagcgttaccgcattacccgtgactttatcattgcttatacggaggctgaccgatgattaaggctaacgtatccggtctggcggaattagggcgcaaattgcaggaattagaagttgccctccagacaaagattctgcgtcaggcgggtatcgcattgattatgtgattgaagtcgcgacagacggcggctcttattgggatttaccgacgctggcagttgatggtaagacgaccaccaaatatgaacgttcacaccgcatcgatttacccaaagctcactccggctggcaggtgcgtgtgcgtcggttaacgcctaagcagaacagtaaccggattgctgatgccatgatggtagaggccattactgaggtgattgatgccaagctgagttaccccgaaacggctttattgttcgttcagtttgatgccaaacagtttcgtaatatcccgcaaatctcctgtgagccgaaaatgcgggtgatccgtgtgccggataattacgacccgacagcgcgcagctattcgggtgtgtggtcagggcaattcaaatgggcgtggacggataacccggcatgggtgctgtatgatctgatgatcaatgaccggttcagtattggctcacgggtgagaaccgaaaacttaagtctcgccaaatgggatttataccggattgcccagtattgtgatcagtccgtgccggacggtaaagggggcacagaaccccgtcacacctgtaatgtctatatccagtcacaggaagaggcatggacggtactgcgggatatcgccggtatcttccgggggatgacctactgggccaacaataacatgaacgtgctggcggatatgccacgggatgtggattatctctacacccgcgccaacgtgcgtgacggtaagtttgtctacagcagtgccagtgaaaagacccattattctaccgcgatggtcagctggtcagatccgcagaacggttatcaggatgcagtagaacccgttttcgaccaccggctaattcgccgttttcaggtcaggcaggccgatgtgaccgcgattggctgtacccgacagagtgaagccattcgacgtggtaagtggatattgcacaccaacgagtatgaccggatggtcagttttaccgtgggattggatggcaaaattcccttgcctggctatgttatcggagtagccgatgaaatgctggcaggtcgggtgctgggtggtcgtctccacaaggcagacgggcgcaatatcaccttagatagagtatcgtcggcgaaagtgggggaacggctgattctgaacctcccttcgggcaaggcagaaggtcgcaccattcaggcggtcaacgggaaggtactcaccgtcacgacggcctattctgaaacgccaattgccgaatccgtttgggccattgatgccaccgatttagccattcagttgtttcgggtcacggggataaaagaaggggatgacggtgtttcgtttgaaattaccgccattgagcataacccggataaatacgcccacattgataccggcattcgtattgacgaacgtcccatttccctgattccgcccggtgtacagtctccgccgaaaaatgtcgttatcagcagtgattcggtagtgcatcagggcattgccattaccaccctgcgggtgacgtgggacacggcagagagtgccattgcctatgaagccgaatggcgtcgggataatggtaactggatagccgcaccgagaacctcaacgcaggggtttgaggtgccgaatatctacgccgggcgctatcaggcacgggtacgggccattaatgccgctgaaatctccagtctgtgggcgaatgcgccggaaacgcacctgaagggcaaagccggtgagccgcctgcgccgttaggttttaaagccacgccgattgtgttcggtatccagttagactggggttttgcccctcatacggacgatacgctaaaaaccgaaatccagtacagcccgacgagtgacggcgagggactgatgttactggccgacattccctacccacaaaagacctatgtcatgcagggactggcggcaggcgttgcgttctatttccgtgcccgactggtggataaatccggcaatcaatccccgtggaccgactttctgcgcggcgaatcctccacagatgcgagctggattactgacgccgccggtaatcagttcctgacagccgaggccggaaagcggctacaggcacaactggattatcaggcggaagcggacctgattaatggggtcgctattcaacagaatagttttgagctgatggcaagggatggggaaaacaaggccgaaatcaggcgactggaccgggtgtttgctgaccgtgaagtggcctgggcgcaatccattaaagaagtgaaatccagcgtcggagagaatcgctcttccattcaggaaaaccagaaatccatcaataaattagacttgtcatttgcagagagcgaacagcgtgttcaggcgcagctaaaagatcagcaggcgatcatcagcaccaaaatgcaagccgagtttaatcagcccggcaatggttacgctattcatagcgtgaatatcactcttaagcacaatggggtgaaatataacgccgggggcatggtgattagtggtgagattaaaaacggtcaactggaatcctatattgggttttctgcgaataactttgcgttttataaccccgctaacggtaaattagaaccatttatggctgccaagaatggtcaactgtttgtcaggcatgggtttatagaggatggcagcatcgacaatgctaaaattggtaattatatccagtcaagagattataccgcgggtcagacggggtggaagattgataaaggcggctcagcagaattcaataacgtgactgttcgcggcactatacatgcaacaaatggtacatttagcggcacaatcaacggcgctgatggtaatttttcgggcacagtctatgccagtaaaattatcggtgatgttgtttctgtcacattggggaatgtctcaatgggaagaaatacccatgttttttttcataagagactgaacgaccccatgccctttgatcgggtttttttttatggcccaataatgactcagatatatacttcaaatctggggttagggggcggtcatgcggaagtttcggtatatatgaataataaacatatggctggacaggtttttgttacggaagaacctgataaaggaccgcaatgtctctcaggcacaatgtttacaccgcccatagttattcccgccaatacaacacccacgatcaaagttgttctcgtgactagtggaccggggactgtttcctccactcggggtattggtatgttatttagagccagcagccagtggactaacgtgtagttactgttttctgtctacgactaactgaacacgtcagatttattctcaggaaccaaaccatgatttatgcacaaggcacaatttctattgtgtccggctcagctattgtccggggcacgggcaccaaatttaaagataacctgagcggcattgcgccggggcaggtgatacttatccagtccggcagcagtaatttactgcatatgatacaggccgtgaattctgataccgagctggtactggtggataatgtgaatatgacgctaaataatgtgacttaccaaattcaggtgaccgtaccagactctgtgtctgatggcgtccggcatatggtggcgattaatgcctatatcgtccagtttctccagaatatggataagtggatgagtcagaacggggcggtggaggtgacgttgccgaatggacaaaccgtgtcactgcaatcgataaaggcgatgaatgaagccattgccgggaagctggataaagaccagaacggagccgatattccgaatacatcggcctttgtaggcaaccttggtttgacggacacgcgaaatttagtgaaaaaagttatccattcatcggggaactggataatggtgggggatgagagtaagcagggttggttgggaaaaagcgataatgatatttatgtcgggaactcaaaatccaataagtatctggaactcaaggatgacgggcagttgaaatatggcggtactcagattatcagacaaggggattttggtgtgggttcccatgatttgtctggtaataatgatgctggttatctttggaatgttgccggggatcaacccacgggattttacagttacacgcctaagtcacatcaggatgaacaatggggttcattcatcaaactgcgctggaatgaaggaaaccagcagtatctgatactccctaactttggtgcggatgcgatgcggattgtcaggtatattggtggtgatagctggacagattatactgtctggacaacaggcaataccaccgttgatggtagcggttacctcaaaaaagcctctcccatcatccaaatctatccgacaggcaaattcaccactaacgacgaatccgaaggcgcgacggtctctaaacccggtctcggtcattatcaggtgacgggtgtactgggctataacgctgataaggcatggggtgtgcatggcggtatttcctcaccgaagaacaacaacgggctggaacttatctacattgatgacaaggtgaacaaggacggcagtatcacgattgagacgttccaccgtcagcatagccacttaccggcacgctttcagaacaagcggataaaagaaattgttaacggggaaaaggtgtactatcaggacggtgagccgtgtgatattcccgaaggctgtcgtttggatgtccgtgtccaaatgccggcgaattcggtgtggaatgtgaagcagaaagaggccaaggttgcggctgatagtgagcagactgaacaggtggagtaaggcagtgattaacccgcagaaagctgcgggttagatagcttgttctagtttaggcttgaacaattagggcgtgttgacgttttgttttcatcacttactcgacccacatgggtaaccagataatgataaatgccagtgctaatgtgctggcgtaatttctcgctaatttatcgtatcttgtggcgattgcacgaaaatgtttgattctgg

SEQ ID NO: 204 - DNA, 8093 bp, Xenorhabdus sp.; identical to SEQ ID NO: 203
  CDS (3103)..(6375)

SEQ ID NO: 205 - DNA, 13535 bp, Xenorhabdus sp.
  CDS (9109)..(9696)
tgtgctctaaagagcgggctgaacataagaaggggtgtgcttttttgctccactttttgacagatccacccttctaggcttatgtttaggctttcctttctccttggccggaaattttttggcttgggttttagaacctccttcttttttaggtggctctttatttgatggctgatcttttggcgtatccgttttagtactttcatattgaactgatacttcaaccttggcacttttggattctctccgcttatactccaccgtctgtttagccgttgtacgtgtatccagccactgcgctattactccggtataagactcacgatcagatagtgtaaatctgtgattatcgccagaattacggataattttaaccggaggaataggcgtaccactgcctgtttcattctctccttgacgaataaacaacaattcgccatttttgaccgatgcaatcgccccttcctgcttcgcgactctagtcaaaaagcttacgtcagattcattagtctgatcgatatgcatagtgatgttttttaaagtatcactaatcttaaagttcaattgatttcttgtcgcgaccgtactaactatcgtttctaacgtgtgtttatggtaagacacctcgcgcttaacgttcagataaccgcgtaaatcaacactgcgggcacgtatggttactcgatcaggagcaccaacatgttcaatttcatcaataacgaattttccttttggggttaaagggcagccatgccaccccaattccaatgtcaaaatattgcctcttgatggcagtttgagttcaccatttgcatcatccagttcaatatcaagctgatctgattcccctcctctattatccgtcagagataaagacattaaacgtgactgtatttttccggtaatatccttattatcgatttctaagcgaaaagctggtgctccctctttgcctgtaatcaaatcgaattgaggtatccaacctgtatttggtacccactgtttgaaatcgatcatgagaagaactccttaactgtctttataccgtcatcgttcagtttcgaaagctcatcccatgagttaggcattttgcctttaatatccgtcagctgttgctgcaaatcgcccaacatctccaacagattgttatcaacacgccgtagtgttagcgtaaagctgattttacggggcgcaccacctgacataaattccgtttttgtttgatcaatgctttcaataacaaacatgccataaattgcgccactaccatcaatcaaagaccatgctttgccactatcagccatcaatttcaatgctgttagtgacaaggagccacctgtcagttcaggataaagatcgccagataacgttactgtatcgttatccggccccacaaattgccatgcaggccgtgctcccacacggctattgaaggcatgtctccagctttgtttatgctggaaactttgatatggcgtagttttcagcataaaaacaaataaaccaagtgcagccatcataagaaatcttctcctctgtcagaaagtgagctacgcatacgggcttgctgcatacgttcccgttgttccagttcctgtctgaccattcgggcgatatcctgcgcggactgtccctgagagccatagacataaatgttgtattgcggcgcggcgctagcttgttgctgcggctggctccgcatttgttttgcctgaacttcctcataggcatgagcaggcaaactttgtgcatgtaacggtgcgtcctgcgctgcaacaggtaatgacatagcgctgatggcaactcccacggctgcatacttcgccgtatctaaacggctagtaacactggctccgccactgacaagttcaggaccacgttcgccaacaatggctgtttttccagcagggacatagccacctttatctaataaaggcgtttgtactttcttagcctgctgagccgtttcatttttagtaatttcctctgttttctttagtgcaacttcctttttctcatcgcctttccaccatgatgtgaagacgtcagtaatagaagaaatcttacctttcagtgcttcccatttttcctgaatacccgtcaacagattatcgatcatatccgaaccggcagtttttaatttctctggaatagcctgaacatcggcaacaatttcatcccatttatctgaaattgattttttgacactttcccagatttcagatgtattctgtttaactgactcccaggcaccactgattgttgacttgacccattcccaggcttccgaagcactttgtttaatcgtgtcccagttattgtagataatgccgattaagccaccatccatgaaaaaactcttaataccttcccacgctatgctgacaaggtttttaattccctcccaggcaccactgaagatatttttcacgctatcccataaagccataaatttcggtcccagtgactcccaattctgccaaatataaatagcagccattgcgatgacaccaataatggcaagaattgggtttgccatcatagcccggccaagaaacatcattaccttacctaatgtgctaaaagcattacttaaaaaagacaatccttttacaccgacactcgccagaatatttatgccgtttcccaaaaccccgaaaactttttgcccaatattccctaatgcccctaagccccttctctgttttccaaaggaatctttatttcctttgttagatagcaaatcagcaccatcatttagtgagccaaaaactttatccccggttttaccaaagaaatccatggcagctcttagtgcttccaaagcctcagttccgaattgtgcaaatgccttcaagccatctcttaaattctccatagcctgaataccgacctgagcaaatctattcaagttggctcttaattcttccagcccctgaaccccgatttgagtaaaaatatccagactagatttcagcttatccagcgcctgaacacctaattgagcaaagaaattcaggctggcttttaattcttccagagcctgtatgcctaatttggcaaatacatccaaaggagaagttaatttattcagagcctgaactcccaattggacaaatgcatccagcgtggattttaatttatccagtgcctgggttcccaattgggcgaatatatccaatggcgctgttaatttattaagagcctgaactcccagttgaacaaatgcatccagcgtggattttaatttatccagtgcctgagttcccaattgggcaaatatatccaatggcgctgttaatttattaagagcctgaattcccaattgaacaaatgcatccaacgtagatttcaatttatccagtgcctgaacacctaattgagcaaagaaattcaggctagcttttaattcctcaaaagcactaagtcccaactgaaaaaatgcttccagtgtggatttcaatctatccagtgcttgaatacctaattgggcaaagaaattcaggcgagcttttaactcattaaaagcattcaatcctaactggacaaatgcttccaatgtggatttcaatctatccagtgcttgaatacctaattgggcaaagaaattcagactcgcttttaactcttcaaaagcactaagtcccaactggacaaatacatctaaagaatgtgttaatttattcagcgcctgcatccctagctgcacaaaagcatttaaactagatttcaatgtatccagtgcctggctacctaattctgcaaatctattcaggctggatttcaatgtatccaacgccttaatacctaactgcgcaaaagtgttcagactggactttaatgtatccagtgcctgacgccctaattcagcaaatttgttcagactaactctcaagtcaacaaaaatctgaatcccaaattgggcaaaaatattcagactggcctttagctcaacaaaagcattaattcccaactgcataaaaaagttcaggcctgctcttagttctacaaaagcccgaatacctaattgcacaaaaaagttcagacttgctcttaattcagcaaatgcctgaagacccaattggatgaaaatacttaaacttgtcctgagcgcaacaaaagccctaacgccgagctgcacaaaaaagttcaggctggctcttaaatctgcaaatgcctgaagacctaattggacaaaaatacttaaacttgttttaagcgcgataaaagccctaacacccagctgaacaaaaaagttcaggctggctcttaaatcagaaaaagcctgaagacccaattggacgaaaatacttaaacttgtcctgagcgcgacaaaagctctaatactcagctgcacaaaaaagtttagactgttttttaaatcaataaatgcctgaatccccaacaacgtaaatatatttaaactgattcttaaggaattaaatacccttatacctacattgccgaatatttgtattttatttataattgtttggaatgtaatatttacaaagccagccgttaaattcaaaaccccattaattttattcagcatgccaaataaaattgttatttgaggattaatattaatgaccaatttatctaacaatttaaaattgttagtcatattacccgttacaccaacattcaattcattttttttaccagatgaattttcctgtctgacactttgagttatttgggtaatattaactgattggctggcagcactgacttgcgtcacctttgaggaactctgccgcgcagagaaagattgcttaattgtttgattataggctttaagatcggcgcgcatacgcgcagtttcctgcgcataaccaacaactggttttaacccttcgacagtcttattaagctttttaaactggttataaattttatctactgaaccaaccagctttttttgctgttgttgaacagatttaaaagaactggtcagcttattaacggtactaagtaccttatcaagctgtgactgtacattactcattttctgcaccacttcttaaaatggcccgatgtcgccagtccaataattccgacagtgacatttcatctgtatctgccggtctccagtgaaaaacggtggcaatatctgccaccagttcatcaacggttaatcgttctgggaatcggacttgaccgacttcggcaacaaaaaattgaccacctccacactgagattaatcagatcaccgggtgacatcatcatcaggtcattcttggtcaatgcaggagtggtaacacgtggcagaatcagcaacatagaatccacatccatttccagcagtgcctgtaaacgagcaccgcgcagcgcaccactggtaggtttacgtaccgtcacttccgtgatttttccgttgcctcgcgccagtggagcttccagttcgattgtgcgcagatcttcattttgagttttcagtgcttcagtcataattcaaccttgtttatccgagtaaaaacctgcctcagccgaaaatatgctgggtgagacagggaataagttttgaaatttgctaattaaaagagcgattaaaacagaccgatagcgcggcgatgttgtgccagacgatcttctccgcccactttttcaaccatgttgacggtgtcgatttcaatcagttcttcgccatcccaggtcaatttgaagtaagtgtttttagcggtaattttggtttgtgtgttgtcgccttgtttataagtaccgtgatcgaattcctgaaaacggccacgcatcacaacttcaactgcaaccacgtcacctgtatcttcgcgctcaaaagagccggcaaagcgcagcatgacgccatccacttgtgcaatgccccactgtttgtacagctgagattcgatcccgcccagagtgaattccgcatccagtgcgccttcatccagacccagatctaccattgcgctaccgttcataccggcaccacggtaggcttccagttttcggctcagtttaggaagcgtcagttcttccacgataccctgatagttgttgccatcgttgaacaagttcaggtacttaagtttgcgaggtaatgccatcagttagccccttatttattgatacttttcgcgaaatccatcaggtaactatctgtaatacgctggcgtaacatcatgttttccagaggtggtacaggtgtatagtcgtaatcgatggtcagtttgcctgctttcagagtgtctttatcgttgattttgtcgtcataccagcaacgaccatcaataatgtaaccacccgctttcagctcgcggaacttagcattgatgccttcaataatgtcgcgtaccagtgatggagtcagtggtttgtcgattgcccacatgtgtgcgtcagccatggtgtcagccagaacctgtgcggtacgggtatagctttcgaattggaacagtgagtcctccgaatcagcgccagcacaagtacgtgaaccccagaaacgaaaaccgtttttgcggatcagtgttgttatgtgattttggttcagcagatcagcgtcagttccaatcgcttgcagatcccagaagacatcagcagacagacccgttacaccgttaacgcccacgttggacagggttttgtgccatccggtctcttcgtcaattttggcacgcaagcctagtgcataagccgttgcaggtgcgataacttcacctttatcccagctcaggaaatcaggccaaatcagcatgagttcacgctgaccgaagttttcacgatatttgataacttcggagatatttttgcagccataagcgctgacatacgccattgctttcagttgcttggcaatagaggtcagttcagcagcaaccggttgtgagtccaaacccggagcacccagaatacggggtttcacaccgagttggctttgtgccgccaacagtgcctgcataccggttttcttaccagcctcagtaacaccaccgataatgttagaaattgttgcttcttcagattcgccctcttccacacgaacaactacagtcacaggcagagcctgagcagcgattgctttcagtgatgcggacaaagtacctttttgtccagctttaccactggcgctcataacgtcagtaagcagaaccggagtatttaatggaaatgtttttgcgtctgcgtcaggaccagtacaaaccataccgacgatagcagtgctaacggtagtaatggtacgagtaccttcgttaatttcctgtacacggactccgtgatgataatcttgtgccatgttagcgttctctcctgttaaggtgtgggcatatattggcggattaagacttttaaatcattcggttagggatgtgtggtgaggggtacaaattggttgaaatatttttatattaaatcagttggttaagtttttaggtatgcagaaggtaaaaaaatccgccccagtggacggtttagtcaggagttatcagaataactcgctgtgagagcctaatcgggcaagctccaaaacggtattaaccaacttttttgtaaatcagcagtagatctggggtgaagatgacaatcccggaaaccccgccagttcccttttagtggatgatcgacatatcttggcgggattggtttatcgtttaccagtatatccagtatttcaactaaactttcatcgatagttgcgcgatatttacctttcttaacacgcttatagtccttcttgaactcagaagaacgactaatcttcctcatcattgttcagatcatccatgaaagcagaaacactatcaaacgttttaccattcccactttcaagctgtttaatagcagcttttgtgcgagaagcattccggtaatgagtacctttcactttgaagggtagcgtatttttttccgctacctgtaccatcaacatgcgaatagcatcgcttactgtcaaccccatagattggagtgcaatagttgcaagttctttagttttagggtcaattttcgccctgacataagtttcattagccataaaaatcccctctttctttacataacagctattgattgtagtcccactgtagtcacataacaagactaaaaaacgtgctattgctgaacttagtgcatatgaaggtttttcactcatacgtcatgtaaggtgaaataaaagtactaaaagcaaccaagatttgtttgtattttatcctttttgccgagtgtttctataaattgggatattgggtattaagtgaactataaaatgtgtatatttttgcttattacttctttggttattgtctttcgccttctgttatcagtctcatcatgtattcatatagtgttctataaaacctcgggttaacggaaaccaaagagctggcgaaaaatgcggtgccaaaatcacggaaggtgaatgggaaatctctagatgaggatgtggatttaaaatttaatgatgttggagcatacccagcattgaaatctgtcgataaaattccctctcttggttacaacggaccatttagaggttcaacttcgacacactatgtaagaggagtcagtattggggatactgactatggtcaaatttgggtcaattcatctgggaggttattcgctcaattctctaatactaatggcgataaaccggggggtgaatgtatttatacgagcgatattattggcataccaatgccatggccaactgatatccttcctataggttggttaaaatgtaacggtgcagaatttactaaatctcaatacccggaattagcaaaaatttacccatcaggggtattacctgatctacgtggagagtttattcgtggttgggacgataaacgaggtattgatatatctcgcggattactatcatggcaagatgcaacagagctacctaacatttatatttatgctgcttcatctactagaggaagattaataacaccacctgttaatacttatcctgatacatatccttcagataatacagccaagaatattgaatcccctaaatatggaagtggagaatatttctcacctgttgctgatttaattcccacaggtgcagtttcattggctaattttagagtgagaccacgaaacattgcatttaattatattttgagggctaaataatgtcagaagctaagctaaatcataacaacatagcaattacccctgggaaaataacggtttttaactacgatgctataactaaagaatatttaaatagtaacattgaatttctagctgttggagtgggagttcctgcacattcatgcgttgatgagcctctgaatgttaaatctggcttcgtaatttgtcgtaaaaaagatctaacaggttgggaatatttaccagaccatagaggaaaaactgtttatcacataaaaactcgtcaaaaattaaatgttactgaaataggtgagttaccaaattattttacattcaaaaaccctaatacaaatttcgataattgggatggtaaagaatgggttacggatgaatcttctttaaagaaagatcaagtatctaaagcagggaaaaaattatcaacgttacgtaaagaagcacatgatgtaattttgatattacaatatgcaattgatactgaactagcaacaaatgaagaaaagttatctcttactaagtggaaaaagcatctagtattattaagtagaattgatctatctgttgcgccagatattgagtggccagaacaacctaaataataatcaggggcattatgcccctgtaattattttatttctggcgtgtctggccattctatattattaatgtcatcgcaattaattctgttaataataacacgatatcttttccattcttctagagctttaatttccttctctgttgctatattgagttcgactgcatcttgtagaggtaatataacctcattggttttactcagtaatcttctcttcttctcttgagcttgagttattaattcatcttttgtgtattcacgtggaacaatttcaccattgatatactgccagtttcctataatatctatgccattcggcaatgattccatctctacaatactgccattatctgggcatatggctgaggcatctttgtttattgcacaaacgacatagttggagttatattttactttgtaagtctcttcttgaaattttgatatacttttataccaatcatcaccattctcattacaataaaatatagctctaaattttttttcaatttctttttcttccaaagtatttggcgaatattttttgaaattttttaaatgtaacattacaaagctcctatattatgccaaattccattaattagtttttgaaatggtcgacgggaaacactatcaggaaattcatctctattataattagatacttctgtaataacatatggaggagtatcactatagccatacccacgccaaagtgtagcatgttcttctgtacccaatctgacatcttgaatataccttgagttagcactctcaactgttaataactcagcccaattctcttcaaagccataagaatcacgagcagaacgataaaacaagcctccatttctataatttgctaacaattgcaaagtgggacaacttccaacacctatattaaagttcactatcaacttagaatgagtagaaaaatcagaataatataaaccactattagcattccatggaatattatattcagatactatctgggtcaggcctagaatttgatatttagcatcagattcggacttagtataactatcatcagtaaaagccaattctttaataggagaattagcagtacctgcatcatttcctgcaactactttcactcgtgcagttgcatagttaactgaaaatgaggcataagtatcacctgcttttagaagcaacccagcaccatatgtgtgtgtgtagtctgaatctgctgagttcctaaaaaattcaggactggccccagatctacgtatccaattgaaaaattcatcgttatttttataaataacagtaccgccactaccgccaaatccaaagctacctttttgttgatatttactatcagcttctgattttgacactgcatttttcgccagctctttggtttccgttaacccgaggttttttacaaactcgtctttgttcggaatgtccgcaccgtttttgtttttttctaagcgggaattggcattttcgttagctgcatttacacgagcatcagtttcctctttagaataagcccccacttcgtcagaagttggtttatttgcagtgttatagtctcgcctccagcttggctgataatccttgccatggttgccataagtaaattgtgcatttgggatacaaccatccaccgatgtaggagctgttgtaacacggatcgtcattacactttcaatgcccattacttccacaacagcaccagccaagtggattgaaccacagccagtctcggtgatccttctgttactcgcatatgaccatgaacctttacacacccaataaggatggttaaaagcaccttggctttttagccactcaataaattcagctgtagtccaaactccaccaccaccaatattaattgctccagtaaaagctcgggctgaaccaatattacggttaaatgcgtctttatcggttacatccgcaccattcttactcttttccaagcgcgtattcgcattattattcgccgcattagccagatcatacgctgctttcaccgctttcggtgtggctgcatgggtttcgctattgctgtctaccgcgctacttaggatgacaaaacctttttctttcagcgttgcatccggatggttacggctgttcgcgtgttttgtgatggaattatccacatactcacgggttgccagaacaatggatggatcaactttcagcgtgaccgcatttgcgctgctgacaatcaggatcattcggatcgtctgagtacgaccggaaccttcctgcaattgtggtttgtaggtttctgcacagttacctaccgcaaccagaacgccgtctttgtcgtacaggccgatttcacggatccaccagccaccttcggcttcaggaataacctgttccgcgataatctgattggtgtttttcggatcgatgctcagcgtattaatcgctgcccggcgtttttcattaatcaatttagtttgtttggtatccggtaccggctggctgccaccaccatcaccaacggccatatgggtaatttcaatttttgtacccagtgccgcagcatttgccaatttatctgcacctaactgtgtcagcagcgcaaaatatttggtactcatagtctaatcctcatgtcgtcaataatatgtacccccgcgcccacaatttcggagccggatacggtcacttctttcgggaaataggggtaaacggttagttcgtcaccactgtaagtcgctgccgagtagtgatatccaccacgggtatcaaggttgatatccagcccgattaaatgtcggctcactggcttggcgtcaaaaatcagtttttccagttcttcgaacatttcatgggtgatgccgctatccaaaacaccgatatccagtcggaaggtgcccggttcatcgttggtctgccaccactctttaacccggatgagatagcccaacggttcaattacccgtcggattgccccaatggttcctttgtgtttatgcaggaatagtgaacctttgatcacttcccttttgatgttctcaggccagttctcgtcccagcgatccacagaccacgcccatgccagataaggcagtaatgatgccggacaggtgtccgggttccacagctcacgcaatgggattttgatcttctgcaacttagcacaggctttcgccgcagccagttctaactgcgttgaacccatcggcagaaggcgatcattcatcagagcctcccattgtcagcgtggttttggtgcagtaagaagcttgtgttttatccagcacgacgtctttcagtggcgctttcagttctacacgctggacaccttctacatgcaaggcggcataaatcgcggataaacgaatgtcacgccccagacgatgctgtgcttcgacgtagtgtttcagcttctgctccgctgctttgcggataggttctgactccggtgtcgggaagatgtacagcactgcgtcaatttcatattccacgatttttgctgactgaactttcagacgatcagccaccggacgcacgttttcgtcgttcagggctgtttcgacaatttccagcagctctttggatgcaacgcctttgtcctggcgggacataatcgtcactgtgacgttagccggtgacgggctgattgccgaagcatctgcgacacggccatccgcactgcgggcatggaattcataagcacccaccgggccagcaacactcaggccttcaaaagcctgtggaatacggacacgataatcattgtcggattccatcacagccggagtcggcgggacggttgagttatccgcagaacgcagaaccagcgcgatagttttcttagagcacatggtccga

SEQ ID NO: 206 - DNA, 13535 bp, Xenorhabdus sp.
  CDS (3268)..(3795)
tcggaccatgtgctctaagaaaactatcgcgctggttctgcgttctgcggataactcaaccgtcccgccgactccggctgtgatggaatccgacaatgattatcgtgtccgtattccacaggcttttgaaggcctgagtgttgctggcccggtgggtgcttatgaattccatgcccgcagtgcggatggccgtgtcgcagatgcttcggcaatcagcccgtcaccggctaacgtcacagtgacgattatgtcccgccaggacaaaggcgttgcatccaaagagctgctggaaattgtcgaaacagccctgaacgacgaaaacgtgcgtccggtggctgatcgtctgaaagttcagtcagcaaaaatcgtggaatatgaaattgacgcagtgctgtacatcttcccgacaccggagtcagaacctatccgcaaagcagcggagcagaagctgaaacactacgtcgaagcacagcatcgtctggggcgtgacattcgtttatccgcgatttatgccgccttgcatgtagaaggtgtccagcgtgtagaactgaaagcgccactgaaagacgtcgtgctggataaaacacaagcttcttactgcaccaaaaccacgctgacaatgggaggctctgatgaatgatcgccttctgccgatgggttcaacgcagttagaactggctgcggcgaaagcctgtgctaagttgcagaagatcaaaatcccattgcgtgagctgtggaacccggacacctgtccggcatcattactgccttatctggcatgggcgtggtctgtggatcgctgggacgagaactggcctgagaacatcaaaagggaagtgatcaaaggttcactattcctgcataaacacaaaggaaccattggggcaatccgacgggtaattgaaccgttgggctatctcatccgggttaaagagtggtggcagaccaacgatgaaccgggcaccttccgactggatatcggtgttttggatagcggcatcacccatgaaatgttcgaagaactggaaaaactgatttttgacgccaagccagtgagccgacatttaatcgggctggatatcaaccttgatacccgtggtggatatcactactcggcagcgacttacagtggtgacgaactaaccgtttacccctatttcccgaaagaagtgaccgtatccggctccgaaattgtgggcgcgggggtacatattattgacgacatgaggattagactatgagtaccaaatattttgcgctgctgacacagttaggtgcagataaattggcaaatgctgcggcactgggtacaaaaattgaaattacccatatggccgttggtgatggtggtggcagccagccggtaccggataccaaacaaactaaattgattaatgaaaaacgccgggcagcgattaatacgctgagcatcgatccgaaaaacaccaatcagattatcgcggaacaggttattcctgaagccgaaggtggctggtggatccgtgaaatcggcctgtacgacaaagacggcgttctggttgcggtaggtaactgtgcagaaacctacaaaccacaattgcaggaaggttccggtcgtactcagacgatccgaatgatcctgattgtcagcagcgcaaatgcggtcacgctgaaagttgatccatccattgttctggcaacccgtgagtatgtggataattccatcacaaaacacgcgaacagccgtaaccatccggatgcaacgctgaaagaaaaaggttttgtcatcctaagtagcgcggtagacagcaatagcgaaacccatgcagccacaccgaaagcggtgaaagcagcgtatgatctggctaatgcggcgaataataatgcgaatacgcgcttggaaaagagtaagaatggtgcggatgtaaccgataaagacgcatttaaccgtaatattggttcagcccgagcttttactggagcaattaatattggtggtggtggagtttggactacagctgaatttattgagtggctaaaaagccaaggtgcttttaaccatccttattgggtgtgtaaaggttcatggtcatatgcgagtaacagaaggatcaccgagactggctgtggttcaatccacttggctggtgctgttgtggaagtaatgggcattgaaagtgtaatgacgatccgtgttacaacagctcctacatcggtggatggttgtatcccaaatgcacaatttacttatggcaaccatggcaaggattatcagccaagctggaggcgagactataacactgcaaataaaccaacttctgacgaagtgggggcttattctaaagaggaaactgatgctcgtgtaaatgcagctaacgaaaatgccaattcccgcttagaaaaaaacaaaaacggtgcggacattccgaacaaagacgagtttgtaaaaaacctcgggttaacggaaaccaaagagctggcgaaaaatgcagtgtcaaaatcagaagctgatagtaaatatcaacaaaaaggtagctttggatttggcggtagtggcggtactgttatttataaaaataacgatgaatttttcaattggatacgtagatctggggccagtcctgaattttttaggaactcagcagattcagactacacacacacatatggtgctgggttgcttctaaaagcaggtgatacttatgcctcattttcagttaactatgcaactgcacgagtgaaagtagttgcaggaaatgatgcaggtactgctaattctcctattaaagaattggcttttactgatgatagttatactaagtccgaatctgatgctaaatatcaaattctaggcctgacccagatagtatctgaatataatattccatggaatgctaatagtggtttatattattctgatttttctactcattctaagttgatagtgaactttaatataggtgttggaagttgtcccactttgcaattgttagcaaattatagaaatggaggcttgttttatcgttctgctcgtgattcttatggctttgaagagaattgggctgagttattaacagttgagagtgctaactcaaggtatattcaagatgtcagattgggtacagaagaacatgctacactttggcgtgggtatggctatagtgatactcctccatatgttattacagaagtatctaattataatagagatgaatttcctgatagtgtttcccgtcgaccatttcaaaaactaattaatggaatttggcataatataggagctttgtaatgttacatttaaaaaatttcaaaaaatattcgccaaatactttggaagaaaaagaaattgaaaaaaaatttagagctatattttattgtaatgagaatggtgatgattggtataaaagtatatcaaaatttcaagaagagacttacaaagtaaaatataactccaactatgtcgtttgtgcaataaacaaagatgcctcagccatatgcccagataatggcagtattgtagagatggaatcattgccgaatggcatagatattataggaaactggcagtatatcaatggtgaaattgttccacgtgaatacacaaaagatgaattaataactcaagctcaagagaagaagagaagattactgagtaaaaccaatgaggttatattacctctacaagatgcagtcgaactcaatatagcaacagagaaggaaattaaagctctagaagaatggaaaagatatcgtgttattattaacagaattaattgcgatgacattaataatatagaatggccagacacgccagaaataaaataattacaggggcataatgcccctgattattatttaggttgttctggccactcaatatctggcgcaacagatagatcaattctacttaataatactagatgctttttccacttagtaagagataacttttcttcatttgttgctagttcagtatcaattgcatattgtaatatcaaaattacatcatgtgcttctttacgtaacgttgataattttttccctgctttagatacttgatctttctttaaagaagattcatccgtaacccattctttaccatcccaattatcgaaatttgtattagggtttttgaatgtaaaataatttggtaactcacctatttcagtaacatttaatttttgacgagtttttatgtgataaacagtttttcctctatggtctggtaaatattcccaacctgttagatcttttttacgacaaattacgaagccagatttaacattcagaggctcatcaacgcatgaatgtgcaggaactcccactccaacagctagaaattcaatgttactatttaaatattctttagttatagcatcgtagttaaaaaccgttattttcccaggggtaattgctatgttgttatgatttagcttagcttctgacattatttagccctcaaaatataattaaatgcaatgtttcgtggtctcactctaaaattagccaatgaaactgcacctgtgggaattaaatcagcaacaggtgagaaatattctccacttccatatttaggggattcaatattcttggctgtattatctgaaggatatgtatcaggataagtattaacaggtggtgttattaatcttcctctagtagatgaagcagcataaatataaatgttaggtagctctgttgcatcttgccatgatagtaatccgcgagatatatcaatacctcgtttatcgtcccaaccacgaataaactctccacgtagatcaggtaatacccctgatgggtaaatttttgctaattccgggtattgagatttagtaaattctgcaccgttacattttaaccaacctataggaaggatatcagttggccatggcattggtatgccaataatatcgctcgtataaatacattcaccccccggtttatcgccattagtattagagaattgagcgaataacctcccagatgaattgacccaaatttgaccatagtcagtatccccaatactgactcctcttacatagtgtgtcgaagttgaacctctaaatggtccgttgtaaccaagagagggaattttatcgacagatttcaatgctgggtatgctccaacatcattaaattttaaatccacatcctcatctagagatttcccattcaccttccgtgattttggcaccgcatttttcgccagctctttggtttccgttaacccgaggttttatagaacactatatgaatacatgatgagactgataacagaaggcgaaagacaataaccaaagaagtaataagcaaaaatatacacattttatagttcacttaatacccaatatcccaatttatagaaacactcggcaaaaaggataaaatacaaacaaatcttggttgcttttagtacttttatttcaccttacatgacgtatgagtgaaaaaccttcatatgcactaagttcagcaatagcacgttttttagtcttgttatgtgactacagtgggactacaatcaatagctgttatgtaaagaaagaggggatttttatggctaatgaaacttatgtcagggcgaaaattgaccctaaaactaaagaacttgcaactattgcactccaatctatggggttgacagtaagcgatgctattcgcatgttgatggtacaggtagcggaaaaaaatacgctacccttcaaagtgaaaggtactcattaccggaatgcttctcgcacaaaagctgctattaaacagcttgaaagtgggaatggtaaaacgtttgatagtgtttctgctttcatggatgatctgaacaatgatgaggaagattagtcgttcttctgagttcaagaaggactataagcgtgttaagaaaggtaaatatcgcgcaactatcgatgaaagtttagttgaaatactggatatactggtaaacgataaaccaatcccgccaagatatgtcgatcatccactaaaagggaactggcggggtttccgggattgtcatcttcaccccagatctactgctgatttacaaaaaagttggttaataccgttttggagcttgcccgattaggctctcacagcgagttattctgataactcctgactaaaccgtccactggggcggatttttttaccttctgcatacctaaaaacttaaccaactgatttaatataaaaatatttcaaccaatttgtacccctcaccacacatccctaaccgaatgatttaaaagtcttaatccgccaatatatgcccacaccttaacaggagagaacgctaacatggcacaagattatcatcacggagtccgtgtacaggaaattaacgaaggtactcgtaccattactaccgttagcactgctatcgtcggtatggtttgtactggtcctgacgcagacgcaaaaacatttccattaaatactccggttctgcttactgacgttatgagcgccagtggtaaagctggacaaaaaggtactttgtccgcatcactgaaagcaatcgctgctcaggctctgcctgtgactgtagttgttcgtgtggaagagggcgaatctgaagaagcaacaatttctaacattatcggtggtgttactgaggctggtaagaaaaccggtatgcaggcactgttggcggcacaaagccaactcggtgtgaaaccccgtattctgggtgctccgggtttggactcacaaccggttgctgctgaactgacctctattgccaagcaactgaaagcaatggcgtatgtcagcgcttatggctgcaaaaatatctccgaagttatcaaatatcgtgaaaacttcggtcagcgtgaactcatgctgatttggcctgatttcctgagctgggataaaggtgaagttatcgcacctgcaacggcttatgcactaggcttgcgtgccaaaattgacgaagagaccggatggcacaaaaccctgtccaacgtgggcgttaacggtgtaacgggtctgtctgctgatgtcttctgggatctgcaagcgattggaactgacgctgatctgctgaaccaaaatcacataacaacactgatccgcaaaaacggttttcgtttctggggttcacgtacttgtgctggcgctgattcggaggactcactgttccaattcgaaagctatacccgtaccgcacaggttctggctgacaccatggctgacgcacacatgtgggcaatcgacaaaccactgactccatcactggtacgcgacattattgaaggcatcaatgctaagttccgcgagctgaaagcgggtggttacattattgatggtcgttgctggtatgacgacaaaatcaacgataaagacactctgaaagcaggcaaactgaccatcgattacgactatacacctgtaccacctctggaaaacatgatgttacgccagcgtattacagatagttacctgatggatttcgcgaaaagtatcaataaataaggggctaactgatggcattacctcgcaaacttaagtacctgaacttgttcaacgatggcaacaactatcagggtatcgtggaagaactgacgcttcctaaactgagccgaaaactggaagcctaccgtggtgccggtatgaacggtagcgcaatggtagatctgggtctggatgaaggcgcactggatgcggaattcactctgggcgggatcgaatctcagctgtacaaacagtggggcattgcacaagtggatggcgtcatgctgcgctttgccggctcttttgagcgcgaagatacaggtgacgtggttgcagttgaagttgtgatgcgtggccgttttcaggaattcgatcacggtacttataaacaaggcgacaacacacaaaccaaaattaccgctaaaaacacttacttcaaattgacctgggatggcgaagaactgattgaaatcgacaccgtcaacatggttgaaaaagtgggcggagaagatcgtctggcacaacatcgccgcgctatcggtctgttttaatcgctcttttaattagcaaatttcaaaacttattccctgtctcacccagcatattttcggctgaggcaggtttttactcggataaacaaggttgaattatgactgaagcactgaaaactcaaaatgaagatctgcgcacaatcgaactggaagctccactggcgcgaggcaacggaaaaatcacggaagtgacggtacgtaaacctaccagtggtgcgctgcgcggtgctcgtttacaggcactgctggaaatggatgtggattctatgttgctgattctgccacgtgttaccactcctgcattgaccaagaatgacctgatgatgatgtcacccggtgatctgattaatctcagtgtggaggtggtcaattttttgttgccgaagtcggtcaagtccgattcccagaacgattaaccgttgatgaactggtggcagatattgccaccgtttttcactggagaccggcagatacagatgaaatgtcactgtcggaattattggactggcgacatcgggccattttaagaagtggtgcagaaaatgagtaatgtacagtcacagcttgataaggtacttagtaccgttaataagctgaccagttcttttaaatctgttcaacaacagcaaaaaaagctggttggttcagtagataaaatttataaccagtttaaaaagcttaataagactgtcgaagggttaaaaccagttgttggttatgcgcaggaaactgcgcgtatgcgcgccgatcttaaagcctataatcaaacaattaagcaatctttctctgcgcggcagagttcctcaaaggtgacgcaagtcagtgctgccagccaatcagttaatattacccaaataactcaaagtgtcagacaggaaaattcatctggtaaaaaaaatgaattgaatgttggtgtaacgggtaatatgactaacaattttaaattgttagataaattggtcattaatattaatcctcaaataacaattttatttggcatgctgaataaaattaatggggttttgaatttaacggctggctttgtaaatattacattccaaacaattataaataaaatacaaatattcggcaatgtaggtataagggtatttaattccttaagaatcagtttaaatatatttacgttgttggggattcaggcatttattgatttaaaaaacagtctaaacttttttgtgcagctgagtattagagcttttgtcgcgctcaggacaagtttaagtattttcgtccaattgggtcttcaggctttttctgatttaagagccagcctgaacttttttgttcagctgggtgttagggcttttatcgcgcttaaaacaagtttaagtatttttgtccaattaggtcttcaggcatttgcagatttaagagccagcctgaacttttttgtgcagctcggcgttagggcttttgttgcgctcaggacaagtttaagtattttcatccaattgggtcttcaggcatttgctgaattaagagcaagtctgaacttttttgtgcaattaggtattcgggcttttgtagaactaagagcaggcctgaacttttttatgcagttgggaattaatgcttttgttgagctaaaggccagtctgaatatttttgcccaatttgggattcagatttttgttgacttgagagttagtctgaacaaatttgctgaattagggcgtcaggcactggatacattaaagtccagtctgaacacttttgcgcagttaggtattaaggcgttggatacattgaaatccagcctgaatagatttgcagaattaggtagccaggcactggatacattgaaatctagtttaaatgcttttgtgcagctagggatgcaggcgctgaataaattaacacattctttagatgtatttgtccagttgggacttagtgcttttgaagagttaaaagcgagtctgaatttctttgcccaattaggtattcaagcactggatagattgaaatccacattggaagcatttgtccagttaggattgaatgcttttaatgagttaaaagctcgcctgaatttctttgcccaattaggtattcaagcactggatagattgaaatccacactggaagcattttttcagttgggacttagtgcttttgaggaattaaaagctagcctgaatttctttgctcaattaggtgttcaggcactggataaattgaaatctacgttggatgcatttgttcaattgggaattcaggctcttaataaattaacagcgccattggatatatttgcccaattgggaactcaggcactggataaattaaaatccacgctggatgcatttgttcaactgggagttcaggctcttaataaattaacagcgccattggatatattcgcccaattgggaacccaggcactggataaattaaaatccacgctggatgcatttgtccaattgggagttcaggctctgaataaattaacttctcctttggatgtatttgccaaattaggcatacaggctctggaagaattaaaagccagcctgaatttctttgctcaattaggtgttcaggcgctggataagctgaaatctagtctggatatttttactcaaatcggggttcaggggctggaagaattaagagccaacttgaatagatttgctcaggtcggtattcaggctatggagaatttaagagatggcttgaaggcatttgcacaattcggaactgaggctttggaagcactaagagctgccatggatttctttggtaaaaccggggataaagtttttggctcactaaatgatggtgctgatttgctatctaacaaaggaaataaagattcctttggaaaacagagaaggggcttaggggcattagggaatattgggcaaaaagttttcggggttttgggaaacggcataaatattctggcgagtgtcggtgtaaaaggattgtcttttttaagtaatgcttttagcacattaggtaaggtaatgatgtttcttggccgggctatgatggcaaacccaattcttgccattattggtgtcatcgcaatggctgctatttatatttggcagaattgggagtcactgggaccgaaatttatggctttatgggatagcgtgaaaaatatcttcagtggtgcctgggagggaattaaaaaccttgtcagcatagcgtgggaaggtattaagagttttttcatggatggtggcttaatcggcattatctacaataactgggacacgattaaacaaagtgcttcggaagcctgggaatgggtcaagtcaacaatcagtggtgcctgggagtcagttaaacagaatacatctgaaatctgggaaagtgtcaaaaaatcaatttcagataaatgggatgaaattgttgccgatgttcaggctattccagagaaattaaaaactgccggttcggatatgatcgataatctgttgacgggtattcaggaaaaatgggaagcactgaaaggtaagatttcttctattactgacgtcttcacatcatggtggaaaggcgatgagaaaaaggaagttgcactaaagaaaacagaggaaattactaaaaatgaaacggctcagcaggctaagaaagtacaaacgcctttattagataaaggtggctatgtccctgctggaaaaacagccattgttggcgaacgtggtcctgaacttgtcagtggcggagccagtgttactagccgtttagatacggcgaagtatgcagccgtgggagttgccatcagcgctatgtcattacctgttgcagcgcaggacgcaccgttacatgcacaaagtttgcctgctcatgcctatgaggaagttcaggcaaaacaaatgcggagccagccgcagcaacaagctagcgccgcgccgcaatacaacatttatgtctatggctctcagggacagtccgcgcaggatatcgcccgaatggtcagacaggaactggaacaacgggaacgtatgcagcaagcccgtatgcgtagctcactttctgacagaggagaagatttcttatgatggctgcacttggtttatttgtttttatgctgaaaactacgccatatcaaagtttccagcataaacaaagctggagacatgccttcaatagccgtgtgggagcacggcctgcatggcaatttgtggggccggataacgatacagtaacgttatctggcgatctttatcctgaactgacaggtggctccttgtcactaacagcattgaaattgatggctgatagtggcaaagcatggtctttgattgatggtagtggcgcaatttatggcatgtttgttattgaaagcattgatcaaacaaaaacggaatttatgtcaggtggtgcgccccgtaaaatcagctttacgctaacactacggcgtgttgataacaatctgttggagatgttgggcgatttgcagcaacagctgacggatattaaaggcaaaatgcctaactcatgggatgagctttcgaaactgaacgatgacggtataaagacagttaaggagttcttctcatgatcgatttcaaacagtgggtaccaaatacaggttggatacctcaattcgatttgattacaggcaaagagggagcaccagcttttcgcttagaaatcgataataaggatattaccggaaaaatacagtcacgtttaatgtctttatctctgacggataatagaggaggggaatcagatcagcttgatattgaactggatgatgcaaatggtgaactcaaactgccatcaagaggcaatattttgacattggaattggggtggcatggctgccctttaaccccaaaaggaaaattcgttattgatgaaattgaacatgttggtgctcctgatcgagtaaccatacgtgcccgcagtgttgatttacgcggttatctgaacgttaagcgcgaggtgtcttaccataaacacacgttagaaacgatagttagtacggtcgcgacaagaaatcaattgaactttaagattagtgatactttaaaaaacatcactatgcatatcgatcagactaatgaatctgacgtaagctttttgactagagtcgcgaagcaggaaggggcgattgcatcggtcaaaaatggcgaattgttgtttattcgtcaaggagagaatgaaacaggcagtggtacgcctattcctccggttaaaattatccgtaattctggcgataatcacagatttacactatctgatcgtgagtcttataccggagtaatagcgcagtggctggatacacgtacaacggctaaacagacggtggagtataagcggagagaatccaaaagtgccaaggttgaagtatcagttcaatatgaaagtactaaaacggatacgccaaaagatcagccatcaaataaagagccacctaaaaaagaaggaggttctaaaacccaagccaaaaaatttccggccaaggagaaaggaaagcctaaacataagcctagaagggtggatctgtcaaaaagtggagcaaaaaagcacaccccttcttatgttcagcccgctctttagagcaca

SEQ ID NO: 207 - DNA, 13535 bp, Xenorhabdus sp.; identical to SEQ ID NO: 205
  CDS (8648)..(9103)

SEQ ID NO: 208 - DNA, 13535 bp, Xenorhabdus sp.; identical to SEQ ID NO: 206
  CDS (8353)..(8529)

SEQ ID NO: 209 - DNA, 13535 bp, Xenorhabdus sp.; identical to SEQ ID NO: 206
  CDS (12582)..(13529)

SEQ ID NO: 210 - DNA, 13535 bp, Xenorhabdus sp.; identical to SEQ ID NO: 206
  CDS (12046)..(12522)

SEQ ID NO: 211 - DNA, 13535 bp, Xenorhabdus sp.; identical to SEQ ID NO: 206
  CDS (8513)..(12019)

SEQ ID NO: 212 - DNA, 13535 bp, Xenorhabdus sp.; identical to SEQ ID NO: 206
  CDS (1238)..(3268)

SEQ ID NO: 213 - DNA, 13535 bp, Xenorhabdus sp.; identical to SEQ ID NO: 206
  CDS (654)..(1241)

SEQ ID NO: 214 - DNA, 13535 bp, Xenorhabdus sp.; identical to SEQ ID NO: 206
  CDS (2)..(640)

SEQ ID NO: 215 - DNA, 14620 bp, Xenorhabdus sp.
  CDS (6017)..(7036)
gtgctctaaagactaaactgtaaaacattcaattcatcgaggatttggttgaataaaaaggctttatcattccgaaaaattttacaaagtggagtatatgatggctgaaaagcagcttgaatttgatgaagtgattgaaacgctgccattgcacagttggtcggaaaacgtacctcattcagtacagcagaatgcactgatttctttggaactgggtaaggttctctatctgccagaactgagtttctctttgatgtcagaagaacagcagttgctcagagaagacgcggtcaaagcagggcgtaagaacatcagttaccgcccggatgaacataaaatagcaggagttgcgttacggtccgatgaacagctggtgcatgtgctgatgcaacgttattatgaacactgtcagcaattgattgagcatctgctgccaatatatacaaaagtactgcatacaccagtcaattcgctgcgggttcatccggtaaccgcatggaaaacaggtaactcctggcgtaaagacgatagtcggttacatgtagatgcatttccttccagaccgattcagggccagcgtattcttcgcatatttactaacattaacccagctggcgaacctagggtatggcgagttggtgataaattccctcagatagccgatcaattccttcctgctacccgtagttattcccgtattaatagctggttacagcacaaactggggataaccaaaagccggcgtacccattatgatcatctgatgctcgggctacatgatgcgatgaaagccaaccagcaatatcagcagcagggtgctcagttagaagttcaatttcctgctggtagtacatggatttgctactcagatcaaactccccatgccgcgatgtcagggcaatttatgctggagcagacttatctattgccaatatctaaaatggcttcgccagaaaattcgccactaaaagtgctggaaaataagctcgataaagcactgctgtaaatagtttggccgggctaaatattggacatttttcgttaaagtccggccattaatcataattaatgctcaatctgcatatatggagtaaggcattatattcaattgatgaactgaaataggatgccaccaatttataaacaaatgacataattatttgagcaataaccagtgatgaacctatttaagtatcgcatttatcatatcaggctctttaatagctaacaggattgcaatgataattcccaccagaatacccgctaaaaaccacattatcttgtatttgcattctcctttttgtttatgttggctgtcatgccatttttttcggcctcggaattctttagggttgtagtagtagtcttttttagctgaatttgtcatggattttttaaacctccccgtattattgcccgttatttgttcaattgcgtaataaaattgaatcagactagctgtaaatttttactgcccgatcatgatatttttctttgttaagtgaaatatcttttcctataaaagcggatgtcagacattaatgtattttctgatatttttgcaactatgcgttgattagataaaaagttagggattgaaaagacgtaataaatgaaggggaggttggggttgtctactgactgttgagaagggtatgtcttatgaggcaattctatgagctacacaggcctgatcgaaaaatatttgattcaaatacgccacagttcgtgcgtagaatgggagaaaataaggccggaaaatccgaccttattattattactcgtaattttattgatctgctgctgggccacaaccgccaatgatcttggagatagatactgccggatgaagcaagtagtcatagctacaattattttttttattttccacacgaccagtacatgcagtcagtgttgccaatacagtccctactaatacaattttaattaatttttccataatttttaataacaccttgtcttttttagttcctatgaaaattaagctaaattaaatcattagctcgattagattatattaaccctataataatttcaagtattattgtaatcaataatagacaatctagcatattaaaagattggtaatgagaaaaattagcctataaaaataacactatttagttaagagtgtttggatggaatagggcaaagatttttcgagatgtgggtaatctggctataccaattaattattttcatcggcatctaaattttttgagaattcaataatgaaatttacgttcaacatatttatttctaattgtacaaaattataagctaagataaattaattgaataagatctctatcttaaagtaaatatccagcgcataccgtgtgcgtgtaaggcgcgtttccggttcatagatcaacctgtcatagctaaaaggaaatattatatgcgtattcgttgttcagcgcgtttgctgatcattagcccgtctaatcgggtgttattatttaattttgtacataatgagggtgcattagccggtcggtcatattgggccacgcccggaggaggtgttaaaaaaggagagtcttttgaacaagccgctattagagaacttcgtgaagaaacaggtatccgaaaagataatgttggacaatgtgttgctcaaagaacatttgaaatgattctccctagtggagaggctgttttagcaaaagaacatttttatatcatcaagtttgataaagaagatatcaataccattgaatggactgaaaatgaaaaatcagttattaagcaccatcattggtggggaattgaccagcttaccaattcagtggaaactatttatccaaatgatataccagcaatattttttagcgcgctaaaaaataatatccatcagaagtcataacaggctactgaatttttcttccagatattctcgtattgcttcaatagtagctaaacgtaaattccgatttgtaaaatcggaattgataacgaggttgctggatttttggtacgcattgtttatgctggatttaattatgagtcgaatggttgcaggctaagtcaagatcgtctgattttccgtctagcgatagagattcgcataatctcgaaccgcgttatgttgaattgcgggctgccaaaatatcgcatggcagcccggcaatttagacataacgtggattatgcgaatcccacgccgatcatacagttataacccctaactttcgctctctcttggttacaagagaggggctatgaagatcatctatttcgattacatcgcaggttttggcatcaatgctcttgttgccgatgaatgggatttttacccgtctgttgatgaattgatgtatgaatgcacctctctttacggcaatcaaatagtattcgtctctacggcgactacttctggtaatttcactggctatcaggaatctttaaaatgatgactgatagaagcgttattatcgattatctggccttttctgcgccgctttcatgtatgaaagatgttcatacttttcaggaaaaagggcatgaatggcgtaaatatgaatttttgccatcttatcgacattatcaacacagccaatttactgaatcagtattaggcagagattacgaagcgttacctgattcaggtgaggtgttttcttcttcgattgaagatatcaaccgtaaggctgaacgctataaccgagaattattgtcctgtttacattcacgcctgagacgttttatcgctgctgtatttggattatttgttggtcctgctcgcggtgcaggtggttttgcttatcaagattcagccattctttattctgaagatggtggatatgagcatttcggcatgatctactggggtgggaacaatggcactttttacgttcagatcggcggaaagggctgtacacatgttatgagtggcacaacaccggaaaaaatctataagtggcttaaacatttagatatcacatcattaaaacgtttggatctcgccactgatgattacgacggtgtgttcacttgccatcatgcattatcagcctataaagatgatgctttttatggtggtatgggtccaaagccaaaattaggcaatgctcatgaaatagatgcaacagggtgctataccaaagaaatagtaacggtaggttctcggcaatctcgtgtttattggcgcgtttataataaagcccttgagcaaaaagtttccggcacttggtatcgttctgaggctgaattaaaaggtgtaccaattgaggtacttttgaatacacaaggaacttatacagggttatgcccttatgcagcttccattaatccgacgaagcctgcaccaattccgattcttttaggtcgcaaggccgttgatgctattgaatctaaagttaaatggcttagaaaacaggcttcttcctctatcgcaaaacttattcatttttttgaaggggacactcaagccgttctatcaatgatagtgcgtgatgatcacatttctgatttaaacctgaaattagatttgcccccaatatatcaaacactcataaatgagaaattaggagtatcacaatgtccgttttagaaaaaattccattttatatagaagttactgccgctgatgtgaaaatagaacaaaaaacacgcactaataaaaatacgggcgaaattactccttattatacacagcgtgttattgcgcatatggggccacgctcaatgtcagagacagttatcacattgtcagagccaaatccgttaccagagggaaaatatttaatttctggttctagtttgtatccaggtaaaccatttggcgataatccgccaagattggagtttaatcaatggaatgtttcttatgttccgatggaaactgtgaagcatttaattaaattataaattaattttcaggaatagttattttatggatgactataccgaaattacaactaaattgtgtcagcctcatataaatatgatcactgataatagtagttgtaacgatgtaattttgaaattaccgaaatcagaaatgaataaatttcaatcttcgatggtttcaaacagtccgcttttaggtgaattcaacatgaatatcttaggggctggattagggcttgtcttagtcttttatgtattaggctatggattaggacgcatgataaaaatgattagtttataggtctattatgaaaataaaaagtattatttatagtggttatttaaaagcaggtgttgtggctatagttgcgttgagttctacggcttttgcagcagatggaacgcaacaatcagcaggatatcttgatgcgcttttgaaacaaattgatgttggtcctattgttacgggtgttgttagtgtagcagcaataattatgggtgtttctgttactgttatgggacttaaaaaagtagggaaaatgattaacgcattttagccaagaggggctttttagccccttttttagaggtatttatgtgggaattgatgagtttttttacaggggtattatgtgcatgggctgtaatacagggacttaatagttattagtggcgagaattcttatgaatgcgctttctttaaaaaagagaatatttatttttaatcttatttttttggttttatttttccctatttatcattcttatgctaatcctgccattgctcttgttgcacgtcctataattacacgtgttttccagtctgtcataactcgtcgtgctgctacagtggcagctaatgatgcggttatgttgaacgttattcgttctaatacagcacagtatgtcgggcgtattgctgctaataattcagtttataaatcagctacggtaagttctttaagacatgcaaaagatatttcttgggtttcattagccttagggactggtgcaattacattatttcagtttccggtgggtgtgccattggtgatttctgctatggtgacacggtttattattcgttgcctaccaatcattggttaaatagggagtcaggatgcctattactgcttacgtgggtgtgccgcgttcgggaaagtcctatgaagttgtgaaatcggttattgtgccggcgattgcgtctggtcgtcgtgttgtttcaaatatttacggattaaatgaagaaaaaataaaagactattgtttgaaacaaaataaaaaactgtctgctgatgaattgggcgaactggcttacgttgaaaatggtcagtgtctggatgatgattttttaccttcaatggaaaatcaatcaacattttgtcgtgctggggatttagttgtcattgatgaagtttggcgtgtttgggggagcgataaagatattcctaaaaatcatcgttcatttattgctgaacacggtcattttgttgataaagacactggcgttatgtctgatttggtggtgattaaccaaaccgtcagtgatattccgcgttttattaaagggcgtatagaaacaacttatcggatgcagaaacatgttgcattggggctaagtcaccgctatcgggttgatgtttttcagggagcgaaagttactaaatctaaccggatgaatttctatcaggaaaaatacgataaggctatttttgaactctataaatcggtagagggtaataaccctaatcagcagagaacggatgcacgtcagtctatcttttcatctaaaaaaattcgaatactgattctgaccgtgcccgtttttgttctggtatcggcgtattctgtttataactatttcaatcagtatctaaatcctgaaagccagaaacaagacgtttccgttaactcgtcttcactagtaacagccctgcctgttaattcagtgctcagccctgtgaaacccgccgtagtgctatcggacaaatggcgtattacaggtgagttagttaaagatggcagagcatatgtgattctggcagataaacaggggcggttgcgctttgaaccccgcagccagttccagtacagcgggcggcttttacagggcgaaattgaggggcaaatcgtgaattattattctgggggaatacaataatgagaaaaggattgtgtttttttctttctttgcttgctttatctgcgcaggccaaaaatgtggattttaagctggaagccgtaccattacccaaagcgattgggcttatttatgatgaagtcctacaaaaaccttatatgttggatccgaatctggccagtgataccaatttgataagttttcatgctaccgataagcaggattttaaccagtttattgttcgttatttccagaatatgaatattaacgttcacgagaaacacggtgtcgtttatctcgttaaggtgaaaccaccagaaccgaaggtgattaagcaaagtttcgtttatagtcctgttcatcgcgatgttgagtacttgcagggttttttaaaggcagagggtgatgtggttgccagcggtgataaattagttttttatgggactcaggaagaaattatacgggttcaaagtgtcttaagttcggttgatgcgccatcgcgtgaagtggtggtaaccggttatgtttttgaagtccaggatatcgaaaaagagggcagtgggattaacctcatggctaaattattgtcaggtaaattaggcattaatattggattcaaacagaattatgggaacttcattacgatcaatacgggtggccttgatgccatggtggagttgtttcggcgtgatgaacgttttcatgtggtgagtagcccgactttgcgtgtgaaatccggttaaaaaggaaactttagtgtcggttctgatgtgcctgtattatcgaatgtgacgtatcaggatggacggcctgtacaatccattgaataccgttccagcggggtaattttcgacatccagcccacgataaaaagtcaggcgattgatttaaagatacagcagcaattatcgaactttgtcaaaaccgacacgggcgttaatcagtcgcccaccttgattaagcgtgacattgtcactgatgtttcggtcaaaagcggtgaaattattgtgttgggcggtctggctgaaaataaggtggaagagggcgaaaccgcgttcagtttcctgccaaaaggctttttaacaggcaaatcaaaagccaataccaagacagatattatcgtgttattgcaggtaaaagtgatctgacgttatcgagcacggaaaagccgcccccgcagcgttgcgaggaggcaggttttttcggcgcagatagcgtcattctgttttttattggctataatccgaataaaaataggggattgggtattggggatagatatgagaaatattatcggatatgagcagcttgatattttctaggtaattaattacttagaggatattgttatgtctgtgaagaatcagagccgtgatcgtcttcctaatggaagattgaagtcttatcgtcggataggaaggcgttttgccagttgtaaaaaatggtttgataaatctccatcttggtatcgcaatctgatgatgaccagaccagaacggcgggaagtgaaactgcttctatctaaggtactaaacggtagcgatcctgatggaatgatatttccggtacataataaaccttatgtatggttttattgatttttaaaaaagctaaacctaaagatcattattaaaatcgtcaagtattaaatcgtggggcccctttagggttccgatttaatacttgtacgacactcgtataaagacacttgggataagtgattgtgggcacgtagtgatcacaatcacttattagaccattacctataaaggaaggtctaggtttttgctaattttaggttttgatttaatttcctctttaaatactaattcaagttcacattgtggatcagtattatatctttttttgaaaagggaattgaattgttctttattgtcggatattttcattaatgttgtaacttccgttatctgtttttttaaatgttcccttcctatttccggtgttaatatttgatgaaatctatgtttgtagtttccattttctgtttttggtgtgttatcttttaatgcattaaaaacaccatccgggaggatttcatatatatatttatttttccatataaaaggttaaaaccaccgactttagtcggtcagctttagctgcgatactgtgttgcacgagaggtgcaatatggattacagatatggcagccacacggtatttcagattgagtatcattttgtgtgggtaacaaaatacaggcgcaaagtgctaacaggtgaagttggtttacgggtgagagagttagttcgtcagacctgtgaagcgttcgaaatcaggatagtagaaggggtcgtgagcaaagaccatgtacatatactggtgagttgtcctccgagcttagcgccctcagaaatcatgaggcgaataaagggaaggacagcaagtaagttgtttgaagagtttgctcacttgaaaaagcgttactggggtcagcatttttggggcagaggctatttttgtgcgacggtaggtcagttaacggaagagatgataaaggcctatctggcgcatcattttgaaccgaacccgaatgatcacttcaggctggataattgacgcatcgttcagtcgatgcgtatccggactttcagtccgttaatcactaacccaccgactttagtcggtggttgttgagttaataggggggttataatgctaaggcctaagcagaaagaattattgaattatttaatggaacaaaataacccgactttagccgttaaattatctcaggtcttaaatgtttcaatcagaaccgtcaaaaactatgtgctggaaattaatgaatcctacaggagtaaaatcattatctccggacgttcaggatatgtgttatcatctgatgcaaatcttaaattgaagcaaaaactcagagattttccgaaaacctatcaggaaagagcaggttatctgattaagtctattctgttattcaggaaaagtaataaaatttatgatctcagtgctgagttatatatcagtgattcaactttaaaatcagtgatatataaaatgaatggttcctttgaaaaatttaatgtcaggttcttatgcaaaaataatcgccttgaaattataggctctgagctggatttaagagagctagcctatcataccatcatggaacaggcagactacagaactctggatttgaaaaaactggtaatattattcggggaacagcaggtcgaaattatatctgatattattgcacaggtatttaataatcggggttgctctgtttatgaactctcatatacaaatcttgtgctgcgctttttgatactgctaaagcgattaagttatggcaagtatttaaaaaataaattggcctttatagaagaaaatcagggaataaaatcaataacagaagagctgtgtgacaggttgcaatatacttttaatattcctatagcagagaatgagaggcatttttgttacaccttactgaaaatcgataccaatatcactcagacaggcgacagtaaattaattgaatcagataaagcgggtttatatcaacttgccagacaggtcgctgaatcggtagcggagcattatctgattaatttagcaacggatgattttatttcattattctgtttgcatatttcaggtttgaaaacacgcttgcagcacaatgttcataccagaaacccgatgttggatatgataaaaaaagagtgtcggactatttttgatatcgctgtttttatctccttacaattaaatgaattctttggtaagaaactgaatgaggatgagatttcttttctggctttacatgttggtgctgaatttgaacgacaaaaaactaaaggccataaagtacagacagtacttttatgtccgggctataagggaattgaaaacaaaatataccaccagttattacgtgattttggcgatgaaataaatatcattaaaataatatcacagccttctgaactggagtgttttgaatttgagttattgattacaactatcaatattccttccagtcataaatatgaaacagtgtgtatttctccttttcagatgcgagataggcgtgctcagttgcttggtaaaattgatatcgctaatgcgaacaggaaaagaagggcgctacaacgtaattttgacctgttttttgaacctggattgttctggtttgagcccggttttcagcaaagggatgagcttatcgatgtgctttgccaaacgatgtttgcaaagggctatactgagggcgattttgtcagatatgtttatcagcgggaaagcgcgtcttcaacggcgtttggtattctggcattaccacattcagcaaagatggatgcgataaagaccggtgttgcagtcgctatcagcccaaaaggtattctctggggggaaagtgagcgtgtgcatgttgtttttttgattgcgataaacagaattgatagggcgtgttttgcagagtgttatgatgcgttattggatgttttcagtcaggatgaaatgattaatcagctaaataaaataacttgctttgaacagtttcggagcatcttcatcagatcaggtgataatgttgatgttgaaaaatgagtattttgttaattattaaaaagcaggcgttgagttttattataacctcaacgccaattcttttgctgtgaaataaaattagagtggaaagatttatttcttatctgactcagtagatattaattttattattgctgtaatctgtggtgaaacatctgtttctggtaaaggcgggatctgccctaatgccattttcctaagtggctcagaaatgaccatggaaatagccagatcactgaaagtattataattaaaattattcaatactcctcgctcatgttgattgtttagccagttttccaaaatgactttactgttttcgataccacttttttgatacttttccagtaatgtattgcgatgagggaaatcagactgtaataatttaaataaccccacttcattttctgacaaatacttatcagaaatatcttttaaatatttttctaatattattatcacttgatgagaagtactggcatttttggttagagatggaggggaattatcttgccagtctaatacaacttgctcaattagttcttctctgtttttaaaaaaacggtagagtgtttttttggcgattttagctttttgggcaataacatccatggttgttttgttataaccctgatttagcaagagagaaagagtaatatcatgaattttttggcgtatttctgattccggaattgctggtctgcctcgtgctcgcgggtatttttctgccattttagcaccttataggttgttaatatttattgtactggattggcgttgttcatttaaaaatataaggaatgctccctcgaaataaaaagaaatatcccaatttccacgaaatacagaactctccggcagttgtcaatatttacaataagtgattatcatgtagcctataatacttaacagtgaaaaatgctgtttagggttatatcgtctctttttcatcactggcctgattttttataacttactgtttttaataattaattgacataattgatgctattagagtattgaatctctgctcattacgtgacctgcttcacaggatagcacttttggataaattttgttagcaaaaggttaaattggatcttagtatcgctattgctaattacaaaattaaccataaagtaacaaagattgctaaatgttaatccgcctaattaattttttgggaaatttctttattgaataagtgtttcttagaaagtgtatttcatggcggtggcaaaaggtaaaataacaatacaagtgaggaccataataatgacaaaacacaacgtaatagcaatggcaatagcaatggcaattccggctggttttataactgggactgcaaatgcggctgaaatttataataaggatggtaataaaatagatttatatggcaaagctgaagttcagcgttattttgctaaatcaaaaagcaaagaagcaggggataattcctttggtcgtattggtattagaggaactacccagcttacagattctatttccgggtacgggcgctgggaattcaatatgggtgccagtagaactgaagttgaaagcagccaatttgcaagaacgcgtctggcttttgtcggttttaaactgggtgagtacggcacactggattatgggcgtaactttggtgttgtctatgatgctaacgctctgacagatatgatgtctgtgtttggtggagatagtatggccgccactgagaacttcatgatgggtcgtgcaacagggttgttaacatatcgtaatactgactttttcggattagtaaacggtttgaatttcgccctgcaatatcaggctaagaatgatggcggaaccctaaatacccgtaatgatattgcgcggcagaatggtgatggtgtcggtctttccagctcctataatttggggcatggttttactgttgctgcttcttatggcaattctaaccgtactacagatcagaaaaacggtactgcatcagctaaggtgctggcaaaagggaacaaagcagaagcctggctggtatcagcaaaatacgataaaaataacgtttatctggccgctatgtatggagaagctcgtaacctgacccgattcggcagctcagtggataaccgcgtgatgttcgcaaacaaaactgaaaacattgagttaaccgctcagtatcaatttgattttggtctgcgcccggggattgcttatgtttactccaaaggtaaggatttaggtaaggatctgggtgagaataatttgttaacaaacaaaaattctgaagatttggtgaagtatatttctgtcggtgcatcttataatttcaacaaaaatctgggtacctatgctgaatatcagattaatcttctgaaagataatgctttcacaaaagcaactaagcttaatactgataacgtaatgggtgttggcctagtatatcgtttctgataatagctgaagtaatgagcctcaatggtgctgtcattgaggctctacccaatattaattagactttaatcagttagatccgtctatacacaatggattttaagatgcatcgcggcggcaaaggagtaacaaattcgtcgggaacgaatttgcccagccaaaggctggcctccggtgagaggcaggagcctctcagtaatcccctgagttatagataactatgcgactggggtgagcgagtgtggccaacaaagaggcagcttgaaagacgaagtgtatattacctttctgcttcaccacccagtgcatcaatcgtattttttatcagtgcacttaactcacccgtcatcagcgtaaaatcggcatcaaatcgctgggcgacatcttcacgatcaatatcgtcattctggtcacgtaatgtttcgctgaactttatacgcttgtaagagccatcatctgacagcatgaactgaattcgcttttcccagtccagtgccagtttggtgacatatttcccggaatcaatgtgcgttgctatttcgtcagataccaactcctggtttttac

SEQ ID NO: 216 - DNA, 7191 bp, Xenorhabdus sp.
  CDS (3925)..(4518)
gcaagagtaaatcctgaccgtgtgtgaaactgcctccatcaccgaagcggtacaacgattgaaagtcatccatttgctgggtgactggccgataccggaaatctcatcgggtcagtatcgacgcgctttttttcccctgaccgtgatgatatatgacgccaaagataacagtgtgctcggggggcgcttttatgacgagatcgtctgggcacagccggttacactgacgtcagaacgtttgtcactggaacgaaaacaacagcagttatgtcaggcggccaccgttgagctgagctggcaggatccgcaggcagcccacgttttgtggcaggaggcgaatttgttgtcactgcatatgatttcacccgattaccactatcatcacgaagtgcaggatattctccggcatagcgcaacggtcagcgtttgatggtgtcacccgggaagtctgacgtttaaccgtctggcaggtgattaccgccgtgcggctgaaacgctattctgatctgagcctgaacgatacggtgaccgaacttatcgctcacggtgtcagactatccgaagccattaatgactgagtggataaatacgatttgacccggctgaacgcccccggcaatgacgcccggcacaccgtatccgggggtgtatgatgaactgatggtcattgtcgacagtcaggttgccggtatcttcagacgggatttcaactgacacttttttcaatcacccatcgggggaactgactcccgtgggggaacagtttctccggtttttaaacttaaaaatcaaaggagcttaatcatggcagaatgggttactaatcaactggaagttacgggcaaatccgtgtgtctcgatgtgatgcaacaatgggtctgcggagaagaagtcccccgttaccggcaggctgtattacagagcctgcggctgtttctggcgggctgtgcggggatattaaaacccaccaagcccctcacttacacaccgtatccggaactgattcggggcacggcagcgccgaccgcgcagaatctggcgtttgaacagtggctggcgctgttgcaggacaatgtgttgttgaccaccgaaaatatgaagcggattgacagtatctaccgccagtcgggcttaagcctgctgcgctgggagactataccggcatcagcgcgtgacatgattgcccgcctgctgacccgtcagtacactgactggttcggcgtggtgggctggtcagacaaccttgatatgggcgtgtgctgggagaagctgtcggtttatccgacctcggcccagccgtgtgatatgctgatgatacgaccgacccggctggctccggagattaacggtaatagtggcttactgaaagggatggcctccacggtgcagttctacgatgagcactatgggctggaatggccgttcggtcatcatgtccgctgggaacggcgccatgtcagcagcttaaccgtgcgttttgacacgccatgggtaccgccttcggcggaactgatgggcgggctgtcatcagtgtttgactgtgaaatccgccactggtacagcgaaccgtcaggcagcctcaaaggctatgactgttatgaccagggtgaacatgtggacagccacaacgggcaggtaggacaagaaaaccgtccggcactgtatctggttaacggagacaaaaccgaaacggcactggcactaccggcgatggccgtcggccagtaattctttgttcaacgcagcatcaatttatctttacttcaaccggaaggggaaacacattctccttccggggcgtgttttcctttttgagtcttatcaggaaaacatgctatggcctctcaccctgactatcagaaagactttatttcgctgtttaaacaaaccgccctttcccgtaaccggtatcgggtttttcaggatttttgcaactgtgcgatggcggccattcacaataaatactgtttcagtgaggaactcgagcagttctatctgaaaaccatcaacaaatacgaacgggaagatattgaccggattgtggaacttttttcgatgaccgtgctggcattgtcggaagaacccggtgattttctcggcagcgtgtttatgcaactggagctggggaataaggaacttcagcagttctttacgccctggagtgtggccagagtcatggcacaattgcagttgaatgaggtatctgacttgttgcagacccgaccctttgtcaccttccacgaaccttgctgtggtgcggcctgtatgatgttggcagccgcggaggtattaagggagcagggatatgatccgttgtccagtatgtgggtgtctgcgattgatatcgacccgctggcagcggtgatggcctatatccagctttccctgaccggtattccggcggcggttacgatcggtgatgtgctgaatgatcccggcagccaacggacacgctacacaccggcccattatctgggcaactggtcgcagcgtttgcaggcctatgaacacgcggcctgatttctgttttcatcctctttgtttcacgactgcgcctttcggggcgcttttttacgtttaagggtaagtcatacaaacaattttcattttcgcaaaaagagtttcgccttgtttcagcgtgggattgaccgacactgggctaaatttgaacccaaagaggaaaagcccatgttggaacgttttaaatcccattttgtccgcgcgtctgtgacaccatcaaaatcatccggacaacaagcggaaacccttcgcgacaaccgggggtatttccggccacagtcagcggaagcgctgctggcaaacgcagaacgtggtcaggctctccggcaactgtgggaaaacagtgcgctgcccgccgggttgtatcagcagttttatctggatccgctccggcaattatgcgcccgtgtgcagcatatcccggccacacaggaaggcgtctggtcttatcgtggagggtttatagatctgaccctgcaatttactgcctgtgctgtgcggctggcgaaaggacacatgctgccatccggcgtggcaccggaaacacaggccgcacagagcttgttgtggcaggcagtggtattctgggccgcgttgttttaccacctgccgctgttgcggcaactggaaggtgaactggatgatggacacccctggctgccggggttgtgggtgccagctcgccgtttccgcttccggtttcatgcctcactgtctgagctgcctgtttctcataaaacgctgctggctgcccgtttgttaccggaggaagcggtcacctggctgtctttagtgcccggtgcgtggcaatgtctgatgttgcatcttgatgggtctccttcttctgttccgttgacggatttactgcttcagtcagcagctgagcaggtgaaatcgccattgctgaagccggttgaatctgctgaagcgagggcggctaccgctcatccatcgcccgatccggttactccgcttgtcacaccgatgaccgtcccagcacctgacacccgcgatgatacccggacattactgtcactgtttcagacagcggagtgaacttttggtgggaaataatacaaatgataacaataacgatttgaaattgttcaaacgtcccgtatcagcgtcagaatgccttgtttcagcaatgtacaaaaggtcattatatgaaaaataaaataattcaacgtgttaattaattttcagtttattaacaggacgtggctgtaccgggacacaacttgacacacgaaggaaacaataatgttcaataatgaggaaaaaatgggttgggatgaattactggaagaatactttttctcgcatatgctgcgaccggctacggagtggagttatcgcaaggtgacccgggtttttatcgggtttatgggcgatacagtgttgccggaacaggtcactcaccgcgatgtactgcggtggcgacgccatctgttgaccgagaaaaaacagtcgagctacacctggaacaataaggtagcccacctgcgggcgatttttaatttcgtgatggaaagaaaactgctgccgttcactgaaaacccgtttaacgatgcagcagtgaaaaaagagaaaaaaacgaagaaaatcctgagtaaatcccagataacccgcctctatctgctgatgggacagtatgaggaagaagagcgcaggcaggtaattccccggggaggccgctgtgcgttgtacccgaccggctattggctgacggtactggatacgttccggttaacggggatgcgccagaatcagctattgcacctgcggttgcgggatatcaatctggacagcaattatattgttctgcgggtcgaagggagtaaaaaccacagtgaatggcggataccgatgatccggcagcttaaaccccgcctggcgaaactggttgaacaggcaaaagcctgcggggcgaaagacgatgatccgctgtttgatttaagtcgtctgcgggttccgccgaagaacccccaaaagtgacgattctgcggtcatgacttccagaatgcctgttttaagtgttgttccaacagctcagccagtgcagcaacatcaatggatgttttgctcgccttcttgaaactgtaacgaccagtaaagaacaagtgctgccaggcaatcggcgatattctcgcaaatttttccagtatttcttccggcacaccttcaaataccatctttttatacactcgatttaggatcatggcgttgtacgccacaatacagttggcgactaacctggcagcatgggcgctgactcggttatcggtgattttcctgcctttgaacacgttgttgtagattttacggataatgctttgtaattgatggtacgactccgtacggttcctggcagtccgtattgcttttcttagatgcatatcatcaatcagattgagcacatgggtgcttttgaatattctgttgtattcatacagggcagctctcaaccgggcataccgtgtgtgagaattcaattttctgatgaggtggttttgtgtgttttcctgcaataccaaggaaagtaggacgcgcttgatacctctgctttgagagcgaatgagtccttcatcaatggtgcccatagggcgcaacggcccgtccatatcagcaatgggattggcctcataaaggctttctgaagcttcgcgaacgttcttgatgctggggacataattgacatcaatggcatccagcgcgacaaagttgagcttattcagtgagtggttgtcgccggttaccgaatgaatataaatgtcggtcttgttgccgtataccatgtcatagaggcaatggccttcgtattcattcaagcccaaattcgaagcggtcacggcgacatgattggcaatcaatgtatagagcgaaatgccgcgcccttttccgaggtgctttttggaatagcgtgattgaatggtactgtcggtagtcgcaaacttctggccatcagcatcggctaacagcttgtcgtccagcaggttccaaattttaaagatagacaaaccattgatgaaattgctcacccgatcgttggcggcgcagagcgtctcaatacgcacaaagtcctcgcgggttgagcgcagagcgctgtaatcgatgtcagacatttctgacatctttatggtgccaaatccgaatgcctcagaaagaatgcaggcattcaacgccaggggagctggctttttccgcttggtgtaacggtctttcaggtgtgtaaatccatgccacataccggtcagctcaccaataaacatgacgacatcggctatctcagcctttggcaaagtgcggaaaaagctatcatcgagcttttcactgctatcgtacaagagacgccattgatgcttgccatcagccgattctttaatttgaaaccccgcgttttgttccaggcgaatattttctgtcgttgatgcccacgcttgatccagagcctcaatcgcatcgtccagccttgattcgcaatacacgggcaattttgaatacccaaattccagtgcgattttttcgatatcatccaccagtaggtcattaatcaaatcgtggttgatatcgcagtaagaaacactggcattgcagcacaacttaccgcgattaatcaggtgatacattttctggtagatgaaaaactcgaacaggtacgggtctaagttctcatcttccggtttgcgtttcagataagtttgtaggtgcttgggaacagtcaaacccagatcatccgcgatcttcaagctgttgggtgattttccgttggtatagtgcgtcttgataaggtcaatgagttctactacatggctatcttctcggtaataggaaaatggtactgccaacacaatgggccttaaatacagcgatattagcctggacgcactggcatagtattgccatttggccgctgttttatcgaaggtatttccagccagaaaatcagcaagcgtggagaattgatccttgggtaaaatgctgtaagccatctcgtttaactcttcctgagtcatgttttggcttcgagttggaaaccacttgaggaacttggcaagtttgggaaaatccaccatgacctggctgctatgcttgagctgttctgtttcagcaaatgcctttgcggaatccatgatcgctcgaacgtggtaaagaaacgtgacgatcaggttatccgtgatttgctggtaacggtgaaagataaaacacaatgcgtatagccattgctggtattttccgaggcgtcgaagccggtaggcggcatattgttccacgatatcagcataataacggatggcatttttggaaattttcaacgaaggcaaaaattcttcggcaaatcgatacagttcttccatgctttgcgctttctcgatttcgaatttcacggcggtatattgaaaatctttctgatcggccttgagtaaagtgagctggttgagtccatctttatgatcaatgagcgaggacagttgttcacgccaatagtcgggaatggattgaagaattggttttatcctggcttcctctacggcgaaggcatccgagaacatgtcctgaagtttgcgatatgtcggcgtaacaatacgttgtcgatccaggtaaaacagcaactgccgcaaggcgctatggcctttaggaaaataacggattaattcgcacaacttggcg

SEQ ID NO: 217 - DNA, 12024 bp, Xenorhabdus sp.
  CDS (9096)..(9809)
  unsure (1)..(12024): unsure at all n locations
tggccggctctcacagcgctttttaaaaaaacgggctaaaatcgctgagcgtaatctgctgctctgtttccccgatatgtcacaggaagaacgggataagtggctggtcaaaaattttgaatccgtgggcatgggattacttgaaactggtatggcatggttctggcctgattggagagtaaagcgctggttcaaagtgacaggacaggaaaatatccagaaagcacagaccacaggccaggggatcattattattgggatccacttcctgacactggaattgggtgctcgcattttcggtatactgaatccgggtatcggtgtttatcgaccaaatgataatccggttctggactggctacaaacttgggggcgcttacgctccaacaaatatatgctggacagaaaagatctcaagggaatgatccgctgtctgaaaaatggtgaaattgtctggtatgcaccagatcatgattatggcccacgtaaaagtgtatttgctccattattcgcagttgaacatgcggcaacaacaaccgggacttcaattctggttcgattatcgaatccggttctacttccttttactccgcgtcgactaccggatggaaaaggttatgagctgattattcaacctgctgtagaaaacttccctgaaaaagatgaaacagaggccgccgcatttatgaataagatcatcgagcaggagatcatgcaggcaccagaacaatatatgtggttacatcgccgttttaaaacacgtcccgaaggtatgccatctttgtatggtgataataacgataatattcactagatgctcagcccctttcaggttaagtctttcttggctataaagtcactgaaagccattacatatcaatcatcataacttaaaaaatcaggctctcactccaaaagtgacagcctgatttccaaaaaatattaagttacaaagttaaataagtggctcaaggaaccctctaataagcccttctacaggcatcctcaatctccatattggaatagccatttccccatttttgttccagcttttgtctggtttcccggtagcatntgcgtcgggaggctcgattcctgtcccagtctttgtcatgatgaggaaatttcagtttttgattatccccatcatgaagaaatttcagtttttgattatcccaatcatgaggaaatttcagtttttgattatcccaatcataagaaaacccaagatgtgcttttgaatgatcttttcgggcatatttatccgcttcctcttctcgtttctcaaccagcgcgttgtcttgtgccagtttatcaacctgccagttgttagtacccaacccttctctttttttcaggtattcttctggcgttttgttatcagcaggtatatcacttttatagctaaaatcatgcgcgaacgcctgagaacagccaattaccataagaaaaagcaagccgatgatccttttaaactgcataaatatcctagtgtgattataactaaaaatcattatttaatagtcattctccactaagatcaactaccagttataggtagttagtaggccaaaaacaaatacccctttacaatcaaaagcaatttcaacatgctagctgagatttttttatgtaaagtgagtttctgatgtcttcataccctatttatcatgtcgatgctttcacagaaaaagacttttccggcaatcctgctgctgttgtcttactggatgaatggctgtcagatgaggtacttatcgctatcgctgctgaaatcaatctttcagaaacagcttttttagtcggtgatcacctgcgctggtttactcccagagttgaagtgaatttatgtgggcatgccacactggcaaccgcttttgtcctcgttgaaaaatgttcataccaaaataaattaattacatttaagacccgttccggtgatctgcatatgactcatcaggatggtgtttttacattagatttccctgccgctgattgccaggaagaagccaccctacttcctgttattcaggatgctctggggcaaaaaatcaaagcagtatttgcctcccatgaccgttatatctgtgtattggattctgctgagcaagtccgccatattcaacctgatttcgataaagtcgcttccctccctttaccgggactggccattactgctcccggcgattcatccactgactttgtttcacgccatttcgctccggcgaaaggtgttaatgaagatcctgtcacgggttcaacgcattgtgttttagcgcctttctggggtaaaaggcttaataaatccatcctccgcgcccgtcagttatctgaacggggtggtgatatattgtgtgaagtgcaaggaaaacgtgtttatctgacaggaaaagctaaactattttcttacggtcaaattgtgctttaaatcaattatcatcttgcttctgagagtaaaaattaaaaaaagcaataaggaaaggtatgactcagttatatatgttttatcttggtggaaatgccggaaaatccaatatcgaagttcatgatgtccagtttgttgctataaataaggttgaagaagcctatcccgtgttacgcgatgtgtggtttggtgataaagataaacttcatctggatggctatatgcctgttagatgggcagatggctatgatatttctctcagcaaaaatgaatacgccggggatttacgactttattttgtaaacgtaggtggctatcaaaacaattcactggcagaagcccatgaatacggtttttttgttggccgtacagctgaagaagcaaaagaaaaagcaaaaaaatatttgcttactggctatgatcaattacataaagataatctgaaagatgttgatgagtgcctgcttttgggacaagtgagtggctactatattcatctgactgaaaaccctaacgggctgcctgataaaccagaatggcaagggtatcgcccaatcgggatctaataaaaaagagtcagcagcttcataccttgctgactctactaacttcaaaccagcagtaagttaaaataatgggcgcagattatttactaataaatctgaatttatatcattgacagatttcgctcccgtcagcgtcatagcaacccgcatttctttatcaatcaattctaataagttggaaactcccgtttctcccgctgctgccagagcatacgcaaaggctctccccaataaaacactgtcagcacccaatgcaagcattcttacgacatctaaccctgtgcgaatacccgagtcagccagaattgtaatgtcatttttaacagcatctgcaatagccggtaatgctctggcactagagagaacaccatccagttgtcgtccaccgtgattggaaacaacaataccatcagcgccaaaacggacagcatctttagcatcttcaggatcaaggatacctttaataatcataggcccttgccaaaaatcgcgtatccactctaaatctttccatgatatagacggatcaaagttgctccctatccaaccgatataatcttccagcctggtcggtgtaccacggtatacagatatattgccaagatcatgtggttttcccatcacaccaacatcccacgcccagcgcgggtgggtgattgcctgtaaaaaacgccgtatcgctgcattcgggccactcattcctgaatgagcatcgcgatagcgagcaccgggaacaggcatatcagcagtaaataccagatttttaacaccggcttcctttgccctttccagaacattacgcataaaaccacgatcttttaatacataaagctgaaaccatatcgggcgctcgattgctgaagccacttcttcaatcgggcatacagataccgtagataaggtgaatggaataccttttttagtcgcggcacgggcggcctgtacttctccacggcgagcatacataccacttaaaccgacaggagccaatgccacgggcattgatatcttctcaccaaatagacacgtttccagattcagttcagacatgtctttcaacacacgctggcgaagctcaatatgagataaatcttcggtattacgtctcagggtgtgttctgcataggctccgccatcaatataatgaaacaggaaagggggtagcttatcctgtgccgcagcccggtaatcagttgaagcggaaataatcatgaccttcacctctgcccaaaataaaattaacggcaataatattgttttgactgatcatattgcccatgaccagcacatcaggcaacgtaatgcgaaacataaaaatagataagcctgttccacaaaacatcttttttatctgatggctgatgatagtttaggcaaaataacagaagtaaagtgagtagatactgttcaaccggataccattgttttcagggcatcataaaccggcagcaaacggataaaaccttccctgtcgagaaaatgccctgcattctcaatattaataatttcagtttgtaatgaattagcaagagcatgagatgattcgggagatacaatttcatcattagaagaaatgatagaaacacggtgtgctgttacttcacgtaaaaatacataattcaatggctgaacagtgaaacagtctaattccggcatggtactctgcgcagaatcgcatcctgcaaccaaaatatacccaccaattttatcagtcgtgtctttgattacttctaagtgacgaagtaaagtcacacacccaaggctatgaccaataaagattgtattatcatccacattgggtgcaatctccattagctttctggcccacgcttccggtgtaggtgataacgattcaggcatttccggtacaattacttctgcaccttgttcagtcagcacttcttttaaccagggaaaccaatttgatgaaggtgaagcagtataaccgtggataatgataacttttttaccagaaaacatagccagctcctttattattgatggtgtcattgattctatacacaatgaatttcaagatgcatcgcggcggcaagggagagacaaatttgtcgggaactaatttgcccagccaaaggctggcctccggtgagaggcaggagcctctcagtaatccccaggagcatagataactatttgactggggcgaacgagcgcagccaacaaagaggcaaaacttgaaagacgaagtgtatatcctaatgaacaagagtgtcgggcatattctatattcactcaccctcgatttttaatttttcgcgcacagccattaaagcaaagcctagtaagctcaaaccattccatgctaagggattataaatatcaggattatcttctgccattcctataccccaaatcctatctacagggctggcttctactaatactttatctcccgtccgcaataaaaatgcctccattgccggattttgagaaaatttagctatatttccatcaataacaatctttaaccgatgctcgttacaaattgattgattaaaccctctcacttcccgaccataagatttcgcggctcccggattttttgcattaataattttttccattgtagcaaaatcattaaataaccgggctttcccagccatcatataatgttctgcactaatataactgacgccatctacgacaaatttcgcaggataccactggcttaagcatgatttagtgatgagttcagtatggtgggttttatgcccccagaaaaagagatatttaatatcttcttttgactgataaagtttacataacgttttaatatccatattatttctctgtagtgaataactatattagttttataaccagatgcctctctcattgctcgattttgtgacagagtttaccgtaccaatagccagaatgtatgatgattttattgatattcggcttgtaatttcagtacaatcccctgaagttacacacttattttaatcagctcacacaaaactaactcgttgaaagtaaagcaagagatagaagccaaatcacttatcatattaattttattgaaaaatagaaaaacgactaatgaggatatcccatattacggggttaacctcctcaactaccttaaactcagcactaaaggttcaactggccattctgtcctatctgggattaaagtagtataaggatctcagatacctcataagcctgctattctgattaacgtgtattgttatttcatcttttaaggggctttatgctactacaaataataatggctgcactcgggcctattgttttaggtttagcggtaggttggctgtccggtaaatatggattgataaaacgtgaatattcacaagcatttgccgactttgttgttaagattgccttaccctttgctttatttctcgcagccgcaaaagcaccaccatcagtactactgaatattaactacttattaacgttagctgtcgggttgattgcatcttatattatcggtttttttgcaggtaagattctcttccgccatgataaaaaagactcggccatgcaggcattatccgtttctttccctgacatggcttactgtgggccaccggtattattggcaaccgtcggttcatccggcctgattgccatgatacttgggaatttaatctatacgattattattattcctttcactttactgatgataagtgacaggaagaaaaatagtagtgttttaaaatcggttggaaaagacattgctcaaccattagtgttcttacccattctgggagcactgctggcaatttttggcgtcaagctaccggaaattttgcaaaactccgtcgatgaattaggtaaaacggcgggtggtgttgccctgttcttccttggcctattactctcaggcattaaattaaagatcagtgttgaaatcgtttttaacgtcttcgtgaaaaactttgtacaggcagctttagtccttggtacaggtctcgcattaggtcttcaaagcgatatgctgaaatcggcatttattatcgggtttttgccaaccgcaacagcagtccctgctctggcaatcactaacaaagcctacacagatacctccgcagaaactgtgttactcagtactcttgctgcccttatctctattatcggtggtattaccatcgtcgaaatgttgtaaatctactttacaggtcattgatcccaataaaatattggatattttagcaaaatgtttttcaaatcgttctaccagccgaaaggcgcagattcgttggtagtgtaatatttgaatatgttttccctcagcaatgctgagggatgacccagtaaatgaacaggcaggagtgattaattatcccactgaggagcaaggccttccggattaacgatacgttcgttacattcaagagtagcaatagcggccatgtcatctgcatcaagtttcaatgcggtagattttaagttgctcgctaaattctctttcttagttgaagaagggatcacgctataccccaatgacattgcccaagacaaaatgacctgtgcaggagtcgactggtgtttttcggctatgcgaccgataacctcatcatgaatcgctttgccatacgctaaggtcatgtaagaagtgatatgaataccatgctcttgtgcccaagcagtgacatcacgattttgcagataaggggaaagctcaatctggttcgtggcaatatgttcagcgcctaccgcatcaatagcctgttgcatcaaatcaatggtgaaatttgaaacaccgatttcacgtgttaaccccatttctttagcttccagcaacgcattcattgtttctgcaacactcaccacgttatttggtgacggccaatgaatgagtgccaaatccacataattcgtgcgcagtttcacaagactctctttaaggcttgatatcactttttctttgctcagattttctgtccagatctttgttgtaatataaatgtcttcacgggcaataccactttcttctatcgcttggcctaccgctgcttcattttcgtaaatctgcgcagtatcaatcgcgcgataccccagctcaagagcgttttttaccgatgctatgacaacatcatctttcagacgaaaagtacctaatccaaatgcaggaacagacataataaaatctcataccgttaatgtttaattcgggggttattatcatgagatcgtttactctgaaaaagagcaataaatgcagaagtcttttgcgtttactgcaacaatactggaattactgtcgaattttggccggatcatttactgcttaactttcttcctatcacaaatacggctgccagcccaatcagatcaatggtaactaacgttcctgcaaataccatttcacctctgaatgcaaaaaatgtcgcaataattaagataaacatcgcaatggaaaaccccatccactgtcctctcctctctttttttatcatgccatccagcgccaatctattattgtcatactgaaatttttgctctttctccctgaataataatattctttcagtgcttccagacaatatggattcgtaatcccttaatacatcgggaggaggcaaaggccagatggcaggccgaataggcttgattttccagattctttttattatccaaaatttcctgataatcatttgcgggcataatatcaaaaaaactccccattgttttgagataacaacgaatgtaataagccatattttctccgaaagaatatacacaaaacagatgagaataaaatcaactaactaattaacaagaatcaataattaatactgctgaaactcattatttccctgattcaggtggtttctgactcggaaatggccgacattcttcagctttataactcccatcctcctgacggatcagaaatatttttcgcccggcacgtaatgccttactaatagcagtttgatgaactccaattaaatccgctgttttcgcctgaccattttgttttacatattctgataatgaaatcttttccatataggcctcctgtatttcagaataatatccaaagtattaaatatttcaatacttttagtatttactattttaatagcattggtattaaaatgagttttatgaaaaagaaactcacagcagaacaacttgcagatgccaaacgcttaaaagacatatacgtgtcaaagaagaaacagctaggtatctctcaggaaaaattcgcggatgaacttggcaagagccagggagcaatctcgcattatcttaatggtacaaatgcgcttaatttggagatagccgcttattttgccaataaattagaggtcacaatcacagatttcagccccacattggacaaacaggcaaagaaactcttaaccgctgtttatggcaagaatattgctctggttgagaaacccgatacctgcaaacaatacccgctactcgactgggcagatgccggcaattggtgtgaagaacccatattgccctacagtattaaacagcggtacgacagcactgttgagtgttcacgccatgctttttggctggaagtaaaaaatgattctatgacttcaccaaatggaatcagtatcccgcagggaatgatcattttagtagacccgaaagtaaaacccctcgctaataaattagttattgcaaaacttgagggtgaagaaaaattaacgtttaaacaattaattacggaaggatatgatacatatcttaagccactgaatcctcagtacagtatgatacctctcagtgagaatattcatattctgggtgtcgtagtggaagccagagtggcgaaattaccctaaagcaaaaatttatttatatacatgggcttcaggatgcatcgcggcggaaaaggagtgacaaaggccagccaccgcgaaatgtatcatttaataaaacatggtaagtcctataataaatatcaagccggagaaaagaagcgcggtgatgcaataccccataatgtcacgcacacccaggcctgcaatagccagtgccggtaatgcccagaatggttgcgccatgttcatccattgctcaccgtacgcgatagccataaccgatttgcctaaatccgcccccaaagcttcagccgcagacatcacaaacggcccctgaataacccagtgacctccaccagacggcacagcaaagttaattagtgcagaacttaaaaacgtcatcatcgggaatgtatctttgttggcaacgctgataaaaaactcagtgataagcctgcccaaccctgagccttccatcattaactgtataccggcataaaaaggaaactgcaccagaatacccgcagtgcttttcgccgctgcacttatcgctcgcatatacgccatcggggttctatgcagtaataaaccggtcagcaggaaaatcatgttgactgtgttgatggtaatattaaaaccattgctgaagaaatatatgccgaggtaggtaaatcccagtattccgataagccctgcgataatacggctttcttccatacgttcagataacggggcattttctggcaattttttctgataatcaggctcttcttccagcaagactggatcgattatcacaatatcctctttcttcggcatcatcatacgggtgacaaacggcatcacaacgataaggctgagagtgataaagatattgtaactggtaaatagggtctggctaatgggtatcagacctgaaatatgttcaaccggattaccgggagttgctgccaacagcggcattgagccggaaaaaccccctccccatgtcagaaagccgatgtaagcacaagcaatcagcagcggataatcagagccgggtatcctacgtgctacttcacgggcaaacatcgcgccgacaaccagaccaaatccccaattaatcacacaggcaacggagccaaaaaaagtcaccaacatcactccctgagcaggattttttgccagtgaagctgtcagcctcaggaggcgcttaaccggatcggaacttgccagtgcatgtcccgtgactataatcagcgccatctgcattccgaaggcaagtaagttccagaaaccatccccccacatttttgccagatccacaggagtgctgggcgtcaacgatagcgcaatgaaaaaggtaagtatggtgagtaacatggcgaagatgaggggatcaggcaggtagcggctaacaatccgtgtcattatacgagaaatgcgacctatcataggccatctccgatcacaccagaaaacatcggctttacattaggagagatgataaattcagcctcagttttcattttgatagtgtcaatatctatacccggtgcatactcaaacaatatcatctgattattttcgaaacggaatactgcaagttccgtgatcaatgtatccaccgcatttactgctgtcagtggcatagtacactcacgcaaaattttggctgaaccctcttttgcacaatgttccattgcaataatcaccttacgagccccagtgaccaaatccattgcaccacccatacccgttatcctttttcccggtatcatccaattagccagatttgcattctggtcaacctgcaagccccccagtacactgacgtcaatatgaccaccccggatcagtgcaaaagaaaaagcactgtcaaacatagaagctcccggcaagacaccacaaggttgccctcctgcgttcaccaaatctttatcgatctgtgtaacaggccccaaaccgagaaaaccgttttcagactgtagggtaatatgcactccctctggcaaatagttcgccacctgagtcggaagaccaataccaaggttaacgatatctccatcgttcaattcaagggctacacggcgagcgatcagttctttaacgtccatagttaattccctttttatttaacaatgagataatcaataatggcccccggcgtgacaatatgatccggatcgagagaaccaacaggaacaatttcatccggttcaacaaatgtggtatctgcggccagagcaataagcgg

SEQ ID NO: 218 - DNA, 11928 bp, Xenorhabdus sp.; identical to SEQ ID NO: 80
  CDS (5593)..(6705)

SEQ ID NO: 219 - DNA, 11928 bp, Xenorhabdus sp.; identical to SEQ ID NO: 80
  CDS (2067)..(2549)

SEQ ID NO: 220 - DNA, 14112 bp, Xenorhabdus sp.
  CDS (4999)..(5643)
aatgttaattcaacaaaaaattcttaaaataaacgtacttgtttccagataaaaggatagggcccggcttattttaaaaaattatcacgtagactttttatatatttgataattgctccttaataaccccctattaagagtaggtggaactttttatataaaagaaaaatatctgttacattatattttacatacaattatgtgaattaaagtacataaattgttaattttaattaaattaaaaatcggaatgatgtcatcatagataagtgtcttttttagaaaaagcataaagtaaatctatttatattaatatcttgttaaaatcattattgaatgccactttattttcacggaattttattttcatgtttttatagggttaacaaccaatataaaagtgtggttaacatttttatctactatttatatgattgctaggttacttttatgaaaaaaaatattgctagtgttatcgttgatatccttcaaaattccggtgtgaaacattgctatggtattgttggcgatactcttaattatgtaacagatgctattcatgccagtgatattgaatggatccatgttcgtcacgaggaagttggtggctttgcagcaggcgctgaatcattcatttctgggcagattagtgcatgtgctggttcttgtggaccgggaagcttacatttcatcaacgggttgtatgaatctcatcggaacggagcgccagtaatactaatcgcaagccagttagcaacatacgtgaatgatagctcttttcctcagtatgtagattttaaaaaagtttatagtgagtgctctgtgttttgtgaagaaattagcaacccagaaaaagcgattgaaattacaaaaaatgcaattagtgctgcactgagtcaaaaaggggtggctgttattatattacctgtcaatattagtaaatcagagattgaatatacatcaaaaattactgttaattatcatccaccacaagtgattcctgccttagaagatattaaatcactggctgttttattaaataaaggtaataaaattggcatttatgcagggataggcagtaaagatgcaagagatgagctgcttcagcttgctgaaaaactacaagctccaattgcacatacttctcgcgtaaaagatttcattgaatatgataatccctataatgtgggaatgacaggcatgcttggtatggagtctggttttactatgctaaaaaattgcaatgttttactcttgttgggtactgattttgcctggcctcaatttttccccaaaaaggcgactatcatacaggtagatattaatttagctaacatagggaaacgccattctgttcatttagggattaatggtggtgttaaagaaactttgttagagttgcttccacttcttgaaaagaaaaccgatgatggttttttgcgcaaatctgtcgaattccataaaaagacattggaaaaaataaattggctggataagggcgcaaaatcaaaaattattcatcctcaatatttagttcaattgttggataaacatgctgatgcagatgctatttttacggcagatggtggttctccggtggtgtggttattgcgttatattaatactaatggtcagagaagaacattaaccagcttaaaacatggcacaatggcgaacgcaatgcctcaggcactagggctaaagaaagccttccctaaacgtcagattatctctatttctggtgatggtggtttaacgatgttattgggagatttactgacaatgacacaagaaaaactcgctgtgaaggtggtggtgattaacaataaatcactcaacttcgtagaactggagcagaaagtagaagggcttcttaataactatactaacttagataaccctgattttagcaagcttgcgacatcattagggatctttggtgaatcaattgaatcaccggagaaattagaagaagccgttattcgctttctaaatcatgatggcccagcagtgttagatgtacatacttcgcccaatgaattggtgatgccaccaaatgtagaattaaatagcgtagttggaatggggttatatactgcaaaagctattttacacggacgtagcgaagaagcgattggtttgattatcgataattttattcgcaaataaggttatatgctacttataggatatcaaatagacttgatatcctaataaaaaagcagtccctaaaatataattttcagagagaaggggatgtacagcgcagaaacatttcttccaggatttcaataatcagctcggcataataaccatcgggatctaaatcaggatcgaaaactgaaacagtcatgccacaacataatgggttattaattaattgtgcgccgatatttttcaaccaattcaattcaatgcccggactcccgggtgaatcaaccgctggcatgatactttggtcaagaacatcaacatctaaatgtacccaaaaacgccatgtcggttgagcacctaacatttgctcaattttgttgaggatccctttttcgcctattgaatttgctgtaaatacatcaatctgtgaaatagccgtttggttaatatcaggccaagcaaaatcagcatctcggttctcgcgttcgcctaactggagtacctgctgctctggcactaatgggctttctatatctggccagtctgttaatagagcctcaccgcgacctgttgccaaagccaaatccatccctgctactgcacctagcatttgatttgtatcgtagttgtctggatggcgataatcactgtgtccatcaatgtggatgagtgaaataggccctgtacgacgagaaccagctaatgcgcctaataggattgagcagtcaccaccaataactagtggaaaattgccactctcttgtaccttagccacttcctccgccaactgtaaattaaaggcacgaataccataaccattgcgtatacgtgtcccaatttgagcttcaagtgaatatattggagacattaatttactgatggtattagctcgcagcttttgcgctaatccatgttccatcagtacttgcggagcccgccatgtcccgggtatgtgtccttcccatagggggcttaacccaaggttggttggtgcaagaatgatatgaatcatgaaagctccattgataaataaatcataagcgaatgaattaatatggaatcatagatagaacactcagaagagtaaatacattagctcaacaaactattgccaagcaatttcagcattatgtatgcaaataaaaatgcaaggtagagcaataaaacagctatatagcttgtttctacccatcattagacatcaggctaagaatatctaaactaatgtaaaggctaccccggctatctgccagctgaattgttcaagtaactgcctattctgtaccaagtaaaaactatggaataaatcatgactgacgataacaaacaacaaatgctctgcacattttctgcgactgacttaatcagtaatatacaagatgtcgataaatgtatctctgtgtacaaagcccagcttgaacaaggggatatccaaaaagcatatcattatctattgcggtacatgatgcatttaaaagcgtatttaacaaataatcttgctgataaattttttttcggaaatgtctcgcccggatatctggactttacgtacttttcgttctttgacgactatctacgggagcgaaaactacgctttggcattgttctgaatcataaagctttacgcttcgaactatggttgatggggaaaaacgcaactatccagaaagcatactggaacattctgaaaaatagttcgtggaatgtagagcgcaccgaaatgcctcaatacagtgtattagaagcggtacttgttgagtcaccggatttcacaaatgtggctctacttaccgtacggatcaaagaagaagcgttacgtatctcagaggctgtgctcgacaacctcagaggttttgaggtggatgacaaaccataagtcgctgatatgttttgagggttaattgttttgtctgaatccctcgtattttcagagaagagtagggagggaaccctgatacatataatgagtaggattacgctatgatgcttggattatgtacatgatttaaatttaacataatatagattatgcgaacccttaacgcttttaaaaaagtactgaggtttaaccctgagtacccgatctttctttccctaaaaacgctctcaattggcgttgtatacaaatcactaataacattatctatagatagtaaacatatcacatgtttcctgtcaacatgtcgtaggcaacttgcacacaaattttatagaattaaagattatggtgaacggaggctgctaatgggtcatgcatctacattgaaaactactatcaggttgaagaaatcggaatctatagatttacaggaaaaggcattcctcttaacaaagaaaaatattatgagcggacggcaaaaaatttacagtgaggctgatttggtgcattacgcaattgaacaaatgctgtccatgatcacacttgatgaacatggtcacctaattttggaaaaagacagttaaaatttaatctcaaggtcatgaatagactattttttcaccccaaaaaggttctgatatgaatagtaatcaaagtaataacaaagagttatgtaacctactccgtgaatattctactccccatgttattagagagaaagaatatgatcttgattcattattagcgggtgtgaatggtaaaaatattcatgaagaagtggatttcggttcgcctgtaggcaaagagacaatctaactaaaaaacagttaggttttgttcaggttcacctgaaagcccgaagataaccttagactacccccgtagtacagtacgggggttatatgtgacaatttgaaacaaaacaagggtgaaaaatgaacggctcaagaaaaatacagtatagaggttcattagatctagcaggatttaacatatcctgttacgtattgaaagatggtacacgaatactctctggaagagaaatgcaaaaagctctaaaacttgtcgatgaggaaacaagttaccaagtctcaggagatagattacaacgatatctgaaccaaaagtcacttgctccattcatctataaggataaatctgaaacacactatgaaccaataatatgctatgaaggcgaaaaaaagattaacggatatgaagctagcattttagttgatctttgtgattcattcatgcaagcaagaaaagaaatcactctatccgctaggcaatcaataatagctgaacaatgtgaaatgttaataagatcatttgctaaagtaggtattatatctttaattgatgaagcaacaggatatcaatatgacagggaaagagatgaacttcaaaaaatattacaagcatatgtatctgatgaaatattaaaatggcaattaacatttacggatgaattttacaaagaaatatttaggctttggaactatccatatacatctaataacattaagaaaaaaccccaattcataggtaagctaacaactcaacaaccaccgactaaagtcggtgggttagtgattaacggactgaaagtccggatacgcatcggctaaacgatgcgtcaattatccagcctgaagtgatcattcgggttcggttcaaaatgatgcgccagataggcctttatcatctcttccgttaactgacctaccgtcgcacaaaaatagcctctgccccaaaaatgctgaccccagtaacgctttttcaagtgagcaaactcttcaaacaacttacttgctgtccttccctttattcgcctcatgatttctgagggcgctaagctcggaggacaactcaccagtatatgtacatggtctttgctcacgaccccttctactatcctgatttcgaacgcttcacaggtctgacgaactaactctctcacccgtaaaccaacttcacctattagcactttgtgcctgtattttgttacccacacaaaatgatactcaatctgaaataccgtgtggctgccatatctgtaatccatattgcacctctcgtgcaacacagtatcgcagctaaagctgaccgactaaagtcggtggttttaaccttttatatggaaaaataaagatacgcaatcattactgagaaaagctccatctccttgaggaggttccatgcctgcattattgaaatttaataaccaataatcaccagtcagaacttttagcatatcttcaagatcggattttagcggtagccacttatctggattgcacaatccaaccgtaagctgaatattccgggtccagccatctgcacttgttcttctagggcttgatagatccgcgctacataccgcgaggcaaaactgtacaaaatcccaaatctctgttgaaggtcgaaacccaccccgttttaatgcaccatgccatcgattcgcaattgtaccaacacctgcacgcttagcgcctttaaaataggagaatactcgctcatcagcaggaacctgcgctggaatcagttctgctttagcacacataactttaatcattctgaaaatacctctaaggcagagaagagaatagactgagccaagcttttcggttctgtattttttgtagtttgtttttccaataccactctaacctcagcaccgacccactcgcgaatatcagaacgccgttcctgaattaataaaggatcatattttaatttttcgtaagtctgtccaagctggagatctattcgattacaaatctcattcgcaatggtcaaccccatgacttcagctatttgcgcatccgtgagattaaatatgtccacgtccggataaagttcatagagttgcgccatagcctgcgcgccagcattacggagcgattcgtcatcaacgcttcctgtcccaggaataacctctttcaaaatttcaagagtaagatctgttgccgaaagattctcttgacgaacgtaagtaagccaatcaatcactcgctggtcgtttccatccctaacagacgtcaggaactcaccaagactaccgacaccactggcaacacctcgcatagtagcggcagctcgtcgcacgccccccattcctttggagaccatgctttttgtcgcaccacgtaaattatcgtggctgccattttgcagatatcccccaagtagcgaacgagcaggtccaaaccgtcgttctggtgctattgcaccatcaggaattacatttccaccgttctcctccgatggtgaatcaggcgaatctccttcacctgttgtagagtcactttcaggttttaaccattcaggatcaaacggtgaacctgcgcggcctcccccactagaagttgatgttcccattagcgcctcctcccaaggttcacaattgcattcctagtcgtttttggtaattcgttaagatctttccatcgttctaaaagttgctgtgcccatggctgagcacccagagttgggattaaacccgggccaataagtttcagaggggcctgatccaacaagttgactgctttatttccaatttccgtgtaaaccttgcagcactcaatcagcattacaatttctttgctactcttccaggtacgtgaggcactattactctgccaggccttagtcatcgccaactctgtctgtgaaggtcctattttcctcataagttcaactaaggattcatgaccattagttgcaactttcagtgcgtctctcaattttctagaatcaggagtcatattgtcatcaccgaagtcacgagttccagagtcacgactgaggtggagaagcgggcgtagatcctcggttcccaaagctggcaggagttggagccattgctgagtaaatggcgtattcttgaaaggctcaggtaaactactctgatccgctgcagcagcttcagcatccgccaaaacttgtaccctaccgtcattatccgaatgaacacgactagcaagttcctcagcaaggctttcgtcgcacctttcaaggagatgccattttgccagtgcggctatatctaacgttattccctgaggcgcagaaagagcatcacgtaaataaacagtatttaaaaatcttttcattagccggggattagcgtttactgctaaagaactatgaagaagagccgcaagaccctgggctaaatccattaaacttttgagtgcattaacatgctctaccaattcatataaaaactcttgattgatcgtttcacctttccaactattacgcagcttctcagggataacgctaagagcatgattgaatctttccttactgaaatggcctgcgttggtctctcgctcaagcagcaaaagcactagatacgctttcgcctcattcaaaccaaggcgaggaacatggagtggaacctgtattaatttatcgaaatagttagttgcaacatcgcccgtaattcccgcgccatcaaagtgaaccttcactgcagcttttatgaaatcattatctgcagcaataacgaaagcgctacggcgaataaatagtaataaacgaattgattcaagtgttgaaattgctgtttgtggcaaacatctgtctaaatcatccacaaatattactagggcgtgttgacgttttgttttcatcacttactcgacccacatgggtaaccagataatgataaatgccagtgctaatgtgctggcgtaatttctcgctaatttatcgtatcttgtggcgattgcacgaaaatgtttgattctggcaaatgcattttcgactaaatgacgataacgatataaatccttatcccactttttatccgaatttcggctattttttcggtagggaataaccgctgttgcaccttgttcttcaatataagttctcaatgcctgactatcgtatcccttgtcagcaacgacaaaatccgcgggcggtgattgcgccaccaaactttccgcatgcaccatgtcgtgagtttgtccctcggataattcaaaatgaacaggcaggccgtaactgtctacggccaaatggattttagtcgagcgtccaccccggctttttccaatcgcttcattttcctttgaagctgcgcctgaactgtgctgatgagcacggacaatactgccatcaataaacaaccattcagtatcagaattcttagctaattcgttgaataatgaattaaaaacacctttttttgaccagacattaaaacgcttaaagaccgtattccatttcccatattcagcaggtagttcccgccagggtatcccggttctcattcgaaaaagaataccttccatgatgaggcgatgcgtttttttatgataggtaagccgattttgttgcatgaagacaaatagcttatcccacacaggatctgataacataggtcgtggcatgatagttcgggtaacgagttttttggcgaaaataagagaccaaattatcatgccacccaattcccttcgagcaaacgtcaacacgccctaaacatttaatgtgaattcgctggtgaaaatttgcgttttattgaggaatgtatctatgaagtttatttttttgaataaattcaggcggtttttcatattaatgtttgcttttttattaccgtttgtcgctatgaacacgttttcagtgagtgaaagccatcaggatctggcagtaagcactatttctccgattgaagacgaagaaaatatttctggttatatagaagaagataaagccagcatggtcgcacaaaatattcagaggattagtggcttattatcatctacgccatctcaattggcagagcaggctaaatcttacgctttgggaagattgaacggaacaataaatagcgaggtacaagaatggttgtcacaatttggtacagccaaaattaatttatcgttggatagaaaaggtaaattgcataacagttcattagacctgttatttccactttatgataataaagtcaactggctgtttttttctcagctgggttatcgtaataaagacagccgaaatacagttaacctcggttttggcagccgttatttcatctcagactggatgtatggttttaatactttctttgatcaggacatcacaggaaaaaataaccgactgggattgggtgcagaagcatgggctgattaccttaaattatcagccaatacctatattcgtctgagtaaatggcaccagtcacgagatgataaactttgggaagagcgccctgctaatggttttgatatcaatggcgagttcttcctgcctgcttatccgcacatcggcagtaaactgggttacgaaaaatactttggcgatgatgtgactctattcaaccgtgataccaaacagaaaaatcccggttttgccaaagtaggcatgacttatacaccaattccgctgataaccatgggcatagattaccggcatggcaccaacaaacacagcgatgcccgctttcaggccaatttcaactatagatttggtgtaccgctgagtgctcagttgtcaccggatagtgttgcatcaatgcgcacactggcaggcagccgatatgatttggtggaaagaaataacaccattgtgctggatcacagggaaaaaccgagtctggaaattagattaccgaataccctccatggagatagtgaagaggaggaaacaataatcgctactgtcacgtcaacttaactaccacctactgaagtaggtgggttagcgcacttcggtgctgacgactgaaagtcgtcgaaccacgcacctcgtaaacgcgcgtaggtcaaaacattaaagtcaaagtcaccgtctaaagacggtggttttaacctgtcatatggaaaaataaaccgactaaaccagtgacatggcgagcagaagaagcattcagcaaaaatggtgggaaacttccgggcgcgggtaatgaaattcaaattaaattgcccaaatatatccccaatggtgtaaatagttacccgatttatgccatggtggaattagaaaacgggaaactatccaaaactgcaaaaatgactgttacggttaacgataaaaatactgaattgggaatcaccttaccgaatacccttgatggatatggtaatcagaatatatcagtcactgctgctgtggtttcaagtgaactgaccaaaccggtgacatggcaggcagaagcattcagaaaaaatggtggggaacttccaagtgttggtaatcccattgaaattaaattacccaaatatatccccaatggtataaatagttacccgatttctgccacggtggaattaaagaacgggaaactatccaaaaccgcaacaatgactgttacggttaaagatgaagataaaaatactgaattagaaatcaccttaccgaatacccttgctggatatggtaatcagagtatatcagtcattgctgctgtggtttcaagtgaaccgaccaaaccggtgacatggcaggcagaagcattcagcaaaaatggtggcgaacttccgggcgcgggtaatgaaattcaaattaaattacccaaatatatccccaatggtgtaaatagttacccgatttctgccacggtggaattagagaacgggaaactatccaaaaccgctgaaatgactattacggttaatccttttgctcctggagataaaccgttcataagtgaaatggaagtttctccaaaagaaactctctttgggaatggaaaagatgagtatacctatagagtcttaattatcgatcctgaaaacgggcaaccacttcgtaactacaaactcaatgcaacctgggaagttatcgtaaatgaattgctgcgtaatgatgtgtattttaaggaacaggaacaaacgacagataatgatggatatttaaaagctttactggtgagtaaagtaggagtggatggcgtcaaagtcaatctgaatatcacggctgatgatggtaatgcatatgccagcaatagcaaggaaacacccgtcaatttcaaaccggtagtacagaaagccgggttactcatcttcggacgtcatgctcatgagaataaatatactcatgaacaagataaaccgtataatgtttatgagggattaacgataacactaataaaaccaagcccaaaccatgaacattatcatgaggatattgcccgctatgacgatgatattgaatatgcccccccatcttctgatctcgtggaaatagtgaataaaaaaatcacttttccttttggaacttttagctcatctaaaactgcaacggttattgcgacagtgactaaagccaagtcgggagctaaatatgcgtatacatatactttcaaaccaaagaggtatgtttttagcccggatgatgttggtgatcatggagaagtaaaactgggggataatagtataaacaacacgtgtgacaagcttgatcttcgatattcaaaggggcgtcaagctgaatcaatgactgaggaggatgttagtgaaaattcaactaacagtaattctttggggcgagaatatgcttattcacctttagaaggcttctctggctttggttttttgccttatcaggggcagccaaaagatctgaaagtaaaaataaaaagtaaagacaaagagggaaagtttattctatatcattattatgcacagggtggtcaaattgattttgagcctgctgcttctaatgattttggtagattactatgtcaattgaaagagtgaatgtatggttaatgcaaattaacctaacacattgaattaaattcaatatttttaggttaaatcgcatttttgttaaaggccgcctagtgcggtctttttactttttggaggagtatccaaatttaccacagcacaacagctcaggatgattcacttaatacaacagaaccgttttgacacaaaaccagcaaataattaataatgataattatattgataatcatttctatttgcaatattgtagtgccgttttcttcttcaggagatcataccttttcatgatgaatgttttatcaaattgggtttccagcgccgcctgtaagcagcacaaatgaattgatggttattagattatttttataaggcaaagtcagacggtgtttgattatgtttaagataagaaaaaaacttgtgatgaaactcatcgctctatgcgaaaaattagggattcaggttgggatgttttcaacatctattctatctgacagagcgtatgtagttagcgagggattagcatcatgagagttacaacctcagcgctgaaactttccgtaaagaggcgcgtttctcctacttctaccgcagcatcttctccacagccagctataacagataatatctggtatccgacactattggcggttggcattttctttgcctgcggtattttcctcctctccggtatggagaaaaaactgaccattatactaacaagagggacctgattttgtctggtatcgtcaacgaacttctgccactcacgttgcaagaagatgacttcatatttctgtcacctcacaaaagtttgctcgcccggggatgcttcgccaccttgacacttccggcctcatccggacatcatgtcgaaagcgagttccagcaaagagtacagcagcagcttcgtctggctcagcaagccggagtagaaaatcctattgtcgtaggagctattccttttgataaacgccaaccctgttcgctgtttattccacaaatctgccattggttcgatcgctatgcctttaacctttccgactctccggtacaggtggagggccagactcacttcattccggatcacgatgcgtattgcgccatggtggaaagtgcgctgaatcctctgcgcattggtgcgctcgataaagtggtgttatcgcgtctgctacagattgaaagcattcccccactgagtgcactgaacctgtggctacaactcaacaggcagaatccacagagctataactttcacttgccgctggcagatggcacgttgattggtgccagccctgaactactgctacgtaaagaggggaataccctgcgctcctgccctcttgccggttctgagcggcgggg

SEQ ID NO: 221 - DNA, 11926 bp, Xenorhabdus sp.
  CDS (5330)..(8665)
ctgcccaatccgtttttcgaaacaccaaatcgtgttacggtctggaatattaatgacatcggtcaagcgacaaaaacgttgccagctcattcggtcaagcaattgatattccattttttcatcggaaagattatggaaatgtttcaggataatgatgcgaaccatcacctccgtcgggaatggcgggcgtccccctttgggggaaataatacgtgggacgatacggtctagggtgtcagccagtgccgagaaatcaacatatttatcaagaacaagcagcggatcacctaattcatcgatttttcgacggtgatattcggatgcctgtttgtctttttttaaagcagaacgaggcggtatcatgatggcgctaccttgcagagaggtactgtgcctacattttactcaattttgtggctgtgaaaagtttttagaggttcccatctgttttgatactgctccggtacttgaaagtgtggggggtatatcaaacaggcgagtttaatatgatgaaatagagtatgtaacacacaatgtaaagaatgctaagtgctgattaaatatactatgcatgtttgttcaacattggagtgattatatgaacgcaatatggataccagtagtcagcgcatttttagctagtgttttttctttactcattgcttggtttacgaattgttggaatgaacgtcgttttaataagcaactcaaacatgaaagagaaaaagacagtaaaaaacttttaatagaaaaaggcgaaaagctcattatcttactctattcatttgttcaatggggaagtcatcggctggggtatgaatcaattgatgaattaccaacaaaacatgaattcgactacatagaatttgaatttattgctaaaacttatttccctgagttcgaaaatgatattagtctggtattagaaaatctcaaaattaaagatgattcatctgaaatatataaatgcttcatattggaaacagataaactgaaaaataaaataagtttaaaattaaatgaattatcaaagtaaaccaaaccaccttcgggtggttttttgctatatggagaccagaacatgccacctcgcatcccccgagcttgtcgcaagtcaggttgccccaagaccaccaccgaccgcagtggctactgcactgaccatatcaacacaggctggcaaactcaccaacagggcaagagccgacatcaacgcggttatggcagtcaatgggataagctaaagacgcgagtcaaacaacgggataactttctgtgccagcactgcttacggcaggggctggtggtcacaggcatcactgttgaccatatccaacccaaagcccacggtggtaccgaggcgttaagcaacctgaaattgttatgtgaagcctgtcatcgacagaagactgcgacggagcgattacgagagattaatttctgagtgtaaccattgctcatgtcatcgttatagcggaagggcggatcaaatcgctgcccctctcgcacctaaggaccgccaccgtgggtctttttttatccccgcgaaaaatgaaatttaaatcacgcgtttttcactgtttttaagcacgggaggtgtggtgtatggccggaacggcgggcaagtcaggtcgtcgccccaagccgacggcacgcaaagcgctggccggtaatccgggtaaacgcaggctgaaccgggatgaaccgacgtttaccccattgacgagcgtttcaccgccggattggtttaccgaaagtgacatgtcgctggccggggtaatgtgggcgctgaccagcaaggagttatgcgcacaggggttactgtgtatcaccgacctcgcggtgcttgaacgctggtgtgtggcttaccagttctggcgcaatgctgtgatgaatatcgcccggcagggtaataccgtgaccggtgcaaccggcggtccgattaaaaacccggagctgacggccaaaaaagagcaacaggctgagatggataccaccggctcgatgttgggactcgatccgagcagtcgtcagcgtctgattggggcggcaggtcaggctaaaacggacaatccgtttatgaggatgattgcatcgtgagccgtaaatcttacctgaatgttaatgcggcgaaccaatacgcccgtgatgtggtgcgcggcaaaattgaagccggtcgctacgtcagagaggcctgtcagcggcatctggataatctgaatcaggaaaaaagtcagtcgttcaagtaccggtttgataaagcgttggccgaacgcgccgcgaaatttatccagctcctgccacacaccaaaggtgaatgggcgtttaaacggatgccgatcacactggagccatggcaactgtttattatctgctctgcctttggctgggtacataaaggcagccggttacgccgatttcgggaagtctataccgaaattccccgtaaaaatggcaaatccgccatttcagccggcgtcgccctctattgctttacctgtgatgacgaattcggcgcggaagtctattccggcgcgaccacggagaaacaggcgtgggaagtattccggccagcccgcttgatgtgcaagcgcacgccattactgatggaggcattcggcattgaagtgaatgcttccaatatgaatcgtccggcagacggtgcccggtttgagccgctgatcggcaatcccggcgatgggcagtcacccagttgtgcgattgtggatgagtaccacgagcatgataccgatgatctctataccactatgctcacaggcatgggcgcacggcgacagccgttgatgtgggcgatcaccacggcaggttataacattgaaggcccgtgttatgacaagcggcgcgaggtgatcgaaatgctgtccggcaatgtgcccaatgaagagctgttcggcgtgatctataccgtagacgagggggatgactggacctcaccggacgtattacgcaaggccaacccgaatatgggggtctcagtctatgttgattttctgctgagccagcaacaacgtgccctgaataatccgcgtttagccagcgtattcaagaccaagcacctgaatatctgggtgtctgcgcgggaggcttacttcaatatggtgagctggaaacagtgtgaagacacctcactgacactggcgcaattcgagggtcagccttgttttctggcctttgaccttgcccgcaagctggatatgaacagtatggcgcggcttttttcacgtgaaatcgacggcaaacagcatttctacagtattgccccacggttctgggtgccgtatgacactgtttactgtgtggagcagaacgaaaataggcgcagtgctgagcgttttcagaaatgggtggaaatgggtctgctgactgtcacagaaggcgctgaagtggattaccgttacattcttgaagaagccaaactcgcttgtcaccggaatccggttaatgaggcaccgattgatcccttcggggccaccggcttatctcatgcactggcggacgagggtattaatcccatcatcgttacccagaatttcacgcatatgagcgatccgatgaaagcgctggaagcggctatccagtcagggcgtttccatcatgacggtcacccgattatgtcatggtgtatcggtaatgtggtcgggaaaacgatgggcggtaatgatgatattgtgcgcccgattaaagagcagaaagacagcaaaattgatggtgcggtggcgctgatgatggcgatggggcgggcgattttgcacgaagcacccagtctctccgatcatctgatctcccacggtgttcgctcactctgaggtttttccatgaaattattaatgatggctgccccgctggtcgggctggcaggcggcgctctgctgtcttacggcgcatggcggctgtccggcctcgaggcattagggcgcaaattgcaggaactggaggttgatcttcagactaaagttctgcgtcaagccggtaaaacggcgatggaaattgtgcaggaagacatgcaggctcatgcggggtatgactccaagagtaaagagccacatctgcgggacaatatcaaaactcgctccacgaaatcgaagaaatacccgggcggggtgatgattaccgtcggccccaccaaagctcaccggatgaaagccttagcacaggaaatgggcacgatcaaacaggtgccgagtccctttatccgtccggcgctggattacaacaaacaggccgttttaaccgcgctggcgcgggaaatcagcgccgctttatcgtcttatagcaaataacctgacaggagtcatcatcatgacaacgtcccccgaatacgctgttctgccggtaggtacggtcgttaagttcggcaaacccggcgatagcgtggcacagatgaaacccctcatcaactgtaaagccttgggcgcaaccgggctgaccggcagttttgtcgactgcaccaccctgatggataccaataagcagtttatctccgatatgccggaaggcccggaaaaatccctcggctttatcgatgatccggtgaacgaggattttgtctctttcctgaacgcggctgaaaaacgcgaaaccgtgcagttttacatcgccctgccgaataaacggactgccacaatggtgctggcgctttccggctgggaaatgaatgacattaacgcgccggcgagtgaagtgatccagatcaccgtcaaaggcaaacaaaacaacctcgtttggggtatcgcagacagcaaaacaggagttaacccatgaaagcactgaaagcggctttactcactccgcgtccgcagattaaagcggtggaattgttcggtacgcaaattaacctgcgccggatgacggcactggaactgctggagctggaagaaaaagcggaaaagctgagtgaagcgggagacgggcgcgaagcctcccgcctgaatatccagatggtgctggattgtctggtagatgataagggcaaaccccttcccgctgacttcctgcccacggcagaggaattgatgatcgtccatgataacgccatcctgattgaagccatccagaccgtgaagcgtcactccatcggtacactggaagacgccgaaaaaaactaactgactcgtcgtggctgcattttgccttcacgttagcggaacagctcggcgaaatcgatccctatcgtatcctgtccttgccggcgtccacgctcaacgaatggcaggcgtactaccgactgaaacaccgccaaccggcagacagttcgcccgctgtggtccgggcacagtgtgaggctgtcatgaaattattgggttaagttatggctaatttatcgacattgacggtgggcttgctggtcaatgctaccgcgtttaaatcccggattatggaggcttatcgctatgccgggcgggagtctgagcgctttacggatcaggcgggttcggatgccaaaaaactggaaaaaacctaccgttcactggcatcgcacatcaaatcggtgtccgggcaactggcattactggccggcaccggtttttcactgaacacgatgattttccatacccgtcaatacgggcaggcattgtctgacttgtctgccattaccggtgcaacgggtgaacagttaaaaaaactggatgaaaacgcccaacggctggggcgtaccaccgagttcggggcgaccggcattgcgcaggctctgaaactcatggcctcagccaaaccggagctgctcaagaacactgagcaactcacccaagccactgagaagccagtcatactggcacaggcgtccgggattgatctaccggatgccactcgtgcactggctttatctctgaatcagttcggtgccagtgccgcccaggctgaccgttttattaacgtactggcagccggggcgaaatacggtgcttccgaaattaacgaaaccgcgcaggccattaaacagggtggcaccctagccgctcaggccgggatcagcgttgaagaactcggggcggctattcagatactggcagagcggggtatcaaaggcggcgaggcaggtattgccctgcgtaatgtgatactggcgctggagcgttcgacagacaaaaatctgaaaccgtcggtagtgggtttatcgtcggcattagaatccctgatgggcaaaaacctgtcaacggcgcaggcggttaaattatttggccgggccaatgtcagcgcagcgtccaacttagtcactgggcgggaaaaactggacgcattgacccaagctctgaccggaacacaggtcgcctatgaacaggccagtgcacgcgcgaataacctgagtgctgatctggaggtgctgacgagtgcctttgaaggcatggcgttgaaaatcgggcagagtgccgatggcccattgcgtaccggagtacagggggcaacccacgcaattaatgcgctgtccgagaatgttaatctggtggctagcgtagcattgcatacgctaatccccgtgatagcaacaaagctgaccgcgggattacgtgaaaatatgacggcatggcgggccaccgaaaaagcggctcgtgatatggccaaacagcaggcagaaacggcaaaacgtactcttgaacaggccaatgccacgctacgttcaacggaagctcagggcaggcacattcagtatctggaaagaaccaaccgtttgcatggactctccgtcaattatgcgaaagaaaaaagcaccctgatccgacaggaaacggaagccctcaagttgcaaacacaggccaccgggcagctagaagcggctaatcgccggctgtcttatgcctatcgggctttatctgctgtgagtggtgcggctcgtggtgcgcttgctctgatggggggaccatttggtgcagcgatgttggcaggttctgctctgtacgggttatataacgccagcgtccaagccagagaggggttgcggcacttaaaggaggaatccgttgaaacggtggctgaactgcaacggctttccaaaattaaggtggcggtcgagctggataagactgacgatgatcttaacaatctgaaagcagaactcaggcagattgatagccaactggaacggtattctcaaacccgaatcgagcatttagaaaatcgtcaaaaaggggtcttaagttttttttatgaagatccgaaagcagttgaaaagcaaggccgggtcttactcagtcggcgagaagatatcctcaaagggatagaaaagaaaaccgccagaaagaaaaacctacagacaacctcggtcgcggggatttttgatcagccaccgtctgagccgccaaaacccgaagagaacggcccgggtaatccgtggacaggtcaggatctcattaaagcagagaaacaaggcaaacaatcacttcaccgttatcagcagttacgcaaggacattgagcagacccacgccaccagcctggatcgtatccgaatcagcgagaaagcgatgcgggataaaatccatgaagttggcaaatcgggtatcgcttcggacagtgaactgcaacgcttaaacctcctcaatgccgaaaatcaccaaaaacaacgcctcgaactggcagaaaaatattccccggtagcggcattgatccggcaggaaagagacgccagtgcagaactgaaagcgctgtataacgaacggttattgaccgaacaggagtatctgtccgccagtaaaacgctgtatcaaacgtcggtgaaagacaaattagcggaacaggcaaagcaaattgccgccccacatctggatatgacgggtgaggtcgatcccgttgtgcaactgcaaaatcagctgactgagcaacaagcgctctatgacagttattaccgcaatggccttatcagcaaggaacgtcatgaacagttaatgactgctgccgcttatcgttctaacggcgcgcaattggctgctgctaaagatttatacgcctcgcagggggatttccagaaaatgcagatggatctgctggatgtggtcgagcaacgtacggggagtgcgttaaccggcatgttgacgggcacaaaatccttttcagcatccatgcgggcgttgtcggcctcactggcgcaatccattattcaggatctgatccgtattgcaatgcaggcattgatcaccaaagccctctccggtttctttgggggtgggatgggtagcatgggggccagcgcattgtcttcggcggggggtagcctgtcttcggtgggctctggcaccaccataacgccggatgtctggaagagtcccattatgaatgcgaaaggcggcgtttatcaatcgacggatttaaatcagtacagcgggcaggtggtcagtcaaccgacgctgtttgcgttcgccaaagggggcggagtgatgggggaagccggcccggaagcgatcttgcccttaaaacgcggtgctgacggtaagctgggggttcaggccaccggcagtacgggcaactccacctttaattccgttcatattgtgatccatgccgagggaacgcatgacacgaaaacatcccgtggtgccgagtctgcgggtcaggatattgcgaaatttgttgatcagcgcttcaaatttttactgcataaaagtctgagtcagggtggtgaactcagcgcggcgattaaaggaggacgataatgataaaaacctttgattttcctgtcagggtgggcgcgagtggcgagtttgagccggttgtacgtactgttcaattcggtgatggttatcagcagacctccggcaatgggatcaacgcgcagcgcgaaaattggccggtgtcttttgtcgggacgttgtctgatatcgagccgattatcgcttttttgcgtgagcatcagggctggcgcgcatttaaatggcgtaatccgctctctgaaccgggattgtatcaggccggaaaattcactgttcaggctaatggcgcttatttcacgctctctgtgaccttcacccgtatctatcatccgtaagagatctcatcatgaccctgaatgcaacacttcagcggcttgagccgggaagtaaaattgtcttattgactgtcgatggttcggtatttggcggacctgtcttgtactttcaccatcatcctatcccgtataccgaggctgagctggaaaatagcgggaacttaccggtgaaatcgctttggtggcagggtgtagaatataaaccgtggcccgtcagtatcgaagggctggaagtgaccagtgatggaagggcggtaacgcctactctcaatgtggccaatctggacggcacgctcagtgcattgtgtctggcgtatcaaaacatggtgcaggcgcgtgtcacgatccgcatgacctttgcccattatctggatgcgcgtaatttccctgatggcaacccgcaagccgatccgaaacaggaaaaaatcgatgttttctacatcgacagtaaaacgcaggaagataacgaaagcatccagttttcgctctcttctcctgccgatttacagggaattaaaattccgacccggcaaattcacagcctgtgtacatggtgcattcgcggacaatatcgccagtcaccgtgtggctataccggcacccgttattttactgaacggggcaaaccgaccaatgatccggcctcggatgcctgtggagggttaatgagtgactgtaaaaaacgttttggagatacagagcaattgccctttggcgggtttcccggctcggccttgctgaggcgctaaccatgacgatactgagaaaagcgaccacccgtgccatgatggcacatgcccaagcagcctacccgaatgagtgttgcggggtaattattcaacagcaccgccgacagcattatcttccctgtcgcaatactgccccatcacccactgaacagttctgtattcacccggaggattacgcggctgccgaagatcagggcgagattattgccattgttcacagtcaccccgatgcgacgacacagccgagcccgttggatatcgcccagtgtgatctgtcacaaacgccatgggtgattgtttcgtggccggaaggggatatccgtaccctgatgcctctggccggcattaagcccttaatcggtcgcccgttcgtgcacgggttctgggattgttatgccatcgtgcgtgattggtacaaactggaacgcacacttgaactccctgattttgaccgtactgatggctggtggactcggggcgaaaatctgtatatgaaacagtatgccgccgctggatttgtcgcctgtcgcggtgaattgcaggcaggggatgtgatcattatgcaggtacaggcgaatgaacccaaccatgccggtgtttatctgggtgacggcctgatgttgcaccacctgtacgggcagctcagtaagcgggaaccctatcatggctactggcaggaacgcaccaccatcaccttacgtcacgtatccgcttcggcggattttttgtttaggagagtcacatcatgaacacattacgcaccgtgcggctttacggtgtactggggactcagttcggccgagtgcatcaactggctgtctctaccccgcaggaagcgatccgggcattatccgtattgattaaaggatttgaacgtttcctgctgaccgccaaagcgcaggggctgacctttgctgtgtttaacggaaaacgcaatatcagtcgggaagaactggtgttttccgggcaggacgatatccgcattgcgccaatgattatcggcagcaaaaatgccggtgtctttcagaccattctgggcgcggtcatggtggtggccggcgcgttcttgtgggcaaccccgtttggtgcgccgatggtcatgtccggggtgggcatgatgttgggtggcgtggtgcagatgctctcgccgatgccgggcgggctggcccggcgcgaagatcccgataacaagccctcctatgcgttcgggggaccggtgaatacagttgcgcagggcaatcccgtacctattggctacggcagacgccgcattggtggcgctattatttcagcgggtatctatgcggaagaccaacaataatgcgctgaggatgaagtatggaaaagccacccattcaggggaataaaggcggacgccagcagccgcgcacgccggtggaagcgccggactcgctgcaatcgacttcctataccaagatcctccttgccctcggtgaaggtgaatttgccggcgagctggatggtcggcgtatctttctggatgacacgccgcttatcggtgccgatggctcgcctaattttgaaggcgtcaaatgggaatttcgtcccggtacgccccatcaggcgtatatccccggtatgccggcggtcgaaaatgcccgaacggtgagtgctgaactggtcagctcgtgggtcacgacggtcaccaatacccaactgtcagcggttcgcctgcggttatcgtggccccagttgcagcagcaaaaagagaacggagataccgtgggttatcgcattgactatgccattgaccttgccactgatggcggcgctttcaaggaaatcctgaaaaccgctgttgatggcaaaaccaccacccaatatgaacgttcccatcgggtagatttacccgctgcttattcgggctggcaggtgcgccttcggcggttgacgccaaaacaaaacagcaaccggatcgcggatgccatggtagtggaagccattactgaagtgatcgacgctaaattaagctacccggaaacagccctgttatttgttcagtttgatgccaaacagtttcgcaatattccgcaaatcacctgtgagccgaagatgcgcatcattcgtgtgcccgccaattatcatcccgatagtcgccgctattatggtagctgggacggcaccttcaaatgggcatggaacgaccattcgggcttggg

SEQ ID NO: 222 - DNA, 11926 bp, Xenorhabdus sp.; identical to SEQ ID NO: 221
  CDS (8668)..(8997)

SEQ ID NO: 223 - DNA, 11926 bp, Xenorhabdus sp.; identical to SEQ ID NO: 221
  CDS (9009)..(9746)

SEQ ID NO: 224 - DNA, 11926 bp, Xenorhabdus sp.; identical to SEQ ID NO: 221
  CDS (9749)..(10495)

SEQ ID NO: 225 - DNA, 11926 bp, Xenorhabdus sp.; identical to SEQ ID NO: 221
  CDS (10492)..(11067)

SEQ ID NO: 226 - DNA, 11926 bp, Xenorhabdus sp.; identical to SEQ ID NO: 221
  CDS (11097)..(11924)

SEQ ID NO: 227 - DNA, 13494 bp, Xenorhabdus sp.
  CDS (10716)..(11654)
atgctgaatggattcgtttttttcccgttcaacgtattctggaatccattgaatatgccatgttaagaattttattctgataacaagataatgactggatagagtgagtgtttatttttgtgtgtcggtttttatttctgtctttattttatttgtttgctataaaaaaataaaaatgcgtaacaaaataattttattgaaaagtcatttctttttcttattatgattttttgaaatggttaaccgaaattattaatataaactaatgtgaatttcattgattattcaggatgagcgttgtttactcaacaatgagtagtaatcacattaatgatttttgttattaagctccggaaatatatttgtaataaatcaggtgggtaaatgataggtacgaaaacgttcgaggtattcccttctgttgatattgttgatggaatagcgatgacatcaaattctgcaattcgtctaactcgtggtgaaagctcaacattacggcggcctttagggactccggcagaagttgcattagcctggcaaaatgccggagcaaaatggatacatgtagttgatcttgatgctgcgtcaggccgaggttcaaacagtcatttgattgctgatgttatcgaagcggtcgatattaatgtacaagtctgtggcggtatcagaaatgaagagatcttgagccgggtattggcaaccggatgccagcgggtcaatttaggaaccgctgtattagaaaatccggactggtgtgccagagctattggtgaatatggcgataagattgctattgcgttggatgtaaggagcacgccggaaggttatcagcttgcgactcatgggtggaatgtcaacaacggcaagctttgggatattcttgaagagctggaaagacagggatgccagcgttatgtcgtcactgatgttgaacggggcggcatgatgagttcccctaattttaccctattgagtgaagtatgcgcgaaaacctcatcgccggtcattgctggtggtggagtctcaagcatagatgacctgcgtgttttagccgatatgtatgatcagggtgttgaaggtgccattcttggtcaggcgctacatatcggtaaagtgccacttgaggaagcaattgcggcaacccgaacaccaaaagcgcaagctcagagaggttaaatatggctgagtttctttcaccttcttcagttgttccatcaattttagacctgcgtgccgttggtttattaggtgatttacgcggtgtctccggaacaagtcacttgatgaaagaagttatggagcttccgggagtcgtcgcgaataaacagaattttatcagttcccgaggttttgcttattacgaacccaaaacctgtgatgagttattggcaacagtaaaatattatgcagacatcatcattaaattgcagtgcacagataaacaatgcgcagtaccttcaaaatatatattggctgatcattgtctggtgaaactgttacgtattatcgacagcttattaggtgttccacagattactgatgaagacattgtaccttttattgatggggtaaaggcgtgtgctgaaattgtctgctcaacactgacgggaagaaaatcctgcttctctccttcattactgcaaaacttgaaacttccggcgggtacggggcatcaggtaccaagaacatatatcgagggagataatcacctgataacactggctgccgcgcaaatagatgaatgtcctaactcttccgtcatcggggtgatgttaggcggtgcagcgacagcggcagtcactgccgcagcatggaatagtgaactcaatttagtgaaagtttcccgctatgatgatgcatgtagcaatagtcatcatatatggggacgtaacatcccatccgggcattctatttcgattattgatgataattgtggaaccggggataccttacgacaggtcagggatctggttataactcagacaggaataagaccaaagttacgggcgactgaattacattgggaaaaactcttgcgtacccgtgtgtacggatattctgatcgtgtattcagccctgaatttttggatgtattgaccccttggtgtttcagacatcataaagtactgaatcacttagttaaccagctctcaattgatgaaggtaaacatgcccatacggttcattcccatacaactcattcttatacaactacagcggattgggtcagctattcatacagtttattatcggttttgtatgacactctggaagattcaacctgggcacctgaattactgggttttttatcgactctggtatctcgccaaaaaatggattgtaaccaacccattgatgcatttagagatattgcgcagcaatgccctgaatgtttatcccgtaaccgtgagtttggagcaaatcgttcggaacaggcaaatacagctaaggaagttaattgattatggcaacagcacatattatctgggactggaatggcacactactgaatgatgttagtgtttcagtcagcgcaacaaatttagcacttgcagaaattggtattgaaccactgacgctggaacaatatcgggaatattattgtgtgccggtgcagattttctataaacaggttattggacgcgaaccatcctctgctgaatggtcaatcataggaaaaacatttaatactcactatcggcccggtatacaaaaagcaaatttagcagcaggagtgagtgatctgcttgctacccgctatcagtcaggtgcgacccaatcactatgttcactgatgcagcatgaagaattagttccgatgattaataaccacggtataactaaattttttacccacgttgatggcagaaatacgccgctattgactaccggaaagtcggaacaattagctaaccatattaaaaagatcaatatcgctcctgaaaagagcgttgtgattggtgacgcaaccgatgatgccattgcagcattagccgcaggtactcatgccattctttacactggcggaacgcatagtcgtttaagccttgaagctgcaggtgtacctgttgttgatacattaaatgaggctttattaatggctgattacttagtcagtaaataagaaaatattaatccactgaaataaattatttttatcatcactatcattttaaatgacgtattctttattatgtttttaaataatgctgttaatgccttttgtgtaaatagcggaataatataaatcattaaagttgtatttttattaaaatataaaagaaaacaccatttaaaaaactatttataaatgggagatgcacacgtatgttaatatctgtggttgggcttcaatttggagatgaaggaaagggtaaatttgttgattacttatctggtggtgtaaacaacattgccagatttaatgggggagccaatgcaggccattgtgtacaatatggaaatgtgagagggtctttttctcaattaccggcatcacttaataaaaagaatctctatatttgtcagggtgcattaattagtcttccggtacttgtgaaagaaattgattttataaaaagagaaaatattaactccagcatctcaattgatccccgatgccatattgtattgccattacatgcagaactaaataaagcatctgaaaaatataaaggtaagaataaaataggatctgtaggagtgggtgttggtgcctgtgttgaagataaatcgaaccggcatggcattcggcttattgatactctggataaagaaaaactcagaagcaaattagaatttctttgggacatcagggaaaaacaaatcaaccacgtttttaatgataattcgactttagattttgaggagatgttagaaataacgcatcaatatggaaaaaagatcgagccttatttcacatttactaatgaagccatccgtgacttattgagtgccggagaagatatcttacttgaaacatcacaagccacttttttggataacagttttggtacgtacccttatactgtagcgtatcagactctggttcaaacctgttttgccatgattggtataccagcacagaaaatgcatattgtcggtgtgatgaaggcctatatgatccgggtcggtaatggcccgttcccgacagaattacaggctgagcaggctgattatatccgggaacgtggaaacgagtatggtactgtttccaaaagaccaaggcgttgtggctggctggatctatgcttgatcaagcatgcggtaaaacttaacggggtaacagaactggcaataactaatactgatgttttagcagggttggaagaaataaaggtagctattgcatatgaaattgataatgaacaggtttgctgtgataaagccttattgcagcttgagaaagttaaacctgtttataaagtttttaaaggctggggagagctaaacgcatcgtatgctcactttacagaattgcctgctgaactaattgattttctcaattttattcaggattatgctggagtcccaattaaatatatttcacatgggcctgatagagaacaaacattaatagtgcagtaatgaggaaaggaagataatgattcactatgtgactggttttatgttttctgaagataagaagaatgttgctcttatttctaaattacaacccagctggcagaaagggcaactcaatggtattggcggaaaaatagaaacaggtgaaacgcctcaacaggcaatggcaagggaattcgctgaggaagcaggaattaatactcagcctgaagaatggaagttatttactgttctgacccgccctgatgcttatcaggtgaattttctctatgcgcatgatgacagagtttattctgcaaaatctgttgaaaaagaaattgttaatatttatgaagcacaatcattacctgataatgttatctacaatttacgctggctaattccaatggctcttgatgaacatttacgctttgacaggtctattgagattatagaaatgagggaaaactcataacctgtctctgtaaattttctattctaatattgctcgctttacagcgagcaccttttattatttataagagcatgtgcttttattaaatgctttcttttgaattagtcagtgtaaaatgaccataatatgtggctataataatccctattccggcaatcaaagacactataaatccaccatgagagccatatatatcgacaaactgtcctgtagcagttgcacctaaagcggcaccagtattgagaccggaaagtaaccaggtgaacccttccgttaatcgtttctccggaactattttttcaattaatgccatcgagatgatcattgttggtgcaaagaataaacccgccatgaaaacagtgaaagctaagccggaaatgctgttaaccattaaaaaaggaagggtagttaaagcagtgcctaacccgcctataagaaatagtttgtatagtggcgttttcagtttaactgcaccaaatatcaatccggcaaggcaagagcctacagcataagctgataacactaaactggctgcaaccggacgccctaattctttggcaaaagcaacactcgctatatcaacagttccggcaataatccccataaaaataaacagtaatgataaaacccatacaccagatattttaataattgaactgtttgtttctttggtggtttttggaatttcaataggaggttctgtcctgcgaaacatcacaaataaacatacacctatagctagcagaagagcggccactaaatagcttgtcaaaatggtaggagtactccttaccccgcgtgacacgcggggtaaggaacaccgcatgctgatactctcactattctgaaaaggtatatagaggcccggcttgtgggaaaaaggctacgctcaggccaattgatatcggtgggccaacaatgaatgatatttcatcaaatactgtttcgagggaatatgcggtttgtagttgaggttgaccacgatagatagctgtccagcgggcacgcaccattgccgacatactaggcataaaaccagccagagaagaacataaaaataatgtccagataggtgcctgccagtacgcacaggctaaaagagctaatatgcccaaaacgcttatagttgtagcaatgggtaagacaatatattgcccacgatgatctgctaagcgagaaatttgtggggatatcagtgcataggttaatacaaaaattgctgatactgatcccgctaatccatagctattacttagctgtgataacatgactatgatgccaattccggtcataggaagtggcatacgagctataaaacccgccaaagaaaatcttgctgcaccagatgctttgaataactcactataaggattgctcatattgcttctcattgtgataattggttgcataaaagttaggttgccaacaaacatacgatacgtatgtaaaattaacatgccagcatacgcagcgtatgtcaatgagttgtaaattgcatattaacggaaggataaatggcccggcgaacccgtacagaaatgatagaagagacacgtagcaaattattggctgctgcgcgcaatgcttttggctctttaggctatgctaatacttcaatggatgattttacggctaaggctggtcttacacgtggtgctttatatcatcatttcggtgataaaaaaggcttattaatggctgtagtggaacaaatcgattcagagatggatcaatatctccagtcgatatctgataacgcacaagattcatggactggatttcgtgatagatgtcgggcttatttaacaatgtcacttaatcgggaattccaacaaatcgtattaagagattcgaaaattattcttggcgatcaattcagagaatctcaatcttactgtatttcatcaatgaaaaaactactggaaaaaatgattcttgagaagaaaataaaagatgttgatgccgaatctttggcttgtctaataaatggaagcttagttgaagctgctttgtggattgctgatgatacagatcaaaaagctaaacttgaaaaaatcattcctgcttttgatttattacttgatggtttgaaatgtgattgattttataactaatttaatacatggatataaatatgaaattatcagatttactgctagccatagcagtaaccggggtatggggattaaattttagtgttattaagttagggctaaatacgctagatccatttttattagctgggttacgtttcttattatgtgctttaccagctgtattctttattcgtcgacctgatgtgccaatgaaaattgttgggttatacgggctaatctttggtgttggcttatggggaatggtgaatctgggtgtcaaaatgggggtttctgcgggtgtttcctctctattgttacaatttagttcatttattactatagcaatggggtgtttctttctcaaagagcgcattcattttcatcaaataataggttttatactgtcagttattggtttaggatttattatggctttaactgatggttcaattacctatttaggtgtgattgtaatactatttggcgctgtgaactggagtgtcgctaatattattgtaaaaaaatcaggtgggaaaaatatatttggttttttagtctggtcatgtgttttctcccctttacctctatttcttatggggtatgcgattaatggttctacggtattatctaattttgttgaaaatttgaatgtgactgctatattttccattctattccaagcctatcttacaactttaatagggtattggatatggaatttattgttgaaaaaatatcccgtttccaaagttgctccgttgtctttattggttccggtttttggttttattggaagtgcagttatttttggtgaagtgatgagtaatgaaaaaataattgcatgtgtttttattttgattggactggccatatcgctatatgggaataagttagtgaaaaaacctcgagcatgaatagtttggtttttgggatagcttatcttcattttgtattccccaattttcggggaatacaattattacactagcaattcatatttaaattatttcagcatatttatagtagttcataaaatttacaattcatcaaatcacatagtcagattaacctcccagtatgagttcctgcatattgcctatactctcaataaattgatcatcatgagaaattaataccatagcaccagtgtaatcatgtagtgctttctggagtaactcacgagattcaatatccagatgattatccggttcatccaatagcaggagtgccggtgctgaaggcccacaaaataaacaggcaagggcgactttcagttgttctcctccacttagataaccgacaggttttagagcctcttcacctcgcatacgcagttgcgctagccgagtgcgataacgatcttccgtccagcctggtgactgtaattgaaagttatacaaagctgactgggttttatcgaggaatgagaaatgctggtccattaaacgatgtgaagatgtgatgcgacaagcgcccagttttggcaccagtgagccagtcatgactttcagtaaagtcgattttccactgccattttttcctgtgatagcgaggcgatcaccattattgatggtcaagctgataggggaatctgacccaaagggtaaaataatatcctgtagataaagtaacggaggagttgctgcctgaggagttgcaacagcaattgacagcggatcaataatgtcgagttttgctctggcatcagtcgctaaggaagaactgcgctgtagcctttcttcattctgttttgccagccgtgacagtgtggattcagagcggttcaatgcgcgatccagcagaattgtagcttgattagcattttccctacgttgtttcccctggctctgtcttttatcagatttttctcgatctctttgtttatcccgtatggcttgtttgaggttttttctggtctgatctacatcgcgctgtatacctagtcttagctgttctttactgtccagccatgtttcccagccaccaatactacgtgataatcctaacccgttcagctcataaacaacggaaacatgctgtaagagcttaggatcatgtgtaaccagtaaaatgccaccattgaaagttgccaaccattgggataaccagaggcgtccctgtcgatcaagatggttactcggttcatccagaatcataaagccggccccctgttttttgagagacagtagccgaagtcgggtttgttctcctccgctgagtaaattaaagggctggtttaatatctctggggtcagttcaccttctgccagtaaagattcgatctgaaattgccaatcccagtttccttccataacatcaaaatctgcggcttcaccaataccagcaagaatacgctcattggcattgataatatcagtgagtccgaatatgttggctgcactacctgtaaaagtagacaggccttgtgacagataacccacatcacaaaaatgtttgacacttccttccgatggtgaagtttgttttgccagtattgatgctaaccaggatttaccaataccattacggcctatcagtgcgtgttgccctgtatgcaaagtaatatcaatatcggaaaatagtggtttgagttcacccgaaaattgatgggctattttttttgcttcgattaatggttgaccttcatattgcatgatactcatccccatataaagatatgtttttattgaatttgttttgaatttatttaaatagtacccccatatgtacccccaaatatttttgccactcttcttttaattttcgggcaggggggtagattagtacaaaagcacttactttaaaaaaatttattcaaaaaacaaaaaactattatatatataactgttcacattgttcacaaataatataactatttaatttaaaaagaaaaattatgtgaatattattattcacaaatgttcacttgttgttcacagatttatagaagttaaagcggcctgagctataattacctttactacaacttgcccggaaccaaccagcgaaggtagggcagcaggtagctttagagctaagcggaaccagccagcgaaagccagaagatgaaatacagatgttttctaaagctgtatatatctgtagctgtcgccgagaaattaaatatctgaacaccctcttacctgtggcaaggcattagaaaaaagccctgttttgtgcttttagccttaacgcaaatatgccacccgccaagttatcccgataaaccattccatacgatttaataccagattctgactgatgtttttttggtctgtagttatctgtagttaaaggtgtttgttagtaatcactaccaccgtaaggcttgatgctaaagggtttgatctaactttcattaacctaaactctgcgcgcttattctgggtaatctggtatattttatctacagaaacttacttatatcagatggtattttggctaaaagccggtacccccttttatataaaggccatatcttctggggatttgctttattctttgctggtaaatggttgaagaaggtattaggtgcgctgggcgagttctctgatgctgctaaaaagattaaattgcctgcaatgggtaagtttggtgggccgattggcggagccttaagtctagccgcacaagccgaacaaggaagggagcaattaatgcaggaagtgcatcaggaagcagagaaaactggcgaagatcccgtaaaagtattggatagaaagctgaaagaaaaacgcgccaatgaacaaccgttcattacatggggtgacgttggcgggtggttttcagattttttctcaggtggtgataagcaagcaaatagcaaaaccgcgttaaaaggaaagccattgctcgaatcaatggcagggcactttgctatgttggagaagaagcatggcttacctccggggctactgcacggtgttgctatgactgaatcgtcaggcgatcctaatgcgagaggtaaacccacagcatcaggtatagcactgggtatgtttcaatttatgcccggcacggctaaacagtatgggttaatagggaatgatgttttcaatccgtataaatctgccgaagccgcagccagaatgctcagcaacctattgaaacagactaatggaaacttggataaggcgctggcggggtataattgggggatcaagtatgtgcttgaaaagggcatcaataacttaccgaaggaaactcgaaacttcctgcctcgtgttaaaggccacatggcaagagcacctaaacccggtaataaagggattgatttcgatctgagcatgtttgagaacgccatgcctaatatccagaatatgctgagtcatagcagttatacgccagaatacctgcgagcagcatcttcactggcacagaatcaaacaaccattgcaccagtctataacatcaatgtaagtggaacatcatcgccccttgaaaccgccgcgttaaccggagaaacggtacagcgcacaaatgccatattggtacgcaacctacaaacgaaggtgagctaatggatattttatccacgttgttttttcagaatacgcgaaggatcggaatgataataccgagtgtcgtgatatcggaaaaacatcaagattcggcagagattaccgagcatccagtgcaatacggcgcagctattagtgatcatgcctatgataagccgtcagaggtcacaatggagctgggttttgctggtggtggttcgttaattgacggctttgatacgcctactaagatatttgattttaataccgaagaaatattgggtagaagccccaaagaaatttatgaacaactgcttaaactaaaagcctctaaagagccgtttgacgttctcacaggaaagcgccggtatagaaacatgctgatccgggcaattgaagtagtaacggataaaacctctgaaaacgtcctgatggtcactttgaccctgcgtgaagtgattatcgtcgatacggcaatagttgagggtataaaagttccacgggtagcaagaactgcaccgctagaggctcagccaacacttgaccggggaaccgtcacgccaataacaatcgataaaaatcagtctttgttaaatgcgggatatgaggcattagatgattttttaggtggcgcgttgtctaggcttggaaagcagatcacaggaggctgaaatgaacgtcgtagagataccattgctcgcgggaaaccaagtatttgatattcagttaggcggcatagcgtatagaatgcgtatacagtacaggggcgttgcgggttgggtattagatattatgcacccgaatagcgagccgatggtattaggaacaccgctcgttactggcgtagatattctagagtcacaccagaacttaggctttaatggcgcattggtttttgtttgcaaagacggtaatgagacgagcggagaaggcttaggcgataccaagcggctatattttttatcttcttgagatggtcaagaaattgaccatgatccaaaacccgcctcatgattaaaatcaaacagttatccgtaaagcaaacttgagttacgaacaatatcaaatagataaccctttgattacgttagtaccccaaatttggggcacgataactaaccctctgtttctactcatgaagcaaaaacgcggttattacccttgcccgttagccaacgagatgagaacttccccggcaacccattgataaggcttaattctcgcgattcacgataattaaaaagccctttgatttttatgatgaaccaaagttggatcatggctcagaactgagctatcagagtaaaagtacttttaaatcagcatggtccaaatctggactatctatttcctatacccccaaccgatgctaatatgtactagttatctagtacaataaaggcggataaaagatcatgcacagagatatgcagaaaatactattgcattggggcgggtgggtagtgcaaggcagagttaacattggttggaagtcagtatccgccgggtttaaaaatgcggtgacttattccggtagcaataagctgtcgtgcagtgacgaggacggcatgatcatagatagctgtgtcgccaaactgcgcaacgttggtatggctcaggagtgtgattttatcgagcaccactacgttagcggcatgtcgaaaagagccataggccgtaagtttaagcttggtgaaagcgaagttagaaagcgtatgctggtggctgaaagttttattcttgggtgcctggaggcgttagatgagccattggaaatagacctaatttatggcttccacggtaacagggtgaatttgtccagttcagcattaaacgcccaacagtaaaaagccatctttag

SEQ ID NO: 228 - DNA, 13494 bp, Xenorhabdus sp.; identical to SEQ ID NO: 227
  CDS (13049)..(13414)

SEQ ID NO: 229 - DNA, 14229 bp, Xenorhabdus sp.
  CDS (5763)..(6701)
tgctctaaagattatcctgtgcagacttttctgcttccacaacctgcgacagaatggtcttcatatcgccgggcaaaataatgtctttcacaccaagtgatgccacttccaaaccaaaacgcagggcaatttgctggatcttttcaccaaccagatcatcaataacctgcttattctccaacaattcatccagtgagcgcgttcctactatttcacgcaaagcaaattgcaactcgcggtacagatatgaaactggatcactgagttgttcatatgccatcagaacatcctgataacgccagttagcagataagttaatacgcagatttaccttgtcacgggtcagtatctcctgaccgctgatttccagcacctgtaaccgggtatcaacaatttcaacgagcacatcatgcccgacacgccaataaccttttaatcccggctgtaataattcctgtgcaattccatcaaccttcagaatccctatatgccaagccgggatttgagtaatcagtacactatctgcccctttcacactgcgttttcgcgccatagcagacattaacagtgaaaccaattcagcatcagcttccagctcagaggatttcaatacctctatacggcggggatttccattcttccagtgcaaactgcgggttgccggaggcagaatttcgaccaacacagcatgctcgtatagcaaccccatttcatcatcggcaatttcaataccatcacaaaattcgtctacccagtcgctatgctgctgacgtagatgctctgccagattgtcttcaaccttagtttgtgaacgggtatcgacaatttccacagagatgtcatagccaacacgccaatatccatacagacctggctgtagcaactcctgcacagtgccatcaattttcagaataccgacctgccataccgggatctgagcaatcaggatattatccaatcctttcacagtacgtttatgggttttcgcagcgtgcaacagagaaactaattcaggtgaaatttcctgttccgtcgttttacggatttcacatcggcgtaacccactatttttccaatataggcggcgagttgcagatggtataatttcattcagtaaatcatactcatacaatagtcccatctcatcttcagccagctggatgtcatcacaatactgttcaacccaatcagcatgatactggcgtaaatgctctgccagttttgcttctattgcgccaccactaaggttaaaagtcgtcaattgcagtttgttaaaccaatcgctgaaacgatattcacctgcggttaaaacctgtaagtactcaccctcttttgccagcaaaccaatttgtccctgcaatatttttattttcttcatcattgttatttttcctttttattccctgcactctgaaaaccgggcatcaggacgaagccaagggggaaatacatcggtactcagacagcagcagctcagtattctgcccttaacccagcatcatctaccgggttttcaaagcgatgactctcaattggcagtcatacgggttttcacttctatattttcttttgtgttttacttggagagtaaaagaccatatcccttatatggtgcgaaattgggactcgaacccaacgtaaccctgtgttattcgctaaacgtccctcactggcggaatacatgcagtaaaatggccttatgccatgacttatgtaccggctgggttctgaacccatgcaattccagcgtgttggcttttatagttattgctaatcccgtgccaactttgaaaaaaggcaaaaatatttattatcataatgaaaattaacgattttttatttttacctattttcggcgattgtttttgctatttgattttcttatctttttatatcgttttttataaatttagataaccaataacagaggcaaggatgaaacgcagagttgctattggagttttgggaacaacattagacagacgtgggaaaaaggcgaatcgctggacaaaatggcgtcctactattgggctatgccagcagcctgagctgccaattgacaggctggaattactctatcaggcagataactacagtctggcgcaaagagttaaagaagatattgaagaaacctccccacagacccgtgttgttctgcaagaaattcagattgatgacccgtgggattttgaggaagtctatactgccctgcttgattttgcggtgcgctatcctttcgatattgaaaatgaagagtatctggtacatatcactacaggcacgcacgttgcccagatttgctggtttttgctgactgaagcgcgttatctgccagcccagctgatccagacttctcccaaaaatggcgatcgcgatagccatcctgaaggagtctacactgttatcgatttagatctcagtcgttataccacgctaaccagccgctttctgcgtgaacagcaggagcaagtggcgttcctgaaatccggcatcgctacgcgcaatgccagtttcaaccacctgatagaccagattgagcgcgttgcgctgcgctcatcagcaccgatcctgctgaccgggccaaccggggcaggtaaatcctttctggcccgccgtatctatcaactccgccagtcacgccatctgcttaaagggcgttttgtcgaagtaaactgtgcgacattgcgcggtgataatgccatgtctacactgtttggacacgtcaaaggggcatttacaggggcaatccagccgcgaaccggcctattacgcgaagccgatggtggtattttattcttggatgaagtagccgagttaggtcttgatgaacaagcgatgttactgaaggcgattgaagaaaaaaacttcctgccgtacggttctgatcgggaagtttacagtgactttcagttaattgccggcactcaccgggatctgcgggatcgggttgctcaggggaaattccgtgaagatttatatgcccgtatcaatatgtggacttatcagttacccggactggctcagcgccgtgaagatattgaaccaaatatcgactatgaactggcccgctatgcacaaatgcaacagacgcaggttcgttttgataaagaagcccggcagatttacctgcgttttgcctgctcagaacaggccaagtggcggggaaatttccgtgaattaagtgcatcagtcgcccgtatggcaacgtttgctgaaaatggccgcatcaatcagcatttggcagaagaagaaatcatccgcctcagacaacactggcgaggagaaaatagttccgccctgctaccggatcatttagcagaaattgatttgtttgatcgccagcagttagaaaccgttatcagcgtctgtcggggatcagccagtttatcggaggccggtcgcaagctcttcgctgtttcccgccaacaaaagaaacaacccaatgatgccgatagattacgtaagtatctcgcccgattcggcttagactgggaaagcattcagcaagattaggtgaagacgatatggaattaaaatttctgggtaccagcgcaggtattccgactaaagaacgcaatgtcaccagccttattctcgatttacaggagatccgcagctcactgtggatgtttgactgcggtgaaggaacacagcaccaaatccttcactctccgattaaaatctccaaactggagaagatctttatcactcatttgcatggagatcatatctttggtctgcccggcttactatgcagtcgatcaatgggcggctccaccgatccattaacactatacgggccaaaagggatccgccagtttgtggaaacttcattgcagttaagcggctcctttctgacctatccactggaaattattgaagtacagcccggattactgtttgatgatggagcaatgaaagtcaccgcttatgccctggatcaccgtgtggaatgttatggctatcggattgaagaacatgacaggcccggtacgctggatgcccaaaagctggatcaggatggaattccccgtggcccgtggatgcaaaccctaaaacaagggggtacggtcacattggaagatggacggacaatttccggtaaagattatcttggagccccaatccgtggtaaatcattagcaattttcggggataccgaacccacaccggaagcgctgaaactggcggctgatgttgatgtcatggtacatgaaatcactctggaacattcgtttgccgaaaaagccaatgaacgcggtcattccaccactaaacaggctgcaacactagctcgtgatgccaaggtaaaacactttatcgcaacgcatatcagcggacgttatggtaaagaagattgtccacgtttactggcagaatgtcgggaaatatttccgaatactgatttggctgaggattttgcggcatttgtagttaaatagtttttatcaaaaaaataggttaactgaaaaactcatctgaataatatttcacttatatttcatttataaaagcaaaattattaaattaacaatcccgccgtattcggcgggaagttaacctctgacggattaaactaactgatattaaataatttagaaaattcttcagatatatcaagattaagtatgttccgctgatgatactctccccatagagctttatttgaaatccaaggaggaaaaacaggctttttatccatccagaattgaatcttactcgcgacttttttattatttctgttcctataaacccatcttaattcttttgcagttatagattttcttgtgctatttaatccatctgatttatttacaacttctgccatatttatctcatcgagtataaaatgtatatgcatatcctcagtcagctggcaatcactcatagtgacccatgatattcctcctttgcattttcttcctatagtgacatggtcattagttataccttcttcaagaacagtatgatacttatcatgtttctcaagataagaatataaactttctttatattcttcatattcatgaaaaccaacaacattaagataacctttgtatttattagctctctcacttaaccatgcattaggtgctcttcgattatttctgagtgaattctgaaagctatctaaaaaactcttcatttctctttcttcaactggaatcaaataataattcatcattgtcggtttaaaaaactcttgcccggaagttgatttaggtagtctatttttaacaattttaaaattatctaacctactgatataacgctctctttcattagttaaaccatatataagatcaccctcaaaaaactcatttctaaaaggtggtgaaaacggcatatattaccctctttatttaatgaaaaaataaaagacaacgtattatagcccgtattattaaacagaaagttattttttaaacggtcataaaagcgactgaaaaaaatagttttatctcattatgaagaggataatagtctgcaacactttcgtttacgagtcactgcttgaaacaaaaatttctctcaacaaatcttgcagtgaatacaatcgcgagtataatgcgcgacgatttgccgggagaaaacatgaaatactgcattgcaaaacgccaatccaatgaagcactgccaactggcagcatgggcgtattgttttccccattactaaccgaacatttaaaagcccctcaattgaggggctttttttcgtctgcccagtccaaggctaaaagtcataaaagaggaatgtaaacatggctaacccgttatatcgcaagcatatcatttcaattaatgatttgagccgcacagatcttgaattggtattgcagacggcagcagccctgaaagccaatccacagactgatgtactgaaacacaaagtcatcgccagctgctttttcgaagcctctacacgcacccgccttttttttgaaacggctattcagcggcttggagcctctgttgttggctttgcagacagcagcaacacatcattgggcaaaaaaggtgaaacgctagctgacactatttctattatcagccagtatgctgatgcgattgtcatgcgtcatccacaggaaggtgccgcccgccttgcttctgaattttccggtcatatcccgatcattaatgccggtgatggtgcaaatcaacacccaacccagactctgttagatctgtttactattcaggaaactcagggcaagctggataacctaaaaatcgcgatggttggtgacctgaaatatggtcgtactgtccattcattaactcaggcactggcgaaatttgagggcaaccatttctgctttatcgcgccggacgcactttctatgcccaactatattctgcacatgctggatgaaaaacaggtgagctacagcattcacaacaattttgaagatgtgctgcctgagctggatattctgtatatgacccgcgttcagaaagaacgccttgacccttctgaatacgccaatatcaaagcccagtttgtgctgcgtgcggcagatttggtgagtgtcaaagagaacctgaaagtactccatcctctgccacgtattgatgaaattactgttgatgtggataaaacgccttacgcgtattatttccagcaagcgggtaatggaatttatgctcgtcaggcgttgttatcactggtattgaatgaaaatgttgttatcaagtaataatcatctaacataaataagcagtgacaaatcttatggctaaggaaattacaccttagtcataagatgattatcccaaaaaattctttaacatcatttcatcaagaaatcccatttacaaaaaataaacttacttataattgatttaatattacttatcactaattaattaccatcctaaaagtataacaatacgttataattaaatttgttaaattaaaataagcactaatttaaaatcatttttcttgttttagccctccatagaattaagctattatcgtccatttaaacaaattaattttgtaacgttattttctaaataatttatcctaaataaaaagttgacgatattacatcatgcacaggcaagagaatgactaccaacgatatgaaaatatctgggttgcagagttttcatatggctatcgtggttcagaacaacagaaacaacgacgctatcgcgctcaggcattaatttatgccaacagccaacatcaggctttgattcaattatcaaaccatatgttgaattcattaaaagcgacagagggcgagtatgagaaaatattgccttttctccaatatctgaacaacagtgctcagcttgaaaaacgcctgatcctgaatctagataaaataaatatagaacaatcaattctggtattggaatcactggatattagtgaacgattgccgattgataccggagagctgtcaatcacccaatatccctgtgttccttttatcggtgataactcttttaatcggcactggatcagtgacgacctatatacgctgctttaccgacagcaacagaacaaaatccaatattcccatagttatctgatcattgacgccggagtttatcataaaaatacgagccactttatcgtgccttcccttatggtttctggcttgacttatcgctgtctgtttaaaggtaaaacacaaattactcttgaagactctgccccctatctggtcgaactgacaggttctgaaaataaccaatttctgcgggatatattcatcacccaccatacaccggatatcggaatttttatccataccgacagtaaatttgatgaactgtataaccacctgcgcaaattctcctatctgcaacaggaaagcagccgggaatgggttttcttccgcttctattattcactgacagtagatttgatgctcaaaagcctatctcgcggcgctctggcctcctttatgcgtaatatcggggccatttacggtttaactaatgaaaacagcatgatgaaaatcagcgttacggagagcctcagagaaaccaaaccagaaaccgtgacgatcaatgacaggatgaaccataattttgaactctatgtgcagcagagatacttccataaggtcaaagcattcattaaagataatattcagcaacaatgccaggtgccggaagaacagctcctttctttcattaccaaacatgccaattatgcctatctgcacggttttacacttgaactgaccgggctttattacattatggcgcgatcaatgacggtgaaaaatgaagatttctggcagcacatactagcaactgttttatctgaaccttccaatcaggaagccagagcttacaaacttctcaaggaatgccttaacccgacaacatggagccagtcatgacttctgtaatctcaaatattagtgcaaacgcgaacgaatccgtatccagactcgatatgggaagtgcaaaatacccgtgtgatggaaatatcaaacctctctaccctgtccgttatgcttatgtaaatttcttcggcgaagaaatggaacaacctgaatctccaccggatattcacacactgatgtctgcgacaacgctgaaacagagtaagggatatgcggctcgtttgatgcgttctggctggatttatatccgggaagaagacagcatggaacaccgccccagccgcacagcttatttccatatcttcaaatatgaagtagaaaaaagctcagataacgatgatgcaccgagaattgagcgttttcggaagtatatgtaccggaataaaaaagatgcccgcgatggcgtgatgccagaacttggtttacagggtgaagggtatcctttcctatttgtagcaaaagatgtttcaaatatcagtattgcttacagcgaacacctctggcatcccgatgtcattgcccgtatgaaccgcgataaaaagctgcgtgaaaagaccatgcagttcattaatctggatgcggataatcaacaatatgcgattgaagcaaccgaatccaatttcacgaaattaattgaagattacaaaacccgcaaggagcagttctcggcagtcaaagcaaaaattgatgccaataaatttgaagaattagatatcaatgatctcaggattgatgagctaacaacagaaaaatcctatgaaatggatgcagagaatattgcagcggagattcgcaaaaagctgtgttatcaagagaaggcacggattgtaatattgcatgatccggttgggcggcagaaagagattttggaggcgcataatattcttgatctgctacaacaatataatgctgaacacaacctctatccgatgaccattggattgtatatagatgattatattaaggtatttaataaaaatgatcccatagcaaaacgagccaatagcgaagtcttaagccgaaaggctgtgagaaaatattggcccaaaataagagattcacatctggtattcgaaaaacgacaagagattttcattagcttattcaaagcatttgccagtgcaccagcggttactgggaaagttggcagccttgataactatttccagcatttcttctctattcatgagaaaaaagaaatatcaaatgagagtgatattcaggaaatctacacttttgttgaacttgtttttgatatttttcatggactgcaaatgtccgtcacatcggaaaaaatgctggaagaattgatttcattagcagcaggaaaaccaaccacattaaaagatttcgctgatacaacgctgggtatcctcccctatggcttatacgacccaaataaagaagcaaaagccaaaagggatgctattacagcggcagagaaaaactatacacctcaatacagcaccaatgcctgggaaatcgcggcaacgggtatggtgaaaatactaactcatggcgaaagtaaagagattgccaagacaattcatcagagcactaaaaatgctattaataaaacactagaaaatattaatgatcctaacaagccgatacaacaatctaaaaaatttctaaatgatcaaattataaagatatcagtctacgtctcagaaaaattccttgagctgtttggaaagattgttgggaaagcgtttgcaataatggaagcgggagcaatagcaataaaaggccctttgacccatttaagtgatactgccattcaattgattgttaacaaatttgtacctgttttaatgcaacctttcggtattgttattgattatcgtgaaggacttcatattactcctgaagagttcaataaaatccaaggccgtttagaaaaaattgcaaataaaaagagttattccggcaataaagggtcgaggatgcctaagcataatgaaacatttaaaaaactaaaaaattcacagtctcttttctatgaaaaattacaagaaataagcgctcctagccaagcagaacaacaatttgaaaatacagtaagacaaacaggtgagtatgctaagaaaacaggaataaaaataggaaataccgtttccaagcaagtaatagaagtatcggatcaaaccggtatcggaattaagcttgcgaaaattactatcaaagaaggatttaatacttcttttgattttttaaaagtcggtacacataagacagcaattttactggagaaaatagcgccggggttcagcctgtttttcaatgttcaaacagcaacttctgtggttatacagtctcaattcagtagcaacaatccgctggaccaggatgagctcagcaggtcttatgatgttgttaagttttcagcagcacttatttcattaacagcggatttgacactaattacatccaaagtcaccaaacatgctcataaatttatgccaaacgcctctccagtgttgttaaataacttaaaaggcacttccgactacttatcaaataaactgaatgctaaatgggttaaatcaggccttggcttagtgaatattatgggagcttatgtgtcctttattgatggaagagaagctgaagccatcggtaatagaggcgcagcatacagcaactatgccatagggctgggaagtgcagcattaggtactgtgagtattggtttggctgctggtattgagtcagtagcaataggtactacattgatggctggtatggcttttatgggatgggtcttagttattggtggtactattagtctgataatttttaacagctctgatacacaaaatttgtttcgtaacagcttttggggaaatggggatatgtatccattttggaatgaagacaaacgcccatcttttaacaggcaactagacatagccaaaaaaatgagtagtaagacccaaaaagccttcaaaattgagagtcaggaattcttaaatctattttttatgcctgaattaaccattacacgtaagcaggtatacaacaaattcagcagtgtttatacctttaaattgcctgcattccaacagggaacatctgaccttcaatatgcgttctaccaacttctacctcaaaagccggtaaatacatggctatcaggcaacgcagctcccagtgaacttatacaaaaacatatgaaatcactcaaagaagaacaagagcgctatgaaaaactgaagtatcaagcagaagagattgatggaaaactctatgtatatgataaagaactcacagcaagattccgggaatctttaaaaacagctgaagcaaaatacattaatggtaatcttgagcttataatcactgttgaagatagatatccctaccctaatgaagaaacagctgaactattctggcattatattccatttgaagatgccgctgttccattacgttacttagctcataaacaggaagagcaagatataagtaaaaaatctattatcggatttaaaggcacggagtttcgataaatgaataatacaaataaaatttctgcaacccttcataatgtcacccctacattactcatagaccaacaggaaaaactgctggctatgccaatggagaaaaaaagttacgaagcactgcaaaattaccttcctctcaacagcattaataataaccaatgcacactacgtaatgcgcaaaaacttgcacggacattaatactgtttcccctccttatctgtatgttttttatttttcagtactgcattactgattttattgaacaaagagaaagaggggaaactaatctcttagaatgggtagatctcgtacgcgaagaatatggtgatgaattttacctacgtaaagatctccctacacatatggaagatgcccgtttggttggtaatgataaaagtatttctttttggaaatatctttactatcgctacaactactatcacgccagtacacgaattttaattaaggatcttcttctctttggatttttgcttgcatattctctctatttgatacacagatgctttttctggaaactgcaagcacccatatttattgatcgagaacggcaattgtttttcagttggtataaaggcaaagtctatgctgctcgctattctcaagtaggtgtatccaatcaaaccgatcccatgaaaattatccatctgatggggttagccatgtatacactggatgaaaacaatacactagctcgtcgtgctttccagatgtgtctctcttatggttctatattaggattcaatacaaaactacggcaagatgaagcacacgcctttatcgttaaataccttatacaaggcaaagatgctgttgcagctactgattataaacgttttcctgctttgttcttattcaaggataaaaagcccgcagattttaatgaacagcttgagcatattttggcggaactagacaaacaagatatcagagataacagtcaggaaaatacataaatagtcagataaattatgttactgcatttatgacacctctactttatatcaaccagaatgtatccatctggttgatattaattaaaaattagaaaataaaaacagttaaaaatggatcggaaaatcatgaatgatgtaaagtggtacaacataccagccaaagctctgagtaaaataacgccaacaccctttattgagcaccaaaaagagttacttgctactccattactaagtaacaaactaggaaaaatgcccctatctatatgtgtcgaaagcattgatggcgatttatgtgcgatgaaaacgacggatagagatttccattcctcattatcattatttgggccaatattattattcctattttggactattgctgtagtattatttacagagcaaaaaaaagaacatctccctgaaatatgggagcaagttaatttagctcgccaaaaatatggagaaaaagatttttatctccaaccacactactcaaaaaaaatggaaattgtcagatatgttaattattcgaaagaaataaccttcgatagatatctatattatcgttataacggttcagataataatattttccttatcctgttggattttctcatatttggaacattaatatcattgactatctttttacccatttatattcgtcgtttttataaaaatcccccaccattatttattgatagaaaacgccaattattttttagttggcgtaaaggaaaagtttatgctgcccattattcacaggttggattttctcaattacgagtacagttacactcatcagaaactagggggttgatactatacactttggatagaaataattcactcaccaatcgtatattttcaatccatatgtatcgtgaaagaaactcctcttcagaacaacaaaagaggtttatattaccttatgtttttattgtaaattatcttctatatggtaaatcccctgtttttgaaggcgatatcctacgtactccagctccccgcaaatgccatgaagatgaaaaacctgccgactttgatgagcagataactcgtattctagccgcattagaaactctttcagcgacaagaaaaaatattcatgctccagaaacatggcgtccagacccctccttactcattgaacaagaagagaaattactaaaattaccaacgaaaccaaagaataaacgagaattaaaagctttttccatgctcaaaagtattaatgataagcaatgtgttttaataggcaggtcactggctttacctcgtatttttttatttttactttatttggctattgaaatccccatcagtggttggtacatcagtaccttcatttcacacaaagagtgggagga

SEQ ID NO: 230 - DNA, 15281 bp, Xenorhabdus sp.
  CDS (4495)..(5172)
ttaaagaaggcgacattaccgtagtgtgaccatgaagggggcaacagctggtcaataaattgttgatcaagctgatagggtgcaagatggctaccaaaaagacttaatataattaaaatcagtacgccgtaaaaacccgtcattgccagtgcgtcggcatagaaaagacgccaaatgactctcagaggcgagggcgctttcttttcacggtaaaaattatctaatggcataccattccttatgttttaaaggattagccatcgcgccaataatattagtcagcacgttgaccgaaataactaaagtgcctactaccattacaccagctgaaattgcggagtaatcctgctggcggatggcactgataagccattgtcccagccccggccagttaaacacctgctctgtcaccatagctaaggtcagcatggttgagaactgtagccccagcttggggataatagggggaagggcgttatgcaataagtggcgacgtataatagttaattttgatagcccgcgagtcgctgctgatcttatgtagtttgatgctgaaatctcttctgcgctgttacgcattaaacgaataacatcagtcattggcgcgacagacaacgtgatgacaggcaatatcatatgcagtattacattcatgatcatctcgttgcgataagggctttttgacaaccaggcatcaatcagggcagagcctgtcacaggctccattcggtacagtaaatcaatccgtcctgataccggcaaccagcccagatgcagtgagaacaagagagtaagtaacagagctaaccagaataccggaatggaaaaaccaaacagtgcaagtgtgctgataattttatctgcttttttgttacgccatactccggcaacaatccctaatggaataccaattaataatgccagagtgaatgagagcagacagagctcaagcgttgccggaaatacctcatagagttggttaacaattctctcaccattgatgctggaaatgccaaagtcccattgcagtaatccatgaaaatagaacaggtaagcatcaaacagagatgcgccgcttaaagggccatgaggcgtaaaatacatcaggctgaagcttatcagtgagagaaaaaacaatgtcacaatcagcagtagcaaacggcgcaatatataaataatcatttgcttccttttttattttcagcgggtgtatttccggtggatgttttttcagaagaaatagagtgttcctgttcccgatgaacaccagcaaatgagctatttccaaacggactcagaactaatcctttaatgttataacgaaatatctgtgatcgcattgggtaagccagtggcagtacaggtaactgctgagcaaggatctgctgagcaatatgataactttttatacgtgccgctaactgttgatctaacagcgcttgatggattgcattatcaaaagtcgcgtcacaccagcggctcaggtttgtctgagatgcgatagctgcgcagctaaatagtgggcggaaaaaactatcgggatcgttactgtcagtagaccagcctgctaatgtcatgtcatgagatttatccatgagctggctttcctgaaaacggccttcaagggggcgaatagtcattttaatcccaacatgcgctaaatctgcctgaatcagctctgccattttcaaagggcttgggttatagggtttcgacgtggtgggaacccacaatgtcagttccagaccatctaaccccagtttattcagtatctggcaggatttttcaggattgtattcggtaatttctgcccgattatcataagcccatgatgctcttggtaaaatggaggcggcagtttcagccgtaccataatagatggctcgcatcagtctttgattattaatggcataggcaatggcctgacgaacttccaatttatccagaggtggcttactggtgttgaaagcaagataggcaatattcattcctgaacgcaaggtcaggcgcagattggggtcattgtggagtatgtcccattggttggctgtaggataggctaatacatcacactctcctgtgagcagtttggagatcctgccagtaccacttgctccgatatctacaacaacttgttccatcagcggcttgcctttccagtagttatcatgtcggataagacggacaaattgccccatttgataatcttccagcatgaatggcccggttcctaccggattccagtcaatttgttcttctttgtttatgttatgcagtttttgtccgtattcttcagacagtataggcgaataatgcgtcgccagatgccagagaaaggaggcatcaggggcgttcaggcggaactcgacagtgtatttatcaatttttcggatatcctgaatggaatcaccaaattgtaaactatcaaaatagggataatgcccaccattaacatagtgatagtcatgtttgttatcgaataaccggcggaagctgaaaacaacatcatcggcgttcatggtacgggtcggagtaaaccacgccgttgactggaacgcgacattatggcgcaaataaaagcgatatgttgctccgttatcctgaatttcccaacgggaagctaattcaggaattagccgataggtcaggggatctactcccaacagacggtcgtaaatctgggcagccagagtatccacggtcaggccgctgatagccatttgcgggttaaacgtactcagattgccgttgacgcaataaataaagccatgctgccgtatagttgccggagcataggataggctttctgacgactgtctgtaagcaactttggctgtggctttagtcgtttctggaattgctttctcaatagccagagcgggagttgaaagcaataatatgatccagtaaatcaaatagcgcatataaaacatcaattatgggaaaagtctggctattgtaacttaattagccctttttgctcaaaaacaacaaccagatcacgcgggtgagaaaaattctcaataaaacgctttacaaacataagtgataagcattatcattctcatcgtgctgttgagatatgtattttatgaccccagtctgagatctcaatacgcatgacattgctcacattgcttccagtattttttattagccagctcgggtgctggctatttttttatctgttattcccttgccgcaagacccctttctaaactcattgaggatatcatttgctgaatttttcaatccgttatactgatgctgtgcttttttattaacccgcgtaattgatggtatgtcaggctgagttttgctgctgcttttttctgattgaactggctttctgctattgcctgtataattaattgcttttcacagtcattctgccattgctttaaatcgagtggtaaatcaggcagagagcgattatcagtcttatgtttgatggatgaatcgttagctgacttttgtgcatgagtttctgaagatacggcaaagggattaataatgatggtgtctaaggcattttgattatccccatgacggtagatggagcgctctatcacatttttcagttcacggacattgccgggccaagagtaagcaagtaactgtcgctttgctttttcagtcaatccggggaagaaaggaagattcagttcctgacacatctgaacggcaaagtgttgagccagtaccataatatcctgctgtctctggcgtagtggaggtatctgaacaacatcaaatgccagcctgtccagcaggtctgcccggaatttcccattggcggccatagccggtaaatcttcattggtggcacaaatcagccgaacatcgatctgtaaagactggttacctcctacacgttcaaggtatccatattcaatgactcttaagagtttttcctgtacttgcattggtgcagtcgccagctcatcaagaaacagggttcctccatccgctcgttcaaaacgcccctgatgttttgaacgtgctccggtaaatgcgcctgcttcatggccgaagagctctgaatcaagcaaattttcgttgagagcagcgcagttcagggaaatgaaagggccttgccatctgggagaaagataatgtaaacggtgggcaattaactctttacctgttccccgttcccctaacactaaaacaggtttatttaattttgccagtgcagaaacctgttccagaacctcaataaaattgtttgcttcccctaataggttatcagtgaactgattcatgatttctccactaacaaatcgtatttttcgccaattattggttgatttaactacattaagatattgtaataaaaaagcaaataaaaattaatttatatatttcaatgtgataataagaaataaaaagttggcatgtatcttgtatttaattgaatgccttaccttgtatcttatacattatttaacagtacacaggcataacatacatacattctaatgaaagaggtttatgactatgggtattttttctcgttttgctgatatcgttaacgctaatatttcttctctgctggataaagcagaagatccgcagaaaatgatccgcttgatgattcaggagatggaagatacgctggtggaaatacgctcaacatctgcgcgtacactggctgagaaaaaacagcttctgcgccgtatcagcaccggagaaagccagattgaaggctggcaggaaaaagctgaactggcattgagcaaagacaaagaagatcttgctcgggcagctttgattgaaaaacagaaagtcagccagttagttgaaacactgaaaaatgagctatcgattctggatgaaacccttgatcgcattaaaggggaagtgactgagctggaaaataaactgatagaagcgcgtgcacgacagcagtctctgacgctgcgtcatcaggctgcggcttcttcccgtgaagtccgtcgtcagctggacagcggtaaaatcgatgaggcgatggctcgctttgaacagtttgagcgccgtattgaccatatggaagcagaagcggaatcagttggccttgggaaaaagaaatctctggaacagcagtttgcagaactgaaagcggatgatgaaattagtgcacaacttgctgccctcaaagctaaaatgagtgctaaagatccacaatgatagacaaggttattcgtatacccgttcacaactaaggaaaggtaatggcttatatatttctggggatcccgctgatcctgtttgtactcttcgtgttacctgtctggttatggctgcactataacaaccagaacagaggtaaactggagagcaatgaaattcaacgtttggagcagttgtcagaaaacgcccggcgtatgcaggaacgtatcaaaacgctggaagatattcttgatgcagagcatccaaactggaggcagtcataatgagcagttcttaccgggggaaactttatcgtttaccggaacagggcgtgatcaaaggtgtttgtgccgggttagcgaactattttgatgtccctgttgcccttatccgtaccattaccatattgtcgatattctttgggttatctgccataacggtagtggcctacattattttgtcctttgtgatggatcccgcacctgtggggtatcagccagaggaaacaagagcaccatcaacccggaaaatactggatgaagttgattaccaattgagagcaggggaagaacgcctgcgtcaaatggaacgctatattacttctgacacctataatgtacgtagtcgttttcgccagctctaagccagaacagatttaaataagaacggcggaataccacagaaactgctggccccttgcccggttgggtgaggggagagcggtctgaaattacaacattatagtgtccgactcaggagaaatatgaaacggttgcaaaatgagctgacgtcacttgttaatcgtggaatagaccgtcatttacggctggcagtaacagggttaagccgtagcgggaaaacagcatttattacttctttggtcaatcagttactgaatgttcatactggtgccagattaccactgttttctactgtacgtgacggtcgtttattaggtgtgaaacgtgtaccacagcgggatttgggtgttccccgttttgcctatgatgaaaacattgctgctttgtataatacccctccgtattggccgataccgaccagaggcgtgagcgaaatccgccttgcgctgcgttatcgctcagaagattctttactccgctatctcaaagacacctcaacactttatctggaaattgtcgattatcccggagagtggctgctggatttacctatgctggaacagagttatctggcatggtcacggcaaatgaatggcttactgaaaggaaacagggctgagtgggcgaagccgtggctggaattatgtaaacagtgtgatccattggcgcctgcggatgaaaatctgctgagcagaattgcacaggcctacaccgattatttacaccaatgtaaaacagaaggtttgcatttcattcagccggggcgttttattctgccgggagatctgacgggagcgcccgccctgcaattttttccgtggccggacattgacggaatcggagaacctcaattactgaaagcggataaacagactaatatcggtatgttacgtgaacgatttaattattattgtgatcacatcgtaaagggcttttataaagagcattttctgcgttttgatcggcaaatcgttctggttgattgcctacagccattaaatagcggcccgcacgcttttaatgatatgcgcctggcactgactcaactgatgcaaagctttcattatggtaaacggacgttatttcgccgtttattttccccttgcattgataaattaatgtttgcggcgagtaaggcagaccatgtcacagcagatcaacacgtgaatcttgtttcgttgcttcaacagcttgtgcaggaagcgtggcagaatgcggcatttgaagggatcagcatggattgtgttggtctggcgtctattcaggcaactgaaagtggcattgtgatgcacgagggggaacagatcccggctatcaaaggaaatcgcctgtcagatgacaaactactgacattctttccgggggaggtgccacagcgtctgcccagtaatgatttctggcagagacagggctttaattttgaatcatttcggccacggcaggtcagtattgatgcaccattaccccatattcgtatggacagcgcgatggagtttttattgggagacaaactgacatgacggactctttaaacacagaggataaagattctgctcctttaaaaccaagagtggattttgatgacatgttatcagcaccttcagaaccttccctgaaatcccagcaagaatttaatgaacaggacagcgaattttatccggttctgccagaattaaatccggaagagcaggacagtgaacttgaaggtgcagtgaatgtggccctgaaacctaaacgcggcccgtggcggaaaatattttcgggagctttactgttattgggtttcagtgttatcgctcagtttattcaatggatatatcagtcatggcagaatcaggactggattgcactgggtgtagcagccgcaggcagtatgattgtttttgccggaataggtgctgttatcggtgaatggcgtcgtctttatcgtttgcgccagcggacagaagaacgtgatatcgcaaaaacattattgcagagtcatggtatcggcaaaggacggcagttttgtgaaaaactggctgatcaggcaggtataggccagcagcatccggcgttacagcgttggctgagtgctatacatgaaacgcacaatgatcgggaaatggtcatattatacagcaaactggttcagcctgtgctggatgagcaggctaaaaaagagatccgccgatcagccgcagaatctgcactgatgatcgcagtcagtccgcttgctgtggtcgatatggcttttattgcatggagaaatattcgtcttattaatcgaattgcggcaatatatgggattgaattgggttatttcagccgaattcgtttatttttccatataaaaggttaaaaccaccgactttagtcggtcagctttagctgcgatactgtgttgcacgagaggtgcaatatggattacagatatggcagccacacggtatttcagattgagtatcattttgtgtgggtaacaaaatacaggcgcaaagtgctaacaggtgaagttggtttacgggtgagagagttagttcgtcagacctgtgaagcgttcgaaatcaggatagtagaaggggtcgtgagcaaagaccatgtacatatactggtgagttgtcctccgagcttagcgccctcagaaatcatgaggcgaataaagggaaggacagcaagtaagttgtttgaagagtttgctcacttgaaaaagcgttactggggtcagcatttttggggcagaggctatttttgtgcgacggtaggtcagttaacggaagagatgataaaggcctatctggcgcatcattttgaaccgaacccgaatgatcacttcaggctggataattgacgcatcgtttagccgatgcgtatccggactttcagtccgttaatcactaacccaccgactttagtcggtggttgttgagtttaatcatctgatttaatcgtttgatttaatcaaatgattacaaataaattggttaatctatttttttaattccgcttttttaaccaatggtcattaagctggcatttcctcctgccgctgcggtgttaacactcaatgaacgttcatgcagcaggcgctccagcaacagattagtttcgccccgggcaaagccctgcactgaaacaatcggccctttacgttgtgcaacggtttcacatacctgccgtaactgatcgcaatcaccgtgataaataaccgcttccataaccgtgtcttcactctgccagtcattcactaaataaatggcgtgacgaacttcttttggtaactgtttcagtaactgctggtgaagctcatccttttcccagaccgcctgacaacccactgaaagcactgcggctaactgaatcagcgtatcttgctcattatctgcaagacagagaacctgaccgcgtggcaacagggtataggtattacgttcacctgttggccccggtaataggcgtgttgtcccgccctgagccagtaaagcgtattcctgaatgatgtggttcagttccgagtgattatttgatgtagcccattcagccagtttgttgaaaggagagtgcagggcagtgcggatggtagcatccagcggatattcctcatcctgacgcgttaatgcctgagttgcaccattaactgggcgctgggacaataggcgataaagatagagcggcccaccggctttaggcccggtgccggataatccttcaccaccgaatggttgtacaccaacaacggcaccgaccatattacggttaacatataaattaccgacttttgccttacccgtgacctgagagatggtttcatcaatacgggtgtgaacgcctaatgttaatccatagccggaagcgttaatctgatcaagcagctgatccaactcgtcccgtttgaaacggacaacgtgcagaaccgggccgaaaatctcttttttcagctcatcaaaactttccagctcaataagggtaggtttgacgaacattccctgtggccattcccgactgtctgccgcattttcatgagtcgcctgataaaccgttctgcccttagtgcgcatagcctgaatatggcgctcgatattcgcttttgcttcggcatcgatcaccgggccgatatcggtgaacaggtgctcaggattccccatccggcattctgccattgcgcctttcagcatggtgagtgttctgtctgcgacatcatcctgtatacacagaatacgcaaggcagagcagcgctggcctgcactgtcaaaagcagaggcaaccacatcagtgacaacctgctcagtcagggcggaagaatcgacaatcatcgcattcatcccgccggtttctgcgatcagtggcgtcgggcggccctgagcatcaagacgtccggcaatattacgctgtaacaggctggcaacttcggtggagccggtgaacatcacgccacgcacacgctcatcgcctaccagcattgaaccgacagtttctccttgccccggcaataattgcagtacttcacgtggaatgcctgcctgatgcagcattttaacggcgaccgctgcaatcagtggtgtctgttctgccggtttcgccagaacgctgttaccggccgctaatgcagcagcaatctgaccagtgaaaatggccagagggaagttccacgggctgatacagaccacaggcccaagcgggcgatgggtatcgttggcgaaatcctgacgtacctgatcggcataatagtagaggaaatccaccgcttcacgaacttctgaaatggcattgttgaacgttttacctgcttcacgtaccagaatgccgagcagggattgtaggttatcttccattaattccgctgcgcgtaccaaaatagctgcacgctctgatggtggcgtggcaaaccagatggtttcggcattggtggcgacttccagcgcgtgtctgacttcctgctctgtagtttcccgcacataaccgacgatatcagaagatttggccgggttattgaccgggctggcaaccggtaattccccggtatgggtataatcaccacctaataatggttcgctgttccatatttccattgaagaactcaacagtgcgctggaaagagaagccaaacggtgctcactggaaaggtctaatcctgatgaattggcgcgatttttaccgtataagtcaatgggtaatggaatttttgggtgaggcaggccgatttgcccttcagatttagccagttcatgaaccacttttaccggatcggcaaccagttcatcgatcggtaggttggtatcagcgatacggttaacgaacgaggtattcgctccattttccaacagacgtcgaaccagataggccagtaaagtttcatgggttccgactggtgcatagattcgacacgggcgattcagcttgccgtctgcaattttaccgaccacctgttcataaagcggttctcccattccgtgcagacactggaattcatactgtcccggatagtaattctgccctgcgatatggtaaatggcagacagagtatgggcgttatgagttgcaaactgagggtaaataagattaggcacagatagcaacttacgggcgcaggcaatataagaaacatcggtatacactttgcgggtataaaccggataaccttccagaccgtcaatctgggcacgcttgatctcactatcccaataagccccttttaccagacggatcattaatctgtgacggctgcgctgggctaaatcgataatactgtcaatgacgaaaggacaacgtttctggtaggcctgaataacaaaaccaattccattccagccttccagttgtggttcaaagcagagcttttccagcaaatcgagggaaatttccagcctatccgcttcttctgcatcaatattgataccgatatcatactgacgcgcctgtaaagtcaggctaagcaggcgagggtagagttcggtcatcacgcgttcatactgggcgcggctatagcggggatgcagggcggaaagtttgatagaaatacccggcccttcataaatgccccgaccgttcgatgccttaccaattgcatgaatggcttgttgataagagaccatataagcctgtgcatcttcttcagtcagtgctgcttcaccaagcatgtcataggagtaacggaagcctttctcctccagcttgcgggcgttggcaagggcctgagcaatagtttcgcctgtgacgaattgctctcccatcagacgcattgccatatctacacctttgcgcaccaacggttcaccgctcttgccgatgatacgggtcagcgatttggataacttggcttcgttatgggtagagactaatttaccggtaaacagcaatccccatgttgcagcattaacgaacatggacgggctttgccccagatgggagtgccagttaccgttactgattttgtcgcggatgagtgcatcacgggttgctttatcaggaatgcgcagcagggcttcggcaaggcacatcagtgcgacaccttcctgtgaagagagtgaaaattcctgtagtagcccctgaaccagaccggcgcgcccaataccctgtttttgctggcgtaatttctctgcgatggaatatgcgagtttatgtgccgctttggattgttcttcaggtaactgagcttgttgcagtaacatcggaacagcctgtgtttcaggcagccgatatgacgcagtaattgcagaacgtttcaccgattggggtaaaatgtgctcggcaaagtccagaaacggctgataacgggcttcaatcggtgattcttcttcggaaatcttttcttctttgttatcctgagcggctgatatttccgggatcttttcctcattttcaagacgttcgagataattaaaaatggcttgcttaatcagccagtgtggtgtgcgctcaattcgttgtgcagcagctttgatgcggttacgcgttgcttcatcgagcttcacgcccatagtggtactacccattctcactccttaataggaagactaatcaagttacggaacaatatcttccatgttgcaactttgtgcaactttgttaaaagccattattcagaatttgtgaaatcaatctgattttgaacatataatttgtggctcatgattattaatctattatctgtatgatagataagtatttattttcatttggctacatagagttttttatggaaggtgcaactttatgggtgataaatgtgacttggtgagcgtttcttgtaaaaaatgccgttaatcagttgttaaaaatgttttagctaatttaggatagaaagtgatttttaaataattacaaatataaattacatatcggaacaacgccaccttcaggtgaaataatcttcaggtacaactctggcctacccagtaaacttcgagttgcatacagccagcaaaaggcagtctgaaagtaagatgggtaaaacctgacaacagaacaccttgtcctgagagagatattgcgctgaaagaagtgggaaatctatacccaatgaatttcaagccgcatcgcggcggcaagggagttcatcctcgggagcatagataactatgtgactggggtgagcgagcgcagccaacaaagaggcagtttgaaagacgacgggtataagtacagaacacatcattgacgcaaatcaagtagtctgaataaacaggatttgcaaaaaatactatggagaagaacctgcatgacagtaaattcaccaatgctaattaccttcattgtctatatagccgggatgctactgataggcttcatggcttaccgtgccaccaagaatttcgatgactatattctgggtggccggcgattaggcagtgtagtaacagcactatctgctggcgcttctgatatgagtggctggttattaatggggttgccgggggcgatttttttatccggtgtatcagaaatctggatcgcgttgggcttattactgggagcctatctgaactggcgctgggtcgcaggcagattacgtgttcatacagaaatcaataataatgcgctgactttaccggattatttcaccaaccgctttgatgatagcagtaaaattctccgtattatctctgccgttgttatcctgattttctttactatctactgtgcgtcaggcgttgtaacgggtggcttgttgtttgaaaatacatttggtatcagctacgaacacgctatctggctgggtgcgttagctacgattgcctacacttttctcggcggatttttggcggtgagctggactgataccgtgcaagcaaccttaatgatttttgctttgattctggtgcctgtgctgattttactcaacgtgggtggcgtggagaaggccattatcattattgaggcgaaaaatcctgtctatatggatatatttaagaacctgaattttgtggccatcatctcattgttgggctgggggttaggttactttggtcagccccatattctggcccgttttatggccgcagattctcatcagacaatccataaagcgcgccgtatcagtatgacgtggatgctgttatgtcttgcgggtacgtcagcggtaggtttctttggtattgcatatttttcaatccatacggatcaggctggcccggtattacaaaaccatgagcgtatttttatggagctgggcatactgttatttaatccgtggatcacgggtatcttgttgtctgcggttttggctgcggtcatgagtacactgagctgccagttgctggtgtgttccagtgctctgacagaagatttttataaagcctttatccgtacgaaagcgagccagaaagaactggtatgggtcggacggatgatggtgctgttggtcgcggctattgccattgtgattgcgactaacccaaataataaagtgctggctttagtcagtaatgcctgggcgggttttggcgcagcatttggcccagtaatcctgatttcggtgatttggcaacgcatgacacgcaacggcgcattagcgggtatgctggtgggtgctgtgactgtactggtatggatgaagtttgagtggtttggtctgtacgaaatcatccccggatttattctggcctcgcttgccattgtggtggtgagcttgttgggtaaagcaccaaataagacgatccagcagcgttttatcgaagccgaagctcagtataatactaaataaagatatattcagagcctctgaagtagcagaggctcatctatcctaattaattccaacatgtccattggctgggatctccggcatattcaagttttgtcccttctggtggttgaagaagagtaatagtccatccttgatctgaatccttaaaatcaccgattttgttatgatacacatcatagagagagtctatttttattggttctgaattaaaataagcgcgtatataacttggtggaggcgctccatcagttttttcacttatttcattcagacgtgctgggcaatattgttttaaagaaaaa

SEQ ID NO: 231 - DNA, 11313 bp, Xenorhabdus sp.
  CDS (6138)..(8243)
gctcgaccatgggctcttaaagggaggtctcaatccggctgaggtcacttttttgtgatgcaaactgggatgttgtcgtctgctcgaatttagcctgcgcctcagagagattggctatcgcttccgagtgatgggtgacacgccctgcaacgtcctgtaccccttcctcagtctccttaagggaagctttaacctgattcagtgcttgagagaaagctttttcttgtgttgtctgcgcttccttaacttccagcaccgctgcagtattctccgcaacctcagtactgatttgcgactggaatttggcgtgagcttctctgtcgttagcctgaacctgttcaagtcgataaatttcagctttgcgatcagcggattcctctacaacccgttgactgacctcggtcgtgaaccgggtattttctaacgtcccctcagcgacatacaccagctgatcctcaaggttgaccgttttgttacccagttggtgagtggtggattcaagttcaatcgtcttatcacccagcgcctgtgtgaccttctctatctcctcaaccctgtctgcattgtgcctgatgtcttccgtcagacgtttcccgctttcagaggacagaaactgcttaccggtaatgtctaatatctctttggcccggtcatccggcttgccttgtgcttcgacaaagtgcgatttaccgaattcattcacactgcgaacgtagaaccagtaggcggttccggctttcagtctcccttttgtccagaacttcgcaatacccagaaaatccgctttggtttcaatctcgttgatatcggggattgacctgtctgagaaccagaactcaaattgcgtatccagcgttttgggggcgctgatataagggagggctttcagctcaaaaaagccgggttcgatcgtgataaccgaaggggcagccggcgcaccaatcaccatcggcactttggcttcatcacccaacataccgttgtcgtcacgggcacggacaccgaccgtatatacccctgcttccagaccactgaagtagtattccagctcttgagtattaccgtgtgaaaccactttattgtcacgatagagcgccacatcaaaggtgatcgtgcggttgaatgtcgtcgtcgcccacatcgcacgggcctgcacctgcgtactgtcctgaatatacgccatgctcaggcgttcaatattgggaatgcggatcacgttctgcgtggcaggcgtcccctgaaaatcaactccgtgctcaacaaccgcttctttctggggttcatgctgaatacaggtaaaattgtaatggcctgttttggtgtcttcggcaatgctcatgacccggaacaaacgagtaaccaatgatcgtttggcaatggaaaatacgccccattgccgcaatcccgccggtacgtctttcagggtgaccacatcaccactgacggattcaatctccacccggacaaactgcccttcattgcccatgtaggagaaataaccggactcatcagaggcaaactccgctggcgcatcaagacgcacggttttaccggagaaatccagcacacgcccaccgatacgcgcagcggcgaaggtgttatcggcaatttccacaatgtcacccggtatgcagttaatcccttcacggcctgtactgaatgtcaccgaatccgtttcgagcttttcggtttcgatgatccatctgccgacccgatgtgcctgaccccggctggtacacccaaaggccgtcacctttttgacgttcaggcccagacggtcaaccagtgcatcatcctgaatcagttcccgttcttctttccagccgttctccgggttcacccacgtcacttcaataatcgtatgccgggctttctttgccgccgcactgtagttaaatttgccctcgaccacgttggcattggtgaatgtccagaccggatccgtgggcctgtcctgaaaacaggtcagttgcagtccgttccagacctgcatcccccgaaagaccgaagccagatcatccaacacatcccgtgccttacgttggtttgcaatataggcattacaggtaaatcggggttccatccccccaaagccatccggcacaagctgatcacaatattgcgcaatggcatacagggcgaacttgtcgcagccaaacgaccccatcagcttcccgatgccataacgggtattggtcactaagtcgtagaatatccatgccggattattggtgtaagcaggcttaaaacgccctgtccagacccctttatactcccgcgtctcaggggaataattatccggcacctgaacaatcatgcctttgatgtgataggtacgcttaggcgtatcggcaaccctgttaactgataacacaggcacctgaccgcttctgccgcgtcacgcacctctaattcgtagcgacggccaaatcttcgaagatggcctccaagctgtaacttgaccattgtggatgtctccagactgaatgtgtgtagttgagccagtaaccgccataaacatcacgtttactgatgcgatcgggccggtgatgcaggatgtgctgattgccgaggtaaatcgccccgtgacagggtgtctgactgcccagacaaatcagaatgatgtcaccaggctgaatgtcatcgacctgcttaaacccctgactcaggctgttatcgagatacaggttctgccccgcgttccaccatgcatcatcacggggaatatcgtctaattcgatacctgccagatgataagcatcgcggatcagcgaatagcaatcctgcgaaccgtgaataaaggcccggcctaataaacgcggcaccgggcgaaattggtgcacccgatcaccacaagccaaccaccacggcagactggttttgagttgctgcgtgcggtcggcggtacttaatcggggcttaccattggggtgactgtgcacaatagcctcgatatcggcaaagcactctgccgttatccagtcatccgggttaatctcgaaatagagctctggctctggtgagatattgcggcacgggaaatagcgaccaccggcaatcaggccgcacgcttccctcaccccttccgctttcgagtgggcgataatgtctttttcaatcatgattaacctaacttgttagcgcctaagaagccgccaaagggcatggacacaggacgaggaaaacgcgcaagacagccgctgaatttctttgagcaccgatctttctgtgggtgagtcgtgggctggtctttttcatcggcgactggtgggccatcatagccacaatcggcggaacggtactgccagcaacagatatccgcctgaatcacccgcgccggaatcagcgccccgtccgtttcactgggtaacgccagaatataggtcacaaagtccgcgttcgcatcctgcttctgttctatcaggtatttgctcaccgcctcacgggtcggatcggcctgcggattaccattcggaaaattcaccgcatccagatacaactccggcacctgacgacgggtgaccactgcgcccagcgcatcattgaaatcctgattgatggccgtcagcaacccattgatattggcaaacaccattttcgggcgggagctggggcctttgccactcatctcaaatccggtcacctccaccggatacggctcatagcgcagtccctgccaaatcaccggctgtaacttgccgttcataccatcatggaaacggtagacatcgccaccaaacatcgttaaatcgatttcatacagattcaggatcgcgttctggcccagttcagtgacggccacccgcatttctttcgggatgtctctcatgccacgacctcctcaaacacacaactgactgaccagcgcacccgatggcggttgactgtccacgcgcggcacacaaacgtgcgcaattgattatcgtcgctggttcgccagacaaacgattccaccgcgccccgtgcccgtaagaacgcatcaattgaacgtccggtttcggcactcccggcaaagttgagctgatagcgttttaactggttattgataccgtctttgatgcgctgctcgtagccatcgccaaacttaatcactttgacccgcggttcatggctgacctcatagttatcctgcggtcgccagataaattctggttttgtcatatttcacccataaaaaaacccgccgaagcgggtttgtgcaattacgtatcccataaaaagggactgaggttaatccagtgttaactgtgttggcctgcattcatacaatgccgccagtttttccaatgtgacctgacgggggcgttctgctttttcaaactgggaaacagcagcttgctttacgcccaatttttccgccacttctgtttgtgataaaccacgatagatacgccatgccgcatggagggtaatttcctcatccaccatgatactgatgacttcatgagggatggtttcattatcatgagggcctttggtgtaagggatactgacataatcttcatcacgatccaccgcagccagtaagcgctcatactctgcaataggcagcactaccgcttgcttgttgccgttctcatctgtaataaactggataccagccatattatctccaatagtgtgttgaccctgacatgaatagaggaaaaagcaggcgggagatccccgccacgccagtcaatatgtatttgtttgtcttcgcttaacttcctgcacctctaaaatcttcggctctttacccgaaagctcaaacaaaattcggtagtcacccactctcaacctgtattgtgcttctgtccccgttaattttctgatatccaaatccacaatcggaaaacctgtaagctgatcaactttatttttgattactttctgatatcgggtatcgatccgaattagctgcttggttgctgctttagaccaaatcactttgaccatcatttcccctattattaaagagcatctccgttttcaggatggtttaattataagttaaaaggcttatattagtcaataaatacttatatttgcgtttatataatcatcgggtaatgatgcttcgtgaattgatactgtgataaaaaggggcagatcgatgaataacagaggtgttatgacacaatgactcgttagccgctcaagcaataaggccagctcagaggctgacaggtcatagataaaactgcccgcattgacctgatagagtgtattgccatgcagggtatgcgataacccggcattgtctgcctgcgttctgccggttaattgccgatcaaagagctgtctgagggcttttttgatgccgtagtatcgctgttcgatatcccggaataacttattgacggggcggtatgactgagtggggtcgcgtttatttctcggtatgatcggggtgccgattctgctctttttcatcagtcagcggatctcctgctgcgccctggggttccggctcgtcttccagcggttccagttcacccacagtacgaatttcattggcggtgaatatcggtgtaccaaatgcctgctgggttttcagggccgcttctgccatcttaatcatgttgtcgatcttctcctgctcactggcagccagcatgtcagaccaggcaatagtgacctcgccagaaccgggcggtgtgatcacgccaatctcccacaaccgtcgtaacaaccgggtaatatactgggtcagaaatccccagcgacgaccattcaggcgcactttccatgtggtatcgtctttatcaccggctaactttccggtttgtgtgccaaacagtaccgtaaatggcacttgcactgaggcgcaaaactcacgggtcgtcacttcccatgtcggtgtggggtcgcccggcatgactgataagacattcagcttacccgcctgcatcaccgcggctgagtccgtcccccgattgagcttactgattttatcttccagtgcggcacccagatcggggtagcccgcctgaatcgctgccgtggtgatatcgtgtaaattcgtttctttatcaaactccacaccaatctgacgggaagcattcttcaggaaaccttctgagctgcccccggacaccttttcaatatccagcagcttgttataacctgcctgaagtaacggcgtaccggagaagatacccgctgcttattcgggctggcaggtgcgccttcggcggctgacacccaaacagaacagtaaccggatcgcggatgccatgatggtggaagctattactgaggtgattgatgccaaattaagctacccagaaacggccctgttatttgttcagtttgatgccaaacagttccgcaatatcccgcaaatcacctgtgaaccgaagatgcgtatcatccgtgtgcccgccaattatcatccggatagccgccgctattatggtagttgggacggtactttcaaatgggcatggagcgacaatccggcctgggtgctgtatgacctgatgatcaatgaccggttcagtatcggcacccgggtgaaagcggaaaacctgacgctggcaaaatgggatctgtacaccatcgcgcaatattgtgataagacggtatcggatggtgaagggggagaagaaccccgttttacctgtaatgtgtatattcagtcacaggaagatgcctgggcggtgttgcgtgacattgcggggatcttccgggggatgacgttctgggccaataataacatgaacgtgctggcggatatgccccgtgacagggattatctctttacgggggccaatgtgcgtgatggcaaattcacctatgccagtgccagcgagaaaacccattattctacggcgatggtgagttggtctgatccgaagaacggctatcaggatgctatcgagccggtgtttgaacatcgcctgatacgccgctatggtatccgacaggctgatatcactgccatcggttgtacccgccagagtgaagctatccggcgtggaaaatgggtgctgcataccaacgaacatgaccgaaccgtcaccttcaccgtcggactggaggggcatattcctctgccgggttaccttatcggcgtatcggataacctgctgtcaggagccggcagaagtgggcgtattcaggctgtgccgaggcgatatatgctcacgttggatcgggtgccatcggcaaaagtgggggactggcttgttatcaatctgccttccggtaaagcagaaagggatctcattaccgcgatcaacgggcaggacgtttccgtgagtagcggtggctatgcttattcagatctcccggaggcgggggccgtctggtccattgaatccagctatagcgtggaacaccctttccgggtgataggtatcaaagcaggggaagacggtgtctcgtttgagattacggcagttgagcataacccagacaagtatgcgcttatcgacaggaacacccgtattgacgaacgccccgtggctactcttccaccccgtgttcagccggccccgaaaaatatccgcatcgacagtgattattcgattaatcagggcattatcaccaccacgttgcaaatcacatgggatgccgccgacagtgccgtggcctatgacgtcgaatggcgtaaagacaatggcaactggataacggcaccccagacaaccgcccggcgtcttgaggtaccgaacgtcgatgaaggacgctatcaggcgcgagtcagggcgatgaatgccgcggcaatctccagtatttggacgaccacacgggataccctgctggaaagacacacaaggccgccatcggaaccgcactccctccaaaccacgccgctactttttggtatccggctggactgggattttgctaacccgacggatattctgctgaaaacggaaattggctacaacaaaagtggagaagaggatgacacgttgcagtttgctgatattgcctatccgcaacgcacccacacgttacaagggctggcagcgggagagaagctctacttccgggcacggctggtggataaatcaggttatgcttcagcgtggacgtctctagtcagtggccacgcatccaatgataccggctggatagtggaggccagtcgggatcattttctggatgcaaaaaccggtcggcgcttacaggaacaacttgctgaacaggccagagtcgatgcgcggtacaagcaatccgctgtggaaaatgcgcgggccattgaaaaactgcatgacatgctgaaagatcttcagcaacgcacacggtaatctactaatgatagttttcggccgccattatagattcgactcccacggattgaggatcgttactcctgaggcttgaaaatcggcgacgttacgcgtgactatcgtcataccatgcacaagtgccgttgccgcaatcagcgcatcacgctcgctgcacttgtcaggaacgtgcagccgtgcgcagcgttgtgctacggcggtatcgacaggcaaggttcgttcagagaactccggtaagacatgttgctccagccacgcccgcagtatcgttccctgtgtggcgtccttacgttcaatcaataaaatgccaagttctaattccatgatggtgatggcggagacaaagagatcggcggcatcaactttttcagcccatgccgccacgttcggatcagcttttcctgcccgaattttgcgtagctcggacacgacattggtatcgagtacatacatcatgagaaatcagccggacgggtgccgatagtcatgggctggggttcaaactcaatgtctgcaacgtccggcatcgccagcgaatcagcaatgttgcgatgctgctttgtcagcagccggtattcttcgatactcaacagtacatgcgcaggcttgccgcgatcagtgatgaataccgggccgttcttggttgctttcttcgcacgggtcacatcctggttcagctcccggctggagagagtggtgatagtcatggtgtacctcctttgcataaattagctatataggtacattactacattatgaataatagtgcaaagtttgttcgttttactatttgtcgacatggtaacggataacacgactgttgaatttacctctctctgatatcgggcatgagtctattatcttgcttgagccgatagtcaatagaaatggcatacatttcacgtcgttattttgcgagtcgctttgcaaacacaatttttgccagtggcatgttatctgggcggggaatagagtggcggtgaaaatttcgacgcggctttaccgtgctaccaacacgctaaaaccgctaaccacaacaactaaggacctagttattatggctgacgcgcattctactgcaggcatctgcatttacaaaatgtcccaaccagaacgttatcagaaagtggtttaccgccccaatggggtgaaccgtacgatccctgccatcaatttaagcggaaaatggctgctggaagccgggttttccatcaatgatccgttaaaaatcagagtaatgcccggttgtctgatcatcacggcacaaaattttcatgaactgtggcactgcttaaaaagcctgaatgaaggcgaatgggatgatatcgtcgtggcacactggctacggcaattccctgaaaaattaaataaaaagctgccgaaataaacgcataatgctatgttttatcaattaaaacataatattgaacgcgattgcgtaagctgtgctttgcacttaaatggcaaaatttttcttttgcgaagccgctcgcattttattttatgaatcaacaaagaaggaatctatggagcttagattttctactgaaaacgctgaaaaaccggaatgtgtattacgtggtgatgatatgcagcagatgggatttacgcccaatactttgtttcatatccagcaatatcacaacggattgatattgacattggcgaagccggacgatgatccggcaaccctgttccacgctgtggaaatgatccgaagcagggcattgattgggtgcgtgatagtggagaactgtatctggcgggcgactggttaacggaaaccggtttgctggataagtctgttcaaattgctttcggttacggcaaaattatgttgatgaccgaatctgacctgcctgagtcgtataaaacattttaattgctgataatattggtgtgttaactgtggttgacacatcgtgttgtttatatacaataataatattcactttagaggtgagcatgataaccattgaaaggactcaagattttgaaaaatggttaaaatccttaaaagacaggatagccaaagccaagatcttaatccgagttgaaagaatggaagagggaaattctggtgatgttgaacctgtgggaggtggagtttcggaactcagaatacattacgggcaaggctatcgtgtctactttgctaataaaaataataaaatcatattattgctctgtggcggagataaaagcagccagcaggtagatataaagaaagccaaacaacttgcgaaagaatggggattttaaaatgaaaacagcgccaaaaaaattcgatgttgtggagtttttagaaacagaagaagatattcaggcatacttaaatgccgcaatcgaagaaaacgacacaaaatatttatttaaagcgttaggcaacattgccagaataaaaaatattagccaagtttctaaagaatcaggaataagccgagaagggatatataaggcgttatctggcgaaggcaacccatcgtttaatacggtatacaaaatatcaaaagcactgggtttgaaactgcatttcactgggacttaaccaactctcttttttacactaaaaactgtcaattatccgacattctggactgaatttttatttttaattaaaaatcaacatccatggaacatacagggcgagatctcacatttttcataaggttatttaggtcaaataaaagtcaatatacggacttttataagcatttctctccttaaaacgttaagatcacgctattccataaacagtgtgcttaataatgaatatttttaattttatcagaaaaatagatgacccacgttctgacatcaataaaaaacatgaattgatggatgtcatttttttggccttttctgctgtgttatgtggcgcttctggctggaaatcgattcaagaatttggtgagttacaaatagagtggcttaaacaatatacctcatttactcacggcattcctcgtcgtcactgtgtggctaatattatcaaaatgatagatcaagacgcattggtcgattttttttatggctggatcaaccagcgccgggttacggggggcaaaag

SEQ ID NO: 232 - DNA, 11313 bp, Xenorhabdus sp.
  CDS (7168)..(7488)
cttttgccccccgtaacccggcgctggttgatccagccataaaaaaaatcgaccaatgcgtcttgatctatcattttgataatattagccacacagtgacgacgaggaatgccgtgagtaaatgaggtatattgtttaagccactctatttgtaactcaccaaattcttgaatcgatttccagccagaagcgccacataacacagcagaaaaggccaaaaaaatgacatccatcaattcatgttttttattgatgtcagaacgtgggtcatctatttttctgataaaattaaaaatattcattattaagcacactgtttatggaatagcgtgatcttaacgttttaaggagagaaatgcttataaaagtccgtatattgacttttatttgacctaaataaccttatgaaaaatgtgagatctcgccctgtatgttccatggatgttgatttttaattaaaaataaaaattcagtccagaatgtcggataattgacagtttttagtgtaaaaaagagagttggttaagtcccagtgaaatgcagtttcaaacccagtgcttttgatattttgtataccgtattaaacgatgggttgccttcgccagataacgccttatatatcccttctcggcttattcctgattctttagaaacttggctaatattttttattctggcaatgttgcctaacgctttaaataaatattttgtgtcgttttcttcgattgcggcatttaagtatgcctgaatatcttcttctgtttctaaaaactccacaacatcgaatttttttggcgctgttttcattttaaaatccccattctttcgcaagttgtttggctttctttatatctacctgctggctgcttttatctccgccacagagcaataatatgattttattatttttattagcaaagtagacacgatagccttgcccgtaatgtattctgagttccgaaactccacctcccacaggttcaacatcaccagaatttccctcttccattctttcaactcggattaagatcttggctttggctatcctgtcttttaaggattttaaccatttttcaaaatcttgagtcctttcaatggttatcatgctcacctctaaagtgaatattattattgtatataaacaacacgatgtgtcaaccacagttaacacaccaatattatcagcaattaaaatgttttatacgactcaggcaggtcagattcggtcatcaacataattttgccgtaaccgaaagcaatttgaacagacttatccagcaaaccggtttccgttaaccagtcgcccgccagatacagttctccactatcacgcacccaatcaatgccctgcttcggatcatttccacagcgtggaacagggttgccggatcatcgtccggcttcgccaatgtcaatatcaatccgttgtgatattgctggatatgaaacaaagtattgggcgtaaatcccatctgctgcatatcatcaccacgtaatacacattccggtttttcagcgttttcagtagaaaatctaagctccatagattccttctttgttgattcataaaataaaatgcgagcggcttcgcaaaagaaaaattttgccatttaagtgcaaagcacagcttacgcaatcgcgttcaatattatgttttaattgataaaacatagcattatgcgtttatttcggcagctttttatttaatttttcagggaattgccgtagccagtgtgccacgacgatatcatcccattcgccttcattcaggctttttaagcagtgccacagttcatgaaaattttgtgccgtgatgatcagacaaccgggcattactctgatttttaacggatcattgatggaaaacccggcttccagcagccattttccgcttaaattgatggcagggatcgtacggttcaccccattggggcggtaaaccactttctgataacgttctggttgggacattttgtaaatgcagatgcctgcagtagaatgcgcgtcagccataataactaggtccttagttgttgtggttagcggttttagcgtgttggtagcacggtaaagccgcgtcgaaattttcaccgccactctattccccgcccagataacatgccactggcaaaaattgtgtttgcaaagcgactcgcaaaataacgacgtgaaatgtatgccatttctattgactatcggctcaagcaagataatagactcatgcccgatatcagagagaggtaaattcaacagtcgtgttatccgttaccatgtcgacaaatagtaaaacgaacaaactttgcactattattcataatgtagtaatgtacctatatagctaatttatgcaaaggaggtacaccatgactatcaccactctctccagccgggagctgaaccaggatgtgacccgtgcgaagaaagcaaccaagaacggcccggtattcatcactgatcgcggcaagcctgcgcatgtactgttgagtatcgaagaataccggctgctgacaaagcagcatcgcaacattgctgattcgctggcgatgccggacgttgcagacattgagtttgaaccccagcccatgactatcggcacccgtccggctgatttctcatgatgtatgtactcgataccaatgtcgtgtccgagctacgcaaaattcgggcaggaaaagctgatccgaacgtggcggcatgggctgaaaaagttgatgccgccgatctctttgtctccgccatcaccatcatggaattagaacttggcattttattgattgaacgtaaggacgccacacagggaacgatactgcgggcgtggctggagcaacatgtcttaccggagttctctgaacgaaccttgcctgtcgataccgccgtagcacaacgctgcgcacggctgcacgttcctgacaagtgcagcgagcgtgatgcgctgattgcggcaacggcacttgtgcatggtatgacgatagtcacgcgtaacgtcgccgattttcaagcctcaggagtaacgatcctcaatccgtgggagtcgaatctataatggcggccgaaaactatcattagtagattaccgtgtgcgttgctgaagatctttcagcatgtcatgcagtttttcaatggcccgcgcattttccacagcggattgcttgtaccgcgcatcgactctggcctgttcagcaagttgttcctgtaagcgccgaccggtttttgcatccagaaaatgatcccgactggcctccactatccagccggtatcattggatgcgtggccactgactagagacgtccacgctgaagcataacctgatttatccaccagccgtgcccggaagtagagcttctctcccgctgccagcccttgtaacgtgtgggtgcgttgcggataggcaatatcagcaaactgcaacgtgtcatcctcttctccacttttgttgtagccaatttccgttttcagcagaatatccgtcgggttagcaaaatcccagtccagccggataccaaaaagtagcggcgtggtttggagggagtgcggttccgatggcggccttgtgtgtctttccagcagggtatcccgtgtggtcgtccaaatactggagattgccgcggcattcatcgccctgactcgcgcctgatagcgtccttcatcgacgttcggtacctcaagacgccgggcggttgtctggggtgccgttatccagttgccattgtctttacgccattcgacgtcataggccacggcactgtcggcggcatcccatgtgatttgcaacgtggtggtgataatgccctgattaatcgaataatcactgtcgatgcggatatttttcggggccggctgaacacggggtggaagagtagccacggggcgttcgtcaatacgggtgttcctgtcgataagcgcatacttgtctgggttatgctcaactgccgtaatctcaaacgagacaccgtcttcccctgctttgatacctatcacccggaaagggtgttccacgctatagctggattcaatggaccagacggcccccgcctccgggagatctgaataagcatagccaccgctactcacggaaacgtcctgcccgttgatcgcggtaatgagatccctttctgctttaccggaaggcagattgataacaagccagtcccccacttttgccgatggcacccgatccaacgtgagcatatatcgcctcggcacagcctgaatacgcccacttctgccggctcctgacagcaggttatccgatacgccgataaggtaacccggcagaggaatatgcccctccagtccgacggtgaaggtgacggttcggtcatgttcgttggtatgcagcacccattttccacgccggatagcttcactctggcgggtacaaccgatggcagtgatatcagcctgtcggataccatagcggcgtatcaggcgatgttcaaacaccggctcgatagcatcctgatagccgttcttcggatcagaccaactcaccatcgccgtagaataatgggttttctcgctggcactggcataggtgaatttgccatcacgcacattggcccccgtaaagagataatccctgtcacggggcatatccgccagcacgttcatgttattattggcccagaacgtcatcccccggaagatccccgcaatgtcacgcaacaccgcccaggcatcttcctgtgactgaatatacacattacaggtaaaacggggttcttctcccccttcaccatccgataccgtcttatcacaatattgcgcgatggtgtacagatcccattttgccagcgtcaggttttccgctttcacccgggtgccgatactgaaccggtcattgatcatcaggtcatacagcacccaggccggattgtcgctccatgcccatttgaaagtaccgtcccaactaccataatagcggcggctatccggatgataattggcgggcacacggatgatacgcatcttcggttcacaggtgatttgcgggatattgcggaactgtttggcatcaaactgaacaaataacagggccgtttctgggtagcttaatttggcatcaatcacctcagtaatagcttccaccatcatggcatccgcgatccggttactgttctgtttgggtgtcagccgccgaaggcgcacctgccagcccgaataagcagcgggtatcttctccggtacgccgttacttcaggcaggttataacaagctgctggatattgaaaaggtgtccgggggcagctcagaaggtttcctgaagaatgcttcccgtcagattggtgtggagtttgataaagaaacgaatttacacgatatcaccacggcagcgattcaggcgggctaccccgatctgggtgccgcactggaagataaaatcagtaagctcaatcgggggacggactcagccgcggtgatgcaggcgggtaagctgaatgtcttatcagtcatgccgggcgaccccacaccgacatgggaagtgacgacccgtgagttttgcgcctcagtgcaagtgccatttacggtactgtttggcacacaaaccggaaagttagccggtgataaagacgataccacatggaaagtgcgcctgaatggtcgtcgctggggatttctgacccagtatattacccggttgttacgacggttgtgggagattggcgtgatcacaccgcccggttctggcgaggtcactattgcctggtctgacatgctggctgccagtgagcaggagaagatcgacaacatgattaagatggcagaagcggccctgaaaacccagcaggcatttggtacaccgatattcaccgccaatgaaattcgtactgtgggtgaactggaaccgctggaagacgagccggaaccccagggcgcagcaggagatccgctgactgatgaaaaagagcagaatcggcaccccgatcataccgagaaataaacgcgaccccactcagtcataccgccccgtcaataagttattccgggatatcgaacagcgatactacggcatcaaaaaagccctcagacagctctttgatcggcaattaaccggcagaacgcaggcagacaatgccgggttatcgcataccctgcatggcaatacactctatcaggtcaatgcgggcagttttatctatgacctgtcagcctctgagctggccttattgcttgagcggctaacgagtcattgtgtcataacacctctgttattcatcgatctgcccctttttatcacagtatcaattcacgaagcatcattacccgatgattatataaacgcaaatataagtatttattgactaatataagccttttaacttataattaaaccatcctgaaaacggagatgctctttaataataggggaaatgatggtcaaagtgatttggtctaaagcagcaaccaagcagctaattcggatcgatacccgatatcagaaagtaatcaaaaataaagttgatcagcttacaggttttccgattgtggatttggatatcagaaaattaacggggacagaagcacaatacaggttgagagtgggtgactaccgaattttgtttgagctttcgggtaaagagccgaagattttagaggtgcaggaagttaagcgaagacaaacaaatacatattgactggcgtggcggggatctcccgcctgctttttcctctattcatgtcagggtcaacacactattggagataatatggctggtatccagtttattacagatgagaacggcaacaagcaagcggtagtgctgcctattgcagagtatgagcgcttactggctgcggtggatcgtgatgaagattatgtcagtatcccttacaccaaaggccctcatgataatgaaaccatccctcatgaagtcatcagtatcatggtggatgaggaaattaccctccatgcggcatggcgtatctatcgtggtttatcacaaacagaagtggcggaaaaattgggcgtaaagcaagctgctgtttcccagtttgaaaaagcagaacgcccccgtcaggtcacattggaaaaactggcggcattgtatgaatgcaggccaacacagttaacactggattaacctcagtccctttttatgggatacgtaattgcacaaacccgcttcggcgggtttttttatgggtgaaatatgacaaaaccagaatttatctggcgaccgcaggataactatgaggtcagccatgaaccgcgggtcaaagtgattaagtttggcgatggctacgagcagcgcatcaaagacggtatcaataaccagttaaaacgctatcagctcaactttgccgggagtgccgaaaccggacgttcaattgatgcgttcttacgggcacggggcgcggtggaatcgtttgtctggcgaaccagcgacgataatcaattgcgcacgtttgtgtgccgcgcgtggacagtcaaccgccatcgggtgcgctggtcagtcagttgtgtgtttgaggaggtcgtggcatgagagacatcccgaaagaaatgcgggtggccgtcactgaactgggccagaacgcgatcctgaatctgtatgaaatcgatttaacgatgtttggtggcgatgtctaccgtttccatgatggtatgaacggcaagttacagccggtgatttggcagggactgcgctatgagccgtatccggtggaggtgaccggatttgagatgagtggcaaaggccccagctcccgcccgaaaatggtgtttgccaatatcaatgggttgctgacggccatcaatcaggatttcaatgatgcgctgggcgcagtggtcacccgtcgtcaggtgccggagttgtatctggatgcggtgaattttccgaatggtaatccgcaggccgatccgacccgtgaggcggtgagcaaatacctgatagaacagaagcaggatgcgaacgcggactttgtgacctatattctggcgttacccagtgaaacggacggggcgctgattccggcgcgggtgattcaggcggatatctgttgctggcagtaccgttccgccgattgtggctatgatggcccaccagtcgccgatgaaaaagaccagcccacgactcacccacagaaagatcggtgctcaaagaaattcagcggctgtcttgcgcgttttcctcgtcctgtgtccatgccctttggcggcttcttaggcgctaacaagttaggttaatcatgattgaaaaagacattatcgcccactcgaaagcggaaggggtgagggaagcgtgcggcctgattgccggtggtcgctatttcccgtgccgcaatatctcaccagagccagagctctatttcgagattaacccggatgactggataacggcagagtgctttgccgatatcgaggctattgtgcacagtcaccccaatggtaagccccgattaagtaccgccgaccgcacgcagcaactcaaaaccagtctgccgtggtggttggcttgtggtgatcgggtgcaccaatttcgcccggtgccgcgtttattaggccgggcctttattcacggttcgcaggattgctattcgctgatccgcgatgcttatcatctggcaggtatcgaattagacgatattccccgtgatgatgcatggtggaacgcggggcagaacctgtatctcgataacagcctgagtcaggggtttaagcaggtcgatgacattcagcctggtgacatcattctgatttgtctgggcagtcagacaccctgtcacggggcgatttacctcggcaatcagcacatcctgcatcaccggcccgatcgcatcagtaaacgtgatgtttatggcggttactggctcaactacacacattcagtctggagacatccacaatggtcaagttacagcttggaggccatcttcgaagatttggccgtcgctacgaattagaggtgcgtgacgcggcagaagcggtcaggtgcctgtgttatcagttaacagggttgccgatacgcctaagcgtacctatcacatcaaaggcatgattgttcaggtgccggataattattcccctgagacgcgggagtataaaggggtctggacagggcgttttaagcctgcttacaccaataatccggcatggatattctacgacttagtgaccaatacccgttatggcatcgggaagctgatggggtcgtttggctgcgacaagttcgccctgtatgccattgcgcaatattgtgatcagcttgtgccggatggctttggggggatggaaccccgatttacctgtaatgcctatattgcaaaccaacgtaaggcacgggatgtgttggatgatctggcttcggtctttcgggggatgcaggtctggaacggactgcaactgacctgttttcaggacaggcccacggatccggtctggacattcaccaatgccaacgtggtcgagggcaaatttaactacagtgcggcggcaaagaaagcccggcatacgattattgaagtgacgtgggtgaacccggagaacggctggaaagaagaacgggaactgattcaggatgatgcactggttgaccgtctgggcctgaacgtcaaaaaggtgacggcctttgggtgtaccagccggggtcaggcacatcgggtcggcagatggatcatcgaaaccgaaaagctcgaaacggattcggtgacattcagtacaggccgtgaagggattaactgcataccgggtgacattgtggaaattgccgataacaccttcgccgctgcgcgtatcggtgggcgtgtgctggatttctccggtaaaaccgtgcgtcttgatgcgccagcggagtttgcctctgatgagtccggttatttctcctacatgggcaatgaagggcagtttgtccgggtggagattgaatccgtcagtggtgatgtggtcaccctgaaagacgtaccggcgggattgcggcaatggggcgtattttccattgccaaacgatcattggttactcgtttgttccgggtcatgagcattgccgaagacaccaaaacaggccattacaattttacctgtattcagcatgaaccccagaaagaagcggttgttgagcacggagttgattttcaggggacgcctgccacgcagaacgtgatccgcattcccaatattgaacgcctgagcatggcgtatattcaggacagtacgcaggtgcaggcccgtgcgatgtgggcgacgacgacattcaaccgcacgatcacctttgatgtggcgctctatcgtgacaataaagtggtttcacacggtaatactcaagagctggaatactacttcagtggtctggaagcaggggtatatacggtcggtgtccgtgcccgtgacgacaacggtatgttgggtgatgaagccaaagtgccgatggtgattggtgcgccggctgccccttcggttatcacgatcgaacccggcttttttgagctgaaagccctcccttatatcagcgcccccaaaacgctggatacgcaatttgagttctggttctcagacaggtcaatccccgatatcaacgagattgaaaccaaagcggattttctgggtattgcgaagttctggacaaaagggagactgaaagccggaaccgcctactggttctacgttcgcagtgtgaatgaattcggtaaatcgcactttgtcgaagcacaaggcaagccggatgaccgggccaaagagatattagacattaccggtaagcagtttctgtcctctgaaagcgggaaacgtctgacggaagacatcaggcacaatgcagacagggttgaggagatagagaaggtcacacaggcgctgggtgataagacgattgaacttgaatccaccactcaccaactgggtaacaaaacggtcaaccttgaggatcagctggtgtatgtcgctgaggggacgttagaaaatacccggttcacgaccgaggtcagtcaacgggttgtagaggaatccgctgatcgcaaagctgaaatttatcgacttgaacaggttcaggctaacgacagagaagctcacgccaaattccagtcgcaaatcagtactgaggttgcggagaatactgcagcggtgctggaagttaaggaagcgcagacaacacaagaaaaagctttctctcaagcactgaatcaggttaaagcttcccttaaggagactgaggaaggggtacaggacgttgcagggcgtgtcacccatcactcggaagcgatagccaatctctctgaggcgcaggctaaattcgagcagacgacaacatcccagtttgcatcacaaaaaagtgacctcagccggattgagacctccctttaagagcccatggtcgagc

SEQ ID NO: 233 - DNA, 11313 bp, Xenorhabdus sp.; identical to SEQ ID NO: 232
  CDS (7512)..(8189)

SEQ ID NO: 234 - DNA, 11313 bp, Xenorhabdus sp.; identical to SEQ ID NO: 232
  CDS (8192)..(8905)

SEQ ID NO: 235 - DNA, 11313 bp, Xenorhabdus sp.; identical to SEQ ID NO: 232
  CDS (8848)..(9000)

SEQ ID NO: 236 - DNA, 11313 bp, Xenorhabdus sp.; identical to SEQ ID NO: 232
  CDS (8934)..(11297)

SEQ ID NO: 237 - DNA, 14442 bp, Xenorhabdus sp.
  CDS (380)..(2128)
cgagccatgtgctctaaagaaacccgatttctattgaggtgagaggcacatgccagtaattaaagtacgtgaaaacgagccatttgacgtagctctgcgtcgcttcaagcgttcttgcgaaaaagcaggcgtattagcagaagttcgtcgtcgtgagttctatgaaaaaccaacgactgaacgcaaacgcgctaaagcatctgcggttaagcgccacgctaaaaagctggctcgtgaaaacgcacgtcgcactcgtttgtactaatctttgcggcctgcccgcaaagtgtttgttttaacaaactactgcagttaaaggccgtgctttccctgagaaagcgcggcttattctcgttcatcaacaggcgtaaaagggcttatggctggacgaattccacgcgtatttatcaatgacttgttagcaagaaccgatatcattgatctaattgatgtcagagtgcctctcaaaaagaaaggtaaaaatcatcaggcgtgttgtccttttcataatgagaaaaccccttcatttactgttaatggcgacaaacagttttatcattgcttcggttgtggagcccatggtaacgccatcgattttttaatgaattatgacaggttagattttgtcgaatccattgaagaactggccacaatgcacggactggaagtcccttacgaagcaggctcaggtggcggacatatcgaacgccaccaacggcaaaatctttatcagttgatggataagctaaacagcttctatcagcgttcactgacgacaccaaatggacaggccgcccggcaatatctgaccaggcgcgggctcagtgaagaggtcattcagcgttttgcgatcggcttcgcccctgcggggtgggataatgtcctgaagcagtttgcccataataccgaagaccgcaatcagttaagcgatgcagggatgctggtcacgaatgataacggccgcacttatgaccgtttccgtgaacgtattatgttccctattcgtgatcgcaggagccgtgtcattgcatttggtggcagagttttgggggatgcacttcccaagtatctgaactcaccggaaacggagattttccataaaggccgccagttgtatggtctttatgaagcacagcaaagccacaataccctttccaggttattggtggttgaaggttatatggatgtcgtcgcactggctcagtttggcattgattatgctgtagcctcgttagggacatctacgacagccgaacacgttcagctacttttccggacaaccgatagtgtaatctgttgttacgatggagaccgtgcaggccgtactgccgcatggaggacgctggaaacagcattgccttatctgaatgatggccggcaattacgttttatgttcttgcctgatggcgaagatccagattcactagtacgcaaagaagggcgagaagtatttgaacagagaatggaaaaggcactgactctgtctgaatttctgtttgattcactattgttacaggttgatttaagtactccggaaggagcaactaagcttaattcacttgcgatgccactaattagccagattccgggcgaagcattgcggctttacctgctaaaggagcttggaaaactgctgggcatacctgatactacacaattggaacgatctctggcaaaacttgtcaaaaaagataccaatacatatcaggcgctaaaactgaaaccaacgacaatgcgcatactaatcgcattactggtgcagaacccgcatttagcgacattagtcccttcattacagggaatgttttctgctcaggtagcgggattaccgctatttatggagcttgtcgacacatgccttgctcagccggggttaacaaccggtcaacttttggagcaatatcgcgataataagtacgcaaaacagcttgaaaaactcgccgcatggaacgatatacaagtagaagaaattgctgaaaaaacgtttagtgatgcgttaaatcatcttttcgcatcagcgttggaagaacgttttaaatttttggtggctaaagaaagaactgaaggtctgacaccggaagaacgtaaagaagtctggctgatttctgaatccagcgctaaaaaatgaatccagaatttacggcttaagtgccgaatgaggtagggagatagccctacaattgccgctattgagggcagtggcaatacaacgaaatgccccctgaatgttattgttggcatatttgtttcgccgactgacaccaaccaatactctgaagtgtggatactgtcttatggagcaaaacccgcagtcacagctgaagctacttgtcacccgaggtaaggagcaaggctatctgacctatgctgaggtcaatgaccatctgccggaagatatcgtcgattctgatcagatagaagatatcatccaaatgatcaatgacatgggcatccaggtaatggaagaggcacctgatgccgatgacctcatgttggcagaaaacacgaacgacaccgatgaagatgcggcagaagcagctgcgcaagtgttatccagtgtcgagtcagaaatcggtcgtactacagacccggttcgcatgtacatgcgtgaaatgggtacagttgaactactgactcgtgaaggtgaaattgacattgcgaaacgcattgaagatggcatcaaccaagtacagtgctccgttgccgaatatcctgaagctattacctatctgctagaacagtatgaccatgttgaagcaggtgaaagccgcctgtctgatctgattacaggatttgttgatcctaacgcagaagaagatctagcaccgacagctactcacattggctctgaacttcctcaggaagagcttgacgacgacgatgatgaagatgaagacggtgaagatgatactgacagtgacgatgataacagcatcgatccggagctggctcgccaaaaattcatggaattgcgtgagcaatatgaagttacccgtcagtcaataaaaagccacggccgcagccatccaagcactgccgctgaaattttgatgctgtccgaggtattcaaacagttccgtctggtgccaaagcagtttgattatctggtcaacaacatgcgttccatgatggatcgtgtacgtcttcaagagcgtcaaatcatgaagatgtgtgttgaacagtgcaaaatgccgaagaaaaacttcatcactctgttttccggtaacgaaacaactgagacatggttcacggctgcaaaagcaatgaacaagccttggtctgacaaactgccggaagttgaagaagaaatcatgcgcagtttgcaaaaactgcgtcagattgaagaagaaactggcctgacaattgatcaagttaaagatatcaaccgtcgcatgtcaattggtgaagcaaaagcccgccgtgcgaagaaggaaatggttgaagctaacttacgtctggttatttcaattgccaagaaatacaccaaccgtggtctgcaattccttgatttaattcaggaaggtaatatcggcctgatgaaagcggttgataaattcgaatatcgccgtggttataagttctcaacttatgcaacttggtggatccgtcaggcgattacccgctctatcgccgatcaggcgcgtactatccgtattcctgtacatatgattgaaacgattaacaaactgaatcgtatttctcgtcagatgctacaggaaatggggcgtgaaccatcaccggaagagctggcagagcgtatgctgatgccggaagacaaaatccgcaaggtgctgaaaatcgccaaagagccaatttccatggaaacgccagttggtgatgatgaagattcgcatctgggtgatttcattgaagatactacgctggaactgccgctggattctgcaacttcagaaagcctgcgttcagcaacccacgatgtgctggcaggattaacggcgcgtgaagcgaaagtcctgcgtatgcgttttggtatcgatatgaacaccgaccacacactggaagaagttggtaaacagtttgacgtaacccgcgagcgtatccgtcagatcgaggcgaaagctctgcgcaaactgcgtcatccaagccgttcggaagtattgcgtagcttccttgatgactaatcaaaatatttactgttaagtctgaaaagcgcctgtttcgacaggcgcttttttatttatggctttagccagtttaagtcgcgttagcgtcttaaacataaaaccacccgctttgcgggtggagttcaaaggttataccaagaaaaacacctttccgttacgatatagatgtacaagctaatattcgtaactcaaataaggaaaggtgtttatgggcattaaagcacaaagctcagcgcatacaaagtggctgtgtaaataccatatcgtcttttcgtcgaaatatagacggaaagtgatttttaataatattcgttcaagtgtgggagagatcctcagagacctttgtaagtataaaggtgtggaaataatcgaaggtcatctcatgccagatcatgttcatatgttggtgagtattccaccaaagctaagcgtttcaagctttatgggatatttgaagggtaaaagttcgttgatgatctttgatagacacgccaatttaaaatataaatttggcaacagaaagttttgggcggaagggttctatgtcagtacggtagggctaaatgaagcgacaattcaaaaatatatcagagagcaagaaaagtcggatttaatctcggataaattgagtagtaaagagcatgtagaccccttcaaggggtaggccaaagcagcaaagacacttagcttgaacgaagagaaagcagcgtcatttaggcgcagtcggtaacaagcccttatagggcaagagcaaaccacccgttatacgggtggttatgattgtatataaaattccccctgagaaaaatgtagtggtataaagccagctaatgttattaatatgaccatgaggtgtcacaatgaaattgaaactcaccaaatgccagtattccgctgaatttaaactggaagcggttcaacaggttgttctccattaacaacgggttgtcgatgtcgcccagtcattgggggattaataacagcacgctgggaaaatgggttcgtcagtacaacgcagaaatacaggggataacgccagtaggtaaggcactgacgcatcggagttcgtgaacttgtataaccaaagccggggggcgataggcagccgcaccttgagccacctgctgaccaatgaaggtaggtcaggattgttttatcaaattgaataatactcaataaaatatgctgtggttttatactctcgcttaaataaggtaataaatagcgatgttcgatggcattttcttgtatgtccttctccttgaaatcccgaaattccctcatacacttaaattgaaacaaaacagtgcatgtcgatttgtatcagtactgttcaatgtgttggggggctttaccaaaatggcatcgtagttccaacaattgaggaaatgtaatgatggcaacccgaacattacatcggtacccactacttatcagtgtacttttagcattaacaggccttacggtcgtaggccagatttacattccgattccgatccttacggagataacccagcattttaacaacaataaaaacatggctggatgggtgagcagcgctttcagtatcggttattcggcaggttttttattatcaggcccactttcagaccgctttggtcgtagattggtcatgctcaccgggtttatcttttttctgttattcaccgttttagtcggattttgctctaactttagcctgttattaacacttcgggtattacagggacttgccgcctcttgttatccgcccattatactggcatacctgaatgaaaaactgtcttctacgctgaaatcgagagcaatatcgtttatgtcgttgggttttttaacagcgagtattgttgcccagctttatgctataaaattcagtcattatggttttaatactatcgagcttgcgctggttcctgtttattttgtgtcaattattttgatttattttgttgttcacagggataaggaaagcaatcaagtagaagagcataataaaacaacattgtttgatatttataggaaaataccgggaatattgtttgagaaaaacttaaagtggttgtatctaagtacattatgtacgttatcagcgttagttgctttttatattatgatggacgaaagttacggtaaaaaatttgccataatgggtatagaacccttcactacgaggctgattgttttacccgtgatgtttctttccctgcttgcaccttggataatacaaaaaataggtgcgatatcgctcgtccgatggagctttttaattgccgcggcaggattaatagtggcctcagtcactgtttcttttggtagtgcatggggattacttttcgccagtattatttttattggcggacgtgcattcagtgtcccttctctggttggtgtaattgctgttctggcagaacaacaatatagaggaacagccatatcactctatacatttgtactatttgttggagcaagtatagggccacttattgcccacctactgctgatgatgaattattctatatctttactgattcttgcatttattgccgggttacctgttttattgacgctatttattagggcgtgttgacgttttgtattcatcatttattcgacccacatggggaaacgaataatgacaaatgccagtgccagcagtggctaaaaaatggcctttttctcgggcatggcgaagcgcctcggcagttggccgtgaaggtcaccttctcgggctgcgcagccacatcgcagacgacttgcatgctgcagatcgcgaagacgatcgtcgccttgcagaacgtgtcggggggcgcgccggaatccggcctgtgttccttcaacttggatggcaatcctgtagatgtggcgatggcaatgcggctgctccccgactgatcccactacagcaactcaacggctcttcgggggcgttttttttgccataacgtgctcatcttgattttggaaatgatttgatccaaaattaagaacaagtcccgtcaagtggacgtgccacaacaacctacaaggagttcatttcttatgcgccaaagaaaacgaggccatgcacgcacatggctgatgatcgggttgcttgctcttgctggaactgctgcacaagcaagcgacacctaagggctggccgtgttcatcctgctgatggttacgggcaatggcatacagcgcagtttgtaaatccgaggccaccatctgatgccctgcctcatagctgatctgtgcggctaacataatcgcttcacgaattaatccgcgatctgaacgggtcagacgttcttcttcttttttctcaccgccggtgatcatcagccgggcggcaatttccatttcccccagaatatcacgctgttcatcgccgtcttcctgtgcttcatcagtctccggaatatcggcttcattaatccgtaattgtttgggactgagtttcagtaactgatgcgcatcagcaaacaggaccagactgacgccacaacccggtttgataccaattttattcaccgtcagccccagactggcgtaatagtctgctaacagtccaaaactgttccccgcttcgacaataaacaggcgcggtcggtggatagccatcagttgaaccagagaagcacacagagtggcggatttgcctgccccggtcggaccaaacagcaataagtgcgcattctgggtgcgatcctgtttgttcatcggatcgaaggtcagcggcgcaccaccgcgattaaaaaagctgaatcccggatgcccggtgccggttgaacgcccggtacgttcagccaccaacatcgtcattaactggcgtctgcgcacgaccataccgaagcaccgtaaccctttttttgaacacccgtgcaggcgaggcatggattggggaaaaccactttcatccagataaacaataggtttgtccgcttgctcatagccatcaaaccacctattgtttttttacctagggaatccagtttttgggagttgtaatgtccatgtttcaagatctgctgcacgtaagcgagcgccattaatacgaaactcttaccgacgctatttagcccaaacaaaagcgtcagcggcgcaatatagattgtttgcgtctatttaaaggagcggaaatttatcagtgatatttgagtgattttcattgtattttgcttccaattcagaccctacagcagtttcttcgtcaccagagtaatcattctgttcttcgataacagtccctgtcatcatgtgtagtgtccaatttgacccgctttactgaagatgcttcgaaaaacacgaaaatatgcttcattggcttcaatctgattttcactcaaggtcaaaacactctgtagagggccatcctaattaaaatttcgatcaacgaaatcccggttatacaccatccgctcaagctctgtgccaccttattgcaatcggcaatgctcatggtcatgcgcttgagcaattacacaactgatagtgttttgcctgtaccgttagcaccaaaatataattgatgcgacgaacatcactgagtcttgttagactcatatagtggctatgggtgagtttatttggatttcgcggatcataccctcttcttagagttgaccagaaaaggctttttggcttaatgcgctaatgcattgatcaagctttggcattgaattaaagatgttcgcccataccttcgaaaagtaatcatggattgacaaaaactctctctgcaattcaattcttggcagtaaaattggaagttctttttgtcgcgttatacctaagtaagctctcgtagattgaattccttcttttgcaaacaatctctgaaaaaatgccgagtcaaagtaagctttcaaatactcagggagaagttgctcttcatttactcgataataagtcgcttgagggctaaaaatgtagttctcgaaggtattatccagaacagccgtaaaccctaatgatcctttatgcgatataagtacatctcttggtttagcaaagcctatcctaagtttatctagccactctctttccaagtagtaacattgatcaaaaaggatttttcctcgtctcaccacatttgctgttacgaagggaatacctgtttctgaaaaatcactcacttttgggtgatcattcccgtgatttccgtcctgaacttgcaggattattttatctgatatgcactcggacacagttttaacatcaagccccttcggattcgtaaccggatcaccaaacatatccagaaacacggcgcggaggaattcgtcggcaaactggatggcttgctggcgtttgtagcggatggaatcggctttatcgagaatagcggcaatgcgtttttgttctgttaggggggggagaggaattttactttcctttattattttatcggacacagctgggtagttggcccctgtagccttttccatcatgtctgttacaaaaactctcgtctgaacccagtagtacagatatttactatccaaacggttgccctcaggccttagcacacaataacctgtagaggcggtagcaccttcatactcctctggcactaacgcaacaccatttaagttcggtctaacggttgcaactagtacatcccccgacttcactatttgcctagctctactgggcgcatcgtttggcaacaccttagatacaccgtttcgatccactgcctttttgtctttatcaaccgagctcaagtcaatatagaaaaacggagtctgactttcagactttaatggattccaagacgcgaccttttcaacacagtcaccgatacagactaaaggccaactcatagcattccctccagctcattcaaacctgccataatttcgctttccagcgctttcagttttttaagaatttccttcgggtcttcgtatttttcttcttcatacaccacttccttataacgattgatggatagatcgaatttgttggcgacaatgtctttagcatccaccacaaacgccttttgggttttatcgccaaaggctgtatcgatctctttggctgaagcgttcttttcaaccaaaacgatatattgtttccacttggcaatagcatcgggcaggtcgttgctaccttcgcctttcaatggtgttcttttatcgtctaatgaatagccatcagcttgcaggtcatagaaccaaacacgttcagtgttaccacctttagtaagcatcagaatggctgtgctgacaccggcatagggcttaaacacaccactgggcaaactcacaataccttcgagctggttattttccatcaactcctgacgcaattgctggtgggccttggaggaaccaaatagtaccccatcgggtactatgacggcggcgcggccaccgagtttgagggcgcgcaggatatgcgccacaaacagcagctcggtctttttagtttttactagacccagcaggtcagggttggtgtttgtttcgtccaggctgcctttaaacggcgggttggcgaggatgacatcaaagaagttctcttcctgctgcgggaagttttctttaatggatttattcaggctgtcctgatagagaatattggccccattcaccccatgcaaagccatattcatgctgctgacgcgcagcatagtggtgtcgaagtcgaagccccagaacatctgtttattgatatggtcacggtaaggctctaacaagtcgccggtgtagtgtttgttaccgtcgtcgtcttcaagaataccgaactcactggaatgcacgcggttgagatattccatgatgcgggcgagaaatccggctgtaccacaggctgggtcgcagacagtatcagtgggctgaggattaatcagttcgatcatagcatcgataatgtggcgcggcgtgcggaactgaccattgataccggcggtggtgagtttactgagcaggtattcgtaaatatcgccttttacatcgctttgggttagtggaagttcatccaccatctccacggcactgacgagcaccgattcatttttaatttcaagatcggcatcctgcatatattcgccgatatgccccaaagcttcgatggcactaccgtcgttgcccagaccatcttgttcatcggactttttgccaagttttgcaaagtaagggaaaacattttgcttaaggtgtttatgcagttctttaccactgagatttttaaagtttttccagcgcagcagctgcccttctggtgtattcggaaacaggcggtcaaaatctttacctgtacggttcgctttacgctcggccatgtcttcctgcatgtcgagcatacgggcgaacatcaggtagctgatttgctcgatcacggttaaggggttggtgataccgccggtccagaatttttcccagagattgtcgatatcgttacgtatttggcctgttagcattgaatagctcgcttaatgattttctgctgtttctgattcgattggcgctgcgcttagcacattgccctgtgccgtgttttccaactggcttggctctatctcttaagccaactcatccatcggttcgtctgccggatctttcacctgttctttcgtctgccggatctttcacctgttctttcgtctgctcatcaataggttcaacgatcaaggtcaggcgctcggtttcgaagtctatatgtgcagcctccaagtggggcaggcttttactgactttggcagagagttgactgaaccgatccaccttgccatacaagccttgctgtcctaccagcgctttgacggtgctgttgtagtggttgctgacggtactcagggtgccacctaatttacttaaacgctcggctacagtacacactgagttgtatatatcacctgctttttcgctgatttcgcgagcttcagcattactgcgttcaatcatccacaggttagacactgtgcgcaaaatgggaatgagcgtggtatgggagaccaatacaataccttttttgtagccgtattcgaacaggtttttgttatctttgagcgcctcgatataggctggctcaatgggcatgaacataagcacaaagctggggctacgcataccaacaaggttggtgtaatccttggatgccagatcatcaatgtgcctgcgtaccgctttaacatgttcgctcatagccagctggtattcttccggtgattctgcgctcacagcccggtcgtatgcgttcagtgctaccttactgtcgatgatgatgtgcttaccatcaggcaactttatcagatagtctgtctgcttttgcttgccttctgcgtctctgaatgagccttgaacttcgtagtgagcctcttccatcaagccactcatttccagggtgcgacgaagctgtgcctcgccccaggctccgcgcttctgagaatcccctttcagcgcagaagtgaggttattggcttctttgctcatttgcaggccaatttccagtacctttttaatctcggcattgaggctggtattgccttgcagcgaagcatcgtgtacttcgtttatacgcttttggaagccttcgatctgttcgcggaaaggcttgagcatagtgtcgatactggcctgactggtatgggtaaaggttttacctttttcctcgaaaattttattggccagattctcaaactctttggtgagcgattgtttggtttcactgagctgctgcatttgctctttaaagtgttcttctttgcgctccagcgtggttttaagctcagtatactcgttactaagcgactgatagtgctcctgaatctgatcataacgctgttgttgacctgtaagggtctgtttgacgtctttcagctgttcgcgagcttcggtattggatgcctccaactctttggcctttttgccttcttgtgccagctcatctttgagttggctcaccaaggtgcgttcttgctgaacgttctgctcacatttttccagacggtctcgtaaatcctgcgcttgttctttcaacgctcggttatcggcttgagcggtttctagttgcttttctgtactatggtgctgccctcgtaactcttccagcgttttctgtaaggatgccagctcgcctttacgctcggctaatgcgtcattcaggcgttgttctgtgacctttgcattggtctgttgcgtctgtagcttgctttccgacagttctttctcgtgcagagtgataccaagctgtttgagctcatcctggtatttctggttttgagtgttggccagcttaagggtttgatcagcctgttgcaattgggtgttgagctcagtgttcttacgtcctagcaggaccatagccagcagatagccaaaagcagtgagaaccaggcccgccacagaggcaataatcgtgagtttagtcgtccattctagtgattgcatggtcactcctgtgtgctctcaggctgtgagcctaacaatttaggttcagccttgataaaaggttttagtacggtgattaactcacccacgtcatcggcggtaaatacgccgtcaataccctcgtgcgaaactgaggtaaaaggcgcatcgtacagtttttcgatcttgatcgagccgtgctgggcgatgtagtttttcagtaagttcataaagcgcacttgctgtgctgtaagtgttgggtgggcgtgcaaaaagctcttgaagtggtcttcgatggcttgcgagtccagcccgataatttcacgcacggtcaggtgtagttgatcggcagtgcggccatagaattcattcagcacctccaaactcacactggggtggctggtgagtatggtcgaggtgagggtttttaattctggttcggcaatagattcgcctttacggattttctgtaacgtggggttggcagctatcatctgatctagaatatctttgagtctacggcggtagatcatggcctcgttggcacctgcgattgttacctcacgttcttttagttgcaaaccggtgtcacccgtttttgttgctggtatagcgtacaatccaccgctaacggtttggcgatatttcatgatgccccgcaactctttgcgagctttttccagcttatcgatagtcgggttttgccagaactcggcactgcgcacttctgctataaccacatctttctggcgcacagcctgaatgttaacggccagcttattaagttctgccaacagcagctctcgaccatcatcaaaacagctggcttgctctactaggcagcgttctatggtggcgatgagctaatccaaataagtcgcatgtttgtcgcgcaatacacgggccgacattaatggagcgatgtgattgactttagagca

SEQ ID NO: 238 - DNA, 16822 bp, Xenorhabdus sp.; identical to SEQ ID NO: 88
  CDS (5381)..(7015)

SEQ ID NO: 239 - DNA, 10956 bp, Xenorhabdus sp.
  CDS (3298)..(5955)
gtggggcatgttgagcgagcaggaaacccggcgtgttctggcggcgactgatgacaataacccgctgagtgtgcgggaccgggcgatgatggaaatgttatggagcagcggtctccggcgttctgaaatccagcggttgcaggtcacggaggtcgactttgcgcatggcctgctgtttgtccggcagggcaaagggcgcaaagaccgggtggtgccgttcggcgagtcggcgcagcactggctgcaacgttacctgaatgacgtgcgtccgcgcctcatctggggccgggacccgggctatctgttcgtctcgcaacacggtaaagcgctggctgagggcacgatgacccagatagtgcgcaatgccctgcaccgtgccgacatcgacaaacccggcggctgtcacctgttccggcacagcatggcgacgcagatgctggagaacggcgcggatacccggcatatccaggcaatactcggtcatgcgagtctggaaaccacgcagatctatacgcaggtggctatcggccacctgaaagcggtgcaccagaaaacgcatccggccgagcgtgttactgagctattaccgaaagccgacaacccgatcgccgcaccggagaacagcacaacctgcgctggcggtgagccggacaccgaaccgacaccaccgtgcagcggacagcctgcccgtccccgttgagttcgctcaggttcagtgcgggggcagaccgtggccggactgcccgccggccccggtgtctgcgggggtacgtgggccatggccggcctgcgcagttgtgcccccgttcagtccgtgcaggccgcccaaagcccactcaacataatgtgagggaattatccgccactcaccgggcagtccccgctgcctgaatcaacaccgtgcagcggctcgcagcggataatacacattatgtctggcgcccccgctgtttggcatcgcggggtgccgccgcacaaggctgcgccttatgctgtccgcatcggagccagtcctcagcaaaaaaccatgttctactttagcggccgtgccaccgtccagcaaacacccctgtaggcaggtcggcctgcggtctccgcagttttacctcccccgccccgaccccgctgcactggcggcgcacggctcgcagtcgcaagctccttgctcgttaccgtgctcgccatctccgccccgtgcagcccccgcagggggcttcccttgaatcaggtggaatcatgcaaaaccggcgcaaaacccaagctgccgtgccccagagcgtcgcaatgcgccgcttgcgggttctctgccacccgcacccgcagaacggccgcccgccgcccaagccagttggtcggcgttcgcccgttgccaaaattagaccaacatgcaataagcaaaaaatgccctaacacaccgcatacggtgatagcatggcaaaaacgcatcggggcaaacggattaaacagcctaaaagtgcacttcggcgttttaggttcgcggcggtgggcgaaacgggtaacaatggttcattaataagctgataatcaaagaaaaaatcgcttaaaaaagtataaccgcatccgaacctgccctaagacccgataggactggcggggggcgtaaatccttacgggtatgttcacaaccctaccaattttattgatccattcgggttagcgaagtgtcctcttcctcctaaaaaaatcaacttaaccaaagacggtattcagcatgttaaagataggcatgttggcaatgttgctggttggtctcataagagcaaatggactcttaataatgctgatgttaaatcaacaataagagatgtattccgtaatccagatagaattactcgtgatggcgaccgatttatatatgaaaaagttatgaaaagagatgtcggtataactccagaaggcgaaatattaaataaagtaagggtggttactgagtcaaatggtgatttggttacttctttcccacaaagtgtatttagagatttgaaaccaaccgatgtgattttttgaggatgttatgggacttgatatacatattacggcaattaatggtgacgttactcatatagttatgagtgaaattttacattcgaatattttttcttcttcaacgagatggagtagttcaaaaaatctcagcaagattaaagattactacaaaacagactgtttgttaaaaagtaaggacgctgtttcttttattcatgagctaaccgaaatgaaaaatagaatcacagatggaaaagacgaattgaatcaaataatcgaaaaattaaaaaatatacaagtcagttccattcgggttagtggtgactgatttacagatcaaaagccggaaagatcttcatgatcttccggctttgttctttttaagagcggctcactccccgcccttagttgctgttgtagtcgccaatcagttcccgcattctcagcttaatttcactgagttgatcttgctggcgctgatactgttgcttaatggtgcgggtatcgtcgctgtcaggaatgagcaccagacagccgtccataatcttaacagtgagtgtgccgccaatctcaaacccggcctgcttaagccactgccctttgagatgtatcgcgggcggggcgctggccttgttattttgcggcacgtatcccacggtgtaataacgctctgtttttgtcgctttatttactgcacgtttttgcctagaatgcgccttagccatcattcaactccttattagttgcttgtggtgagcggcgttggtgtgttaccagcacatcagcgccgcgaaacttttctcattgtcctgctatcagtttttccatttttgcccttgttaccagactatccattaaaacaatcagcgcttgttgatcttcatctgaaagcgaatcgatctgttcataaagcgcttgtaacttagggttatgtatcttgggtttttggggcagctccagcccaacaagcgcatcaacactcatctggagtacctgagcaatctttaccaccgtatcaagctgtggcacagatgagccacgctcccaacgattataaacacgcctgtttaccgtcaataaatcagccagtcgcgcctgagtcatcctgcgtgcttctcttgcttcacggagacgagttgcaaagatttccataccgttctcacttagccagttttgaaatgatatggtcatagtaactcagcctctaaaaaacccttgacgatgtatacataatagtactttaataatgccacttaaatgtctattgacaggattttaaaggactatgaaatggctcgcattcccgaagcagagttgcaacacctgaaaaccgccgtctctttagttgctattattgagcaacaagggcggcagcttgttaagcgcggtaaagatatgactgtgctgtgcccgttccatgaagagaaaacgccctcaatggtcattaccccgcccaaaaatctctatcactgttttggctgtgatgcgggcggttcggtgctcgactgggtgatgaaaaccgaagggttaagtctgcgccatgccgtggaacgcctgcgcgccgtgctcggcagtaatccggcggtggagccgctggttgatccctcggcgatgagctgtgatgccgccgggcaacaggcgctgctgtcacgggtgacggcgttctatcaccagactttgctgaacgcgccggaggcccatcagtacctgaaaaaacgccgccttgatcatcctgagctggtccgccagtttaagctcggttttgccaaccggaccctcggttaccgcttgccggataaaaaacggaaagccggggcggcgatccgtgctcagttgcaggccgtcgggttgctgcgcgagagcgggcatgagcacttcagcggctcgctggtcattccggtgatcggtctcaatggcgaggtgcaggaaatgtacggccgtaaaatcacggatcggctgcgggcagggacgccgttacatctctatctgccgggggcgcatggcggcgtctggaatgaagccgggctggccggttcggccccggttatcctgtgtgaatcgctgattgatgcgatgtcgttctggtgtgcgggcttccgcaacgtgacctgttcgtatggggttcacggctttacggaggcgcaccgggccgccttccggcagcatgagatccggcaggtacatattgcctatgacaatgataaagcaggcaatgacgcggcagccgtcctggcggcagagctgcaactggccgggctggacgtctggcgggtggtgttccccgcaggccgtgatgccaatcgctttagctgcgaggtggcgaacccggaaacggccttcggccagttactggcggccgcacaatggctcggtgaaccggcgaaaatgccactggcaggccagaatacggctgctgtctctgtggcggctctggtgccgaaaccgggggtggtgaccacgttagccgggaacggcgatattgttatccggcaggaggcgcaggaatggcgggttcgcggtgcgcagcagaaagccggcgccacggtgatgaaagtgaatgtgcagttactggacaaaaacagcggcgccctgttcacagacagcgttgatatcctgagcgcccgtgcccgtgcggggttcgtgcggcaggccgctcaggagctggcgctgccggaaacgctgatcaagcgtgaactcggccgggtattactggtgctggaacaacgggcatgggcggcagaaaccaccggtcaggtggcaaaatcgctggatgccggtgaacagcagtctgcactggccctgttgcaagatccgcaacttatcagccgtatcaccgcggatttagccgcctgtggcgtggtcggtgaatcgactaatctgttggccgcttatctggctgccgtcagccgaaagttacccaaacccttagctgtcctgatccagagcagcagcgccgccggcaagagcagcctgatggaggcggtgctcaacctgatcccggcagaagagcgcatccagtacagcgccatgaccgggcagagcctgttttatctgggggaaaccaatctccagcataaaatcctcgctatcgccgaagaagaaggcgtgcggcaggccgcctatgcgctcaagctgttgcagtcggacggcgagctgaccatggcgagtacgggcaaggatgaagccaccggcaatctggtcaccaaaagctacacggtgaaaggcccggtgatgctgatgttaacgacgaccgccattgatgtggatgaagagttactcaaccgctgtctggtgctgacggtcaatgaatcccgcgaacagaccgaagccatccatgcgttacagcgccggaaacaaaccctcgaaggcctgctggctgagaacgagcgggactatctgacggcgcttcaccagaacgcccagcggctgctgaaaccgctgaatgtggtcaatccgtatgccagccagctgacgttcctgtcagacaaaacccgcacccgccgtgaccatatgaaatacctgacgttaatccagagcattgccctgctgcaccagtaccagcgggacatcaagacgactgagcatcgtggcaagcggcttgaatatatcgaagtgacccaagacgatatccggcttgcaaatcagttggcgcatgaaatcttaggccggacactggacgagatgccgccgcaaacgcgcaagttactgctgttgatacaggcatggatacgggaaagcgggcaggcacggcatgacaagatttttacccgcaagcagttgcgcgatgcggtgcagtggggcgatacgcaactgaaagtgcacctgtcccggctggttgaaatggagtacctgctgctgcaccggcgcgggctggcgttcgcctacgaactgctgtttgacggtgaagacagccatgccgcccacctgaacggccttatcgtcccctgatgggcgggtatgacattatccggtcggggtaaaagaataagccgtcgccccatgggcggaacgcagccggcaggcggccggatacgcaaaatcagcacaaagacagagacagcaaggcctgacggaaaagcgggcggattagagaaaaaaacacagttccggcgagaagaaatgaccccatcgtaaccggattccttatcacacagcaaggcgcttcttatggcaacgacaacactcaggcagcacattcaacactaccttgaacacctcgacgccctgcgctatacgcgggaaacccggctgcactatcagggtaacctgatgcagttcgtccgctggtgtgacgaacgggggatcaccacggcgcaacaggtgagcttcccgcaactggaaagctggcagcgggggctggccgccccaaaaaaccggcacggccgccccatcgccgccagtacgctcgtgaaaaaactgaccagtgtacgcaacctgttcagctggctgacgaagcggcaacacctgctgtacaacccggcgcgggatctggagttaccccgtcaggaacggcgtttaccgtggggcatgttgagcgagcaggaaacccggcgtgttctggcggcgactgatgacaataacccgctgagtgtgcgggaccgggcgatgatggaaatgttatggagcagcggtctccggcgttctgaaatccagcggttgcaggtcacggaggtcgactttgcgcatggcctgctgtttgtccggcagggcaaagggcgcaaagaccgggtggtgccgttcggcgagtcggcgcagcactggctgcaacgttacctgaatgacgtgcgtccgcgcctcatctggggccgggacccgggctatctgttcgtctcgcaacacggtaaagcgctggctgagggcacgatgacccagatagtgcgcaatgccctgcaccgtgccgacatcgacaaacccggcggctgtcacctgttccggcacagcatggcgacgcagatgctggagaacggcgcggataacgaattttaataagattaaagtaggcgactttcttaattatgaagtagaccaaacgacaaggacaatagtggatactctgtccagaacattatccaggaataatctttgataagaaaattgtcgttggtaagaaaaaataaaatacaggaagtagtcgtgatcataagtaatttactacttcctgctatctttattattccattgtggcggaatatgaaaaatggatcagcttaatttactttgtacccattctaaaccattttggtactctgtcggcaataatgatatcaggtcctgtaatgttgcttttaatgcatcttgttcctggtgaaccagattcagatgaccaactttacgccccggacgaacttccttgccataccagtgtaaatgaaccaacggcaaactgagccattctgggtttatttcggtgccaatcagattgaccatcacagaaggggacagcacttccggttgaggcataggtaaattcagaattgcccgtaagtgaagttcaaactgactaatggaagcaccattttgtgtccaatggccactgttatgtacccgtggtgccagttcattgataagcaattcatcaccgacaataaaacactccatcgccataacaccaatgtaattcagatgatccataatgccggacaacatttgttctgcttgctgttgtaactgacgattggcattagtaaaagcaacacttgtacgtagaatcccttcctgatgaaaattatgggtcagcggatagaacactgattctccatcggcattacgagcccccaccagagaaacctcccctgagaaagggatcccttgttctacaatgcattcaccataaatttcagtgggtaaatccgtttctttacccggccggatacgccattgcccacggccgtcataaccaccaacccgacgtttgacgatggtgaaatcacccagttcactgaaaatttgcggccattggctaggatcagataataacttccacggtgctgtagccagcccaagcgtgtttaaaagctgtttctgtggcaagcggtcagcaagtaacgggaaaatatcacgattaataaatgctttatgatgggaaagctcgcgggttaaagccgtttcaggccagcgttcaatttcagctgtaataatgctgctttgatagggaacagattctggttcagcatccagcccaatcggatagacggctattcctaatggttcgcctgcctgacgtaacatcctgcctaattgaccattacccaatacacaaacaggcttcatgcatcctcccggggatccggattttccagaacatcctgagtttgagtctgacgccagtctgccagtcgctgaaacagagtctcatcatgtaatgccagaacctgagctgcaagcaaggctgcatttgctgcgcctgccttaccgatagccaacgtacccacagggatccctttgggcatttggacgatagaataaaggctatccacaccactcagggctgcactttgtaccggaacaccaaatacaggaactaatgtcttagccgccagcatccccggcagatgcgcagcaccgcccgcaccagcaataatcacctcaaaaccatttgtttttgcttgttcagcaaaatgaaaaagtttatcgggtgttcgatgcgctgaaacaatttcgacatgaaaaggaagatcaagggaagccagaatatcagctgcgtgttgcattgttgcccaatcactttttgaacccatgacaatagcaatttgggcatgatgctgtatttcagttgttgctgccgtggagatagtttgtgcgggatcagggcttgccgtcataaatcagatgctcctgtattggatgtccaccagaacaaagctcaaaataatgttgttttgaaatccattatggataaggtggtggataatatcacgcgaattgcagaaggaaaacgtttgcgttggttgatttttttatttttacagaaaaaactcactaccttcaaaaaggaaaagataccaattcaatagatgtttctgtcactttgaacattgacccttgatgatgccaggcacccagtacaccacgatgtaagattttatcgcctatggggatatcatggattgccgggcgatgcgtatgcccgtggatcatccagtccacttgatatttattaaaatgttcaatgacagtctgttgattgacatccatgatcgattcagatttctgactattggcgtactggcttcctgcccgcattctggctgcaattttcagccggataaacagaggaagaagtaaaaaaagccgttggatccacggagtgtgtacccgcttacgatattgctgataacccgtgtcatcggtgcaaagagtatcaccgtgcaggataagaatgcgcttaccgtagagttccagaactttttcctgtggcagaagaatcagcccgctctctttggcaaaccgggaacttaataaaaaatcacggttaccatgaatgaaataacaggaaacgcctttttgtttcagagaattaagtgcttgtgcgatttgtgcatgtaaagggttgggatcatcgtcaccaatccagtaatcaaaaaaatcaccaaggatatacaggctttccgcatggattgcatcttcacgtaaaaaacgtagaaaaccggcagtaattgccggttcctgctcactgagatgcaaatcagcaataaacagtgtactcatgtaacgactaattattcgctgacagtaacacgttcaacgataacatcttcatggggtacatcctgatgcataccgctgcggccagttgaaacacctttaatcttatcaactacttccatgccttctacaacttcagcaaatacgcagtaaccccagccgtcagggcgttctgaacggaagttcaggaaatcattatcaacaacattgataaagaactgagctgttgcagaatgcggatcattggtacgagccattgccagagtgccaaggctgttttgcagaccattattagcttcgttctggataggagatttagtcgttttctgcttcataccaggctcaaaaccaccaccctgaatcatgaagccattaatgacacggtgaaaaatagtgttatcgtagaagccttcgcggcagtaattcaagaaattttcaacagttacaggcgctttttcagcgaaagtattaatcacgatatcgccgaaattggtatggaaagtcaccataatagaaatcctaataatatttttgactgaccctaatattctagagtgtgcggaacaacggcttttataccatatctgtgatcttgagtcagtactcagccatcccgtgagaataaagctgatcgcaatgcttgcaaagtgcggcgtatcagggtgaaatatctaatccggcttttctattatagtttatttatctagctgataaggaagcccaaaatcagcggatttatccgcttttgttttttattacacgtacatcaatttttacggaaaacccactgatgctaaaaattttcaatactctcagtcgccaaaaagaagaatttaagccgatccatgaagggaaagtgggcatgtacgtgtgtggcatcaccatttatgatttgtgtcacattggtcacggcagaacatttatcgcatttgacgttattgcccgttacctgcgttattcaggttacgatttaacttatgtccgtaatattactgatatagatgataaaatcatcaagcgcgcgattgaaaataatgaaagctgtgatgccttgactacccgtatggtgaatgagatgcacaacgactttgatgcgctgaatattatgcgtccggattcagagccgcgtgcgatgcagcatatccctgaaattattgagcttactgaactgctgatcaaacgcgggcacgcatacgttgctgataatggtgacgtgatgttctctatcgatagtaatcctaatta

SEQ ID NO: 240 - DNA, 10956 bp, Xenorhabdus sp.
  CDS (2129)..(2683)
taattaggattactatcgatagagaacatcacgtcaccattatcagcaacgtatgcgtgcccgcgtttgatcagcagttcagtaagctcaataatttcagggatatgctgcatcgcacgcggctctgaatccggacgcataatattcagcgcatcaaagtcgttgtgcatctcattcaccatacgggtagtcaaggcatcacagctttcattattttcaatcgcgcgcttgatgattttatcatctatatcagtaatattacggacataagttaaatcgtaacctgaataacgcaggtaacgggcaataacgtcaaatgcgataaatgttctgccgtgaccaatgtgacacaaatcataaatggtgatgccacacacgtacatgcccactttcccttcatggatcggcttaaattcttctttttggcgactgagagtattgaaaatttttagcatcagtgggttttccgtaaaaattgatgtacgtgtaataaaaaacaaaagcggataaatccgctgattttgggcttccttatcagctagataaataaactataatagaaaagccggattagatatttcaccctgatacgccgcactttgcaagcattgcgatcagctttattctcacgggatggctgagtactgactcaagatcacagatatggtataaaagccgttgttccgcacactctagaatattagggtcagtcaaaaatattattaggatttctattatggtgactttccataccaatttcggcgatatcgtgattaatactttcgctgaaaaagcgcctgtaactgttgaaaatttcttgaattactgccgcgaaggcttctacgataacactatttttcaccgtgtcattaatggcttcatgattcagggtggtggttttgagcctggtatgaagcagaaaacgactaaatctcctatccagaacgaagctaataatggtctgcaaaacagccttggcactctggcaatggctcgtaccaatgatccgcattctgcaacagctcagttctttatcaatgttgttgataatgatttcctgaacttccgttcagaacgccctgacggctggggttactgcgtatttgctgaagttgtagaaggcatggaagtagttgataagattaaaggtgtttcaactggccgcagcggtatgcatcaggatgtaccccatgaagatgttatcgttgaacgtgttactgtcagcgaataattagtcgttacatgagtacactgtttattgctgatttgcatctcagtgagcaggaaccggcaattactgccggttttctacgttttttacgtgaagatgcaatccatgcggaaagcctgtatatccttggtgatttttttgattactggattggtgacgatgatcccaaccctttacatgcacaaatcgcacaagcacttaattctctgaaacaaaaaggcgtttcctgttatttcattcatggtaaccgtgattttttattaagttcccggtttgccaaagagagcgggctgattcttctgccacaggaaaaagttctggaactctacggtaagcgcattcttatcctgcacggtgatactctttgcaccgatgacacgggttatcagcaatatcgtaagcgggtacacactccgtggatccaacggctttttttacttcttcctctgtttatccggctgaaaattgcagccagaatgcgggcaggaagccagtacgccaatagtcagaaatctgaatcgatcatggatgtcaatcaacagactgtcattgaacattttaataaatatcaagtggactggatgatccacgggcatacgcatcgcccggcaatccatgatatccccataggcgataaaatcttacatcgtggtgtactgggtgcctggcatcatcaagggtcaatgttcaaagtgacagaaacatctattgaattggtatcttttcctttttgaaggtagtgagttttttctgtaaaaataaaaaaatcaaccaacgcaaacgttttccttctgcaattcgcgtgatattatccaccaccttatccataatggatttcaaaacaacattattttgagctttgttctggtggacatccaatacaggagcatctgatttatgacggcaagccctgatcccgcacaaactatctccacggcagcaacaactgaaatacagcatcatgcccaaattgctattgtcatgggttcaaaaagtgattgggcaacaatgcaacacgcagctgatattctggcttcccttgatcttccttttcatgtcgaaattgtttcagcgcatcgaacacccgataaactttttcattttgctgaacaagcaaaaacaaatggttttgaggtgattattgctggtgcgggcggtgctgcgcatctgccggggatgctggcggctaagacattagttcctgtatttggtgttccggtacaaagtgcagccctgagtggtgtggatagcctttattctatcgtccaaatgcccaaagggatccctgtgggtacgttggctatcggtaaggcaggcgcagcaaatgcagccttgcttgcagctcaggttctggcattacatgatgagactctgtttcagcgactggcagactggcgtcagactcaaactcaggatgttctggaaaatccggatccccgggaggatgcatgaagcctgtttgtgtattgggtaatggtcaattaggcaggatgttacgtcaggcaggcgaaccattaggaatagccgtctatccgattgggctggatgctgaaccagaatctgttccctatcaaagcagcattattacagctgaaattgaacgctggcctgaaacggctttaacccgcgagctttcccatcataaagcatttattaatcgtgatattttcccgttacttgctgaccgcttgccacagaaacagcttttaaacacgcttgggctggctacagcaccgtggaagttattatctgatcctagccaatggccgcaaattttcagtgaactgggtgatttcaccatcgtcaaacgtcgggttggtggttatgacggccgtgggcaatggcgtatccggccgggtaaagaaacggatttacccactgaaatttatggtgaatgcattgtagaacaagggatccctttctcaggggaggtttctctggtgggggctcgtaatgccgatggagaatcagtgttctatccgctgacccataattttcatcaggaagggattctacgtacaagtgttgcttttactaatgccaatcgtcagttacaacagcaagcagaacaaatgttgtccggcattatggatcatctgaattacattggtgttatggcgatggagtgttttattgtcggtgatgaattgcttatcaatgaactggcaccacgggtacataacagtggccattggacacaaaatggtgcttccattagtcagtttgaacttcacttacgggcaattctgaatttacctatgcctcaaccggaagtgctgtccccttctgtgatggtcaatctgattggcaccgaaataaacccagaatggctcagtttgccgttggttcatttacactggtatggcaaggaagttcgtccggggcgtaaagttggtcatctgaatctggttcaccaggaacaagatgcattaaaagcaacattacaggacctgatatcattattgccgacagagtaccaaaatggtttagaatgggtacaaagtaaattaagctgatccatttttcatattccgccacaatggaataataaagatagcaggaagtagtaaattacttatgatcacgactacttcctgtattttattttttcttaccaacgacaattttcttatcaaagattattcctggataatgttctggacagagtatccactattgtccttgtcgtttggtctacttcataattaagaaagtcgcctactttaatcttattaaaattcgttatccgcgccgttctccagcatctgcgtcgccatgctgtgccggaacaggtgacagccgccgggtttgtcgatgtcggcacggtgcagggcattgcgcactatctgggtcatcgtgccctcagccagcgctttaccgtgttgcgagacgaacagatagcccgggtcccggccccagatgaggcgcggacgcacgtcattcaggtaacgttgcagccagtgctgcgccgactcgccgaacggcaccacccggtctttgcgccctttgccctgccggacaaacagcaggccatgcgcaaagtcgacctccgtgacctgcaaccgctggatttcagaacgccggagaccgctgctccataacatttccatcatcgcccggtcccgcacactcagcgggttattgtcatcagtcgccgccagaacacgccgggtttcctgctcgctcaacatgccccacggtaaacgccgttcctgacggggtaactccagatcccgcgccgggttgtacagcaggtgttgccgcttcgtcagccagctgaacaggttgcgtacactggtcagttttttcacgagcgtactggcggcgatggggcggccgtgccggttttttggggcggccagcccccgctgccagctttccagttgcgggaagctcacctgttgcgccgtggtgatcccccgttcgtcacaccagcggacgaactgcatcaggttaccctgatagtgcagccgggtttcccgcgtatagcgcagggcgtcgaggtgttcaaggtagtgttgaatgtgctgcctgagtgttgtcgttgccataagaagcgccttgctgtgtgataaggaatccggttacgatggggtcatttcttctcgccggaactgtgtttttttctctaatccgcccgcttttccgtcaggccttgctgtctctgtctttgtgctgattttgcgtatccggccgcctgccggctgcgttccgcccatggggcgacggcttattcttttaccccgaccggataatgtcatacccgcccatcaggggacgataaggccgttcaggtgggcggcatggctgtcttcaccgtcaaacagcagttcgtaggcgaacgccagcccgcgccggtgcagcagcaggtactccatttcaaccagccgggacaggtgcactttcagttgcgtatcgccccactgcaccgcatcgcgcaactgcttgcgggtaaaaatcttgtcatgccgtgcctgcccgctttcccgtatccatgcctgtatcaacagcagtaacttgcgcgtttgcggcggcatctcgtccagtgtccggcctaagatttcatgcgccaactgatttgcaagccggatatcgtcttgggtcacttcgatatattcaagccgcttgccacgatgctcagtcgtcttgatgtcccgctggtactggtgcagcagggcaatgctctggattaacgtcaggtatttcatatggtcacggcgggtgcgggttttgtctgacaggaacgtcagctggctggcatacggattgaccacattcagcggtttcagcagccgctgggcgttctggtgaagcgccgtcagatagtcccgctcgttctcagccagcaggccttcgagggtttgtttccggcgctgtaacgcatggatggcttcggtctgttcgcgggattcattgaccgtcagcaccagacagcggttgagtaactcttcatccacatcaatggcggtcgtcgttaacatcagcatcaccgggcctttcaccgtgtagcttttggtgaccagattgccggtggcttcatccttgcccgtactcgccatggtcagctcgccgtccgactgcaacagcttgagcgcataggcggcctgccgcacgccttcttcttcggcgatagcgaggattttatgctggagattggtttcccccagataaaacaggctctgcccggtcatggcgctgtactggatgcgctcttctgccgggatcaggttgagcaccgcctccatcaggctgctcttgccggcggcgctgctgctctggatcaggacagctaagggtttgggtaactttcggctgacggcagccagataagcggccaacagattagtcgattcaccgaccacgccacaggcggctaaatccgcggtgatacggctgataagttgcggatcttgcaacagggccagtgcagactgctgttcaccggcatccagcgattttgccacctgaccggtggtttctgccgcccatgcccgttgttccagcaccagtaatacccggccgagttcacgcttgatcagcgtttccggcagcgccagctcctgagcggcctgccgcacgaaccccgcacgggcacgggcgctcaggatatcaacgctgtctgtgaacagggcgccgctgtttttgtccagtaactgcacattcactttcatcaccgtggcgccggctttctgctgcgcaccgcgaacccgccattcctgcgcctcctgccggataacaatatcgccgttcccggctaacgtggtcaccacccccggtttcggcaccagagccgccacagagacagcagccgtattctggcctgccagtggcattttcgccggttcaccgagccattgtgcggccgccagtaactggccgaaggccgtttccgggttcgccacctcgcagctaaagcgattggcatcacggcctgcggggaacaccacccgccagacgtccagcccggccagttgcagctctgccgccaggacggctgccgcgtcattgcctgctttatcattgtcataggcaatatgtacctgccggatctcatgctgccggaaggcggcccggtgcgcctccgtaaagccgtgaaccccatacgaacaggtcacgttgcggaagcccgcacaccagaacgacatcgcatcaatcagcgattcacacaggataaccggggccgaaccggccagcccggcttcattccagacgccgccatgcgcccccggcagatagagatgtaacggcgtccctgcccgcagccgatccgtgattttacggccgtacatttcctgcacctcgccattgagaccgatcaccggaatgaccagcgagccgctgaagtgctcatgcccgctctcgcgcagcaacccgacggcctgcaactgagcacggatcgccgccccggctttccgttttttatccggcaagcggtaaccgagggtccggttggcaaaaccgagcttaaactggcggaccagctcaggatgatcaaggcggcgttttttcaggtactgatgggcctccggcgcgttcagcaaagtctggtgatagaacgccgtcacccgtgacagcagcgcctgttgcccggcggcatcacagctcatcgccgagggatcaaccagcggctccaccgccggattactgccgagcacggcgcgcaggcgttccacggcatggcgcagacttaacccttcggttttcatcacccagtcgagcaccgaaccgcccgcatcacagccaaaacagtgatagagatttttgggcggggtaatgaccattgagggcgttttctcttcatggaacgggcacagcacagtcatatctttaccgcgcttaacaagctgccgcccttgttgctcaataatagcaactaaagagacggcggttttcaggtgttgcaactctgcttcgggaatgcgagccatttcatagtcctttaaaatcctgtcaatagacatttaagtggcattattaaagtactattatgtatacatcgtcaagggttttttagaggctgagttactatgaccatatcatttcaaaactggctaagtgagaacggtatggaaatctttgcaactcgtctccgtgaagcaagagaagcacgcaggatgactcaggcgcgactggctgatttattgacggtaaacaggcgtgtttataatcgttgggagcgtggctcatctgtgccacagcttgatacggtggtaaagattgctcaggtactccagatgagtgttgatgcgcttgttgggctggagctgccccaaaaacccaagatacataaccctaagttacaagcgctttatgaacagatcgattcgctttcagatgaagatcaacaagcgctgattgttttaatggatagtctggtaacaagggcaaaaatggaaaaactgatagcaggacaatgagaaaagtttcgcggcgctgatgtgctggtaacacaccaacgccgctcaccacaagcaactaataaggagttgaatgatggctaaggcgcattctaggcaaaaacgtgcagtaaataaagcgacaaaaacagagcgttattacaccgtgggatacgtgccgcaaaataacaaggccagcgccccgcccgcgatacatctcaaagggcagtggcttaagcaggccgggtttgagattggcggcacactcactgttaagattatggacggctgtctggtgctcattcctgacagcgacgatacccgcaccattaagcaacagtatcagcgccagcaagatcaactcagtgaaattaagctgagaatgcgggaactgattggcgactacaacagcaactaagggcggggagtgagccgctcttaaaaagaacaaagccggaagatcatgaagatctttccggcttttgatctgtaaatcagtcaccactaacccgaatggaactgacttgtatattttttaatttttcgattatttgattcaattcgtcttttccatctgtgattctatttttcatttcggttagctcatgaataaaagaaacagcgtccttactttttaacaaacagtctgttttgtagtaatctttaatcttgctgagattttttgaactactccatctcgttgaagaagaaaaaatattcgaatgtaaaatttcactcataactatatgagtaacgtcaccattaattgccgtaatatgtatatcaagtcccataacatcctcaaaaaatcacatcggttggtttcaaatctctaaatacactttgtgggaaagaagtaaccaaatcaccatttgactcagtaaccacccttactttatttaatatttcgccttctggagttataccgacatctcttttcataactttttcatatataaatcggtcgccatcacgagtaattctatctggattacggaatacatctcttattgttgatttaacatcagcattattaagagtccatttgctcttatgagaccaaccagcaacattgccaacatgcctatctttaacatgctgaataccgtctttggttaagttgatttttttaggaggaagaggacacttcgctaacccgaatggatcaataaaattggtagggttgtgaacatacccgtaaggatttacgccccccgccagtcctatcgggtcttagggcaggttcggatgcggttatacttttttaagcgattttttctttgattatcagcttattaatgaaccattgttacccgtttcgcccaccgccgcgaacctaaaacgccgaagtgcacttttaggctgtttaatccgtttgccccgatgcgtttttgccatgctatcaccgtatgcggtgtgttagggcattttttgcttattgcatgttggtctaattttggcaacgggcgaacgccgaccaactggcttgggcggcgggcggccgttctgcgggtgcgggtggcagagaacccgcaagcggcgcattgcgacgctctggggcacggcagcttgggttttgcgccggttttgcatgattccacctgattcaagggaagccccctgcgggggctgcacggggcggagatggcgagcacggtaacgagcaaggagcttgcgactgcgagccgtgcgccgccagtgcagcggggtcggggcgggggaggtaaaactgcggagaccgcaggccgacctgcctacaggggtgtttgctggacggtggcacggccgctaaagtagaacatggttttttgctgaggactggctccgatgcggacagcataaggcgcagccttgtgcggcggcaccccgcgatgccaaacagcgggggcgccagacataatgtgtattatccgctgcgagccgctgcacggtgttgattcaggcagcggggactgcccggtgagtggcggataattccctcacattatgttgagtgggctttgggcggcctgcacggactgaacgggggcacaactgcgcaggccggccatggcccacgtacccccgcagacaccggggccggcgggcagtccggccacggtctgcccccgcactgaacctgagcgaactcaacggggacgggcaggctgtccgctgcacggtggtgtcggttcggtgtccggctcaccgccagcgcaggttgtgctgttctccggtgcggcgatcgggttgtcggctttcggtaatagctcagtaacacgctcggccggatgcgttttctggtgcaccgctttcaggtggccgatagccacctgcgtatagatctgcgtggtttccagactcgcatgaccgagtattgcctggatatgccgggtatccgcgccgttctccagcatctgcgtcgccatgctgtgccggaacaggtgacagccgccgggtttgtcgatgtcggcacggtgcagggcattgcgcactatctgggtcatcgtgccctcagccagcgctttaccgtgttgcgagacgaacagatagcccgggtcccggccccagatgaggcgcggacgcacgtcattcaggtaacgttgcagccagtgctgcgccgactcgccgaacggcaccacccggtctttgcgccctttgccctgccggacaaacagcaggccatgcgcaaagtcgacctccgtgacctgcaaccgctggatttcagaacgccggagaccgctgctccataacatttccatcatcgcccggtcccgcacactcagcgggttattgtcatcagtcgccgccagaacacgccgggtttcctgctcgctcaacatgccccac

SEQ ID NO: 241 - DNA, 6481 bp, Xenorhabdus sp.
  CDS (5180)..(6481)
gtttggtggtatcgataagcttgatatcgaattcctgcagggggggggcgctgaggtctgcctcgtgaagaaggtgttgctgactcataccaggcctgaatcgccccatcatccagccagaaagtgagggagccacggttgatgagagctttgttgtaggtggaccagttggtgattttgaacttttgctttgccacggaacggtctgcgttgtcgggaagatgcgtgatctgatccttcaactcagcaaaagttcgatttattcaacaaagccgccgtcccgtcaagtcagcgtaatgctctgccagtgttacaaccaattaaccaattctgattagaaaaactcatcgagcatcaaatgaaactgcaatttattcatatcaggattatcaataccatatttttgaaaaagccgtttctgtaatgaaggagaaaactcaccgaggcagttccataggatggcaagatcctggtatcggtctgcgattccgactcgtccaacatcaatacaacctattaatttcccctcgtcaaaaataaggttatcaagtgagaaatcaccatgagtgacgactgaatccggtgagaatggcaaaagcttatgcatttctttccagacttgttcaacaggccagccattacgctcgtcatcaaaatcactcgcatcaaccaaaccgttattcattcgtgattgcgcctgagcgagacgaaatacgcgatcgctgttaaaaggacaattacaaacaggaatcgaatgcaaccggcgcaggaacactgccagcgcatcaacaatattttcacctgaatcaggatattcttctaatacctggaatgctgttttcccggggatcgcagtggtgagtaaccatgcatcatcaggagtacggataaaatgcttgatggtcggaagaggcataaattccgtcagccagtttagtctgaccatctcatctgtaacatcattggcaacgctacctttgccatgtttcagaaacaactctggcgcatcgggcttcccatacaatcgatagattgtcgcacctgattgcccgacattatcgcgagcccatttatacccatataaatcagcatccatgttggaatttaatcgcggcctcgagcaagacgtttcccgttgaatatggctcataacaccccttgtattactgtttatgtaagcagacagttttattgttcatgatgatatatttttatcttgtgcaatgtaacatcagagaaaatgggactctttagtgggtgtccatcaccgcccgcggattttgtcgttgctgacaagggatacgatagtcaggcattgagaacttatattgaagaacaaggtgcaacagcggttattccctaccgaaaaaatagccgaaattcggataaaaagtgggataaggatttatatcgttatcgtcatttagtcgaaaatgcatttgccagaatcaaacattttcgtgcaatcgccacaagatacgataaattagcgagaaattacgccagcacattagcactggcatttatcattatctggttacccatgtgggtcgagtaagtgatgaaaacaaaacgtcaacacgccctaacatttattacaatggttctgttgaatcgagtgatactcaatggccagtatttaatttaaaagcggatagttttcaaacgatatattcatcaaaaggatggtacttgacttggtttgcgattggaaaataagtccatcatgattatgcagggtcaactggccctatttctattaggtgcgttagctaaaaatcccacctgttgtttcattaatcttcattaacaaaataaattttattaatgctctgcttggcattccgtgtcatgctcctgttataaaatgtaatgtaaaaaatccctaagcaatttcattgcaatacgccaaaatagactcttccgtattgataaaccaaatttaatgtttaccggcggagacgtactaaccgccttcatattacttagcaatgtactttgttgattaaatgagggttatatatgaatattcaagataataaacctgataaggcgacggaaaaagataatgtgcttcctgataatccaatcaggaaaaagcacactgttacacgaaaccaagtcgaaagtagtgtcagtaatatctttggctttggctactcacatgccaatttcttcaacagctacttcggagcctaatctcatgacaaaaacatttaaagttccctttgcagcgcagggagatagagtttctatttctgatcagcctcgagaagatggtactgtttcatatgctcaaggttatggtagtggatatgggcttgatccaaacgaagatcctactgcaatgaatatcgaacgtgagaaaatgaacggaatttttcacgatatcaccgaagccgtggggggaatgcaagcctttggtgcagcacaatggagcagtgatgcacaaccttatcctctgcgggcactggtttatcacaagcagaaagtctggcaatcacgtattgagaacaataaagaagaaccaaaagcagagaatgcatgggtagagctaaaagctgacccgaccgctggtgaggtcggtgcctatagcaaagaggaatcggatattcgttttcaagccaaaggtaactatgcgcctgccgggaactatgctctgaaaggcgaaagttatacaaagccagaatctgatggaaaatatcaacccaaaggcaattatgcgctgaagggagatagttatactaaacctgaatctaacgctaagtatcagccagttggaaattatctgaccgcaggttacagctattcgaaaggagagagcgatggacgttttcagccaaaaggaaactaccaacctgccgggaactatcagccagctggaaattaccaaccagcaggtaattacgcattgaggggggaaagttatactaaatcagagagtgatggacgatatatgcagaggcgtcgtaataacgaaactgttatatggtctggttgggttacacagggaggctccgtttattgtaaccgtgatgtgttaggtagactactctattttcgtttcggtgaatggtcacagaaaggctggtattttcctgtgttagtccctgctagtataggtagaacatcagtatataccttaatgggaaataactggttggctattcgcctaattaattcaagtagttttgttgtagtagctacacctgttggttgggatcaaattatactgagtgactcaacaaccaccgactaaagtcggtgggttagtgattaacggactgaaagtccggatacgcatcggctaaacgatgcgtcaattatccagcctgaagtgatcattcgggttcggttcaaaatgatgcgccagataggcctttatcatctcttccgttaactgacctaccgtcgcacaaaaatagcctctgccccaaaaatgctgaccccagtaacgctttttcaagtgagcaaactcttcaaacaacttacttgctgtccttccctttattcgcctcatgatttctgagggcgctaagctcggaggacaactcaccagtatatgtacatggtctttgctcacgaccccttctactatcctgatttcgaacgcttcacaggtctgacgaactaactctctcacccgtaaaccaacttcacctattagcactttgtgcctgtattttgttacccacacaaaatgatactcaatctgaaataccgtgtggctgccatatctgtaatccatattgcacctctcgtgcaacacagtatcgcagctaaagctgaccgactaaagtcggtggttttaaccttttatatggaaaaataaatccgaatagatttatgtgttatgtttcttttaacatgataaatgccatcaaagttattctggcaatcagagataactttgatggaaaacgtattgttacgtaactggttattgtctggagatcactaaagccacgcgtccaatgaattgaatatcgctgatagcacaatcaaacgtaacatcattatcactgacgcgaattttactgacagggattttggctatcttcttgatgctgtgcatgccttcgatatcgaccagccataaaccgtcctgaatagtgtcttcttgtgcatcaagcaaataccaggatatgccatcatcaaccaccagaggttctctgagatctttggaaatcaattcactatccagaataaccggatcagcctcattcagtttacctcctgacagttttacacgggagattgacggcgcaatgatatcttccaatcgttctgtttttttgatcccttcgccgtttggaaacatctctccttgccctgtactcagccataagcagtgaagcacccgtttcgagattacactgaataatccaatccgccggaaagctatcacgaagatagcggtttgccattgtgcttttggacacgcctaaatgatcactcagagcctgacgggatttaaatccatacgcgcgtacaaggcgctcgatagctggtcgcccaccactatcagcccccattttgatctcaatattggtatttttcattgacagtatagataagagatattattatcccgcaaaagatcttgaaatgagatcttaattgggtccgaattggttaagacgaaaaccattaagagatattgcatcatgaacatccaaatttcaatccctatacctgatatcagcggtgttcgagggattgctctgacaataatcactctgaaggtgaaagggtgaggaaaatatggcgaatacggaaaaagaaaagtttgcccaaattaaccttggtcagcggttggaaggattgaaccatctgtctaagatcagggcaatatactggggagatgatgaaaaagagttaaaacgctttcttgcggacatgcgtgataaaagggattgtcattatgaagagaacaagcgggctttatccgctattttctatttggcaaatattccccgtgctcgccatgacagcgaaatcagccagtttacttctgaggaaaaacactctctgatcaaggcgatgaatcatattaaggttgtagttagtcagtttcccagacatttaaccttacccagttaaccaccttttaaatattttctaatttttttgaacagatggcatttgtacgccagacattcacatttccttaattaaggtggcattgatgaatagtgatcttttcgctcatacatataaacaatcgggcatgtttcagccaaatattccgcagaatgcttcatcagcagagcgtttgttatggcaagttaacgcagaagatcaccaatggcgccaccagtatattggccagatgccggattttctggcgaaacattttagccaccgttatgccgatatctttgcgcaatcagggcgcagggatgctaatgcttacctgagaaaaaccgtcgggcagaatgtattaccgcgattacagttagttaagagcaggtatcaaatcaaacattctgtatcgggcattgctccttttccatttattgaacaattgagcaatattgcgacttatagccgtaaaccgcttttaaagcttgctcatgaaatatccgtgtttattacggagaactatgagcactattcttctatgagtcagagtcactctgttacgaatgactcttctaaccggcaggaagtgcagcaagttcagactgaatcagtgatgaatgaatcagcacgattttctcacatgactgaggtatatcaattaatggcaaagctgactttgcaatgtggcattcatcccccttattggcggcagttcaattatgggcgaaaaacactgtctgttgatctgctttgcgccggcatgttgcgcatgatgtccacacgctggtggtattttcgcttaaaacgcttgcgggatacccaatccgagcatatggcaattgcagttggacaggtacagaacgcggcctcaccttatgtttcactactggctttacgcgaatggctggaacaaaagcggcgcaatcgtgagttttttcagcattttgatttagaaaatgaagcaggagagcggatttcattagctgagaccgtcgttcacagtaatgctaatcctgctattcgtcgctgcgaattaatggtcagaatgcgcggtttcgaagatattgcgaatcagatggggtgtgtaggcgagttttatactatcactgcaccagcaaaataccatgcagtcaggcatagagggggatttgtccaaaaatgggaaggtgcaactccccgtgatactcagcactatttatgcagtgtatgggcaaaatctcgcgcagctattgcccgtgcgggtattaagctgtttggttttcgggttgttgaacctcatcatgatgggacaccacactggcacattttgctctttatgttgccggaacatgcttcacaggtcagaaagatccttgaacactactcttgtcaggaagaaaaggaagagttactgggt

SEQ ID NO: 242 - DNA, 6481 bp, Xenorhabdus sp.
  CDS (2161)..(2541)
acccagtaactcttccttttcttcctgacaagagtagtgttcaaggatctttctgacctgtgaagcatgttccggcaacataaagagcaaaatgtgccagtgtggtgtcccatcatgatgaggttcaacaacccgaaaaccaaacagcttaatacccgcacgggcaatagctgcgcgagattttgcccatacactgcataaatagtgctgagtatcacggggagttgcaccttcccatttttggacaaatccccctctatgcctgactgcatggtattttgctggtgcagtgatagtataaaactcgcctacacaccccatctgattcgcaatatcttcgaaaccgcgcattctgaccattaattcgcagcgacgaatagcaggattagcattactgtgaacgacggtctcagctaatgaaatccgctctcctgcttcattttctaaatcaaaatgctgaaaaaactcacgattgcgccgcttttgttccagccattcgcgtaaagccagtagtgaaacataaggtgaggccgcgttctgtacctgtccaactgcaattgccatatgctcggattgggtatcccgcaagcgttttaagcgaaaataccaccagcgtgtggacatcatgcgcaacatgccggcgcaaagcagatcaacagacagtgtttttcgcccataattgaactgccgccaataagggggatgaatgccacattgcaaagtcagctttgccattaattgatatacctcagtcatgtgagaaaatcgtgctgattcattcatcactgattcagtctgaacttgctgcacttcctgccggttagaagagtcattcgtaacagagtgactctgactcatagaagaatagtgctcatagttctccgtaataaacacggatatttcatgagcaagctttaaaagcggtttacggctataagtcgcaatattgctcaattgttcaataaatggaaaaggagcaatgcccgatacagaatgtttgatttgatacctgctcttaactaactgtaatcgcggtaatacattctgcccgacggtttttctcaggtaagcattagcatccctgcgccctgattgcgcaaagatatcggcataacggtggctaaaatgtttcgccagaaaatccggcatctggccaatatactggtggcgccattggtgatcttctgcgttaacttgccataacaaacgctctgctgatgaagcattctgcggaatatttggctgaaacatgcccgattgtttatatgtatgagcgaaaagatcactattcatcaatgccaccttaattaaggaaatgtgaatgtctggcgtacaaatgccatctgttcaaaaaaattagaaaatatttaaaaggtggttaactgggtaaggttaaatgtctgggaaactgactaactacaaccttaatatgattcatcgccttgatcagagagtgtttttcctcagaagtaaactggctgatttcgctgtcatggcgagcacggggaatatttgccaaatagaaaatagcggataaagcccgcttgttctcttcataatgacaatcccttttatcacgcatgtccgcaagaaagcgttttaactctttttcatcatctccccagtatattgccctgatcttagacagatggttcaatccttccaaccgctgaccaaggttaatttgggcaaacttttctttttccgtattcgccatattttcctcaccctttcaccttcagagtgattattgtcagagcaatccctcgaacaccgctgatatcaggtatagggattgaaatttggatgttcatgatgcaatatctcttaatggttttcgtcttaaccaattcggacccaattaagatctcatttcaagatcttttgcgggataataatatctcttatctatactgtcaatgaaaaataccaatattgagatcaaaatgggggctgatagtggtgggcgaccagctatcgagcgccttgtacgcgcgtatggatttaaatcccgtcaggctctgagtgatcatttaggcgtgtccaaaagcacaatggcaaaccgctatcttcgtgatagctttccggcggattggattattcagtgtaatctcgaaacgggtgcttcactgcttatggctgagtacagggcaaggagagatgtttccaaacggcgaagggatcaaaaaaacagaacgattggaagatatcattgcgccgtcaatctcccgtgtaaaactgtcaggaggtaaactgaatgaggctgatccggttattctggatagtgaattgatttccaaagatctcagagaacctctggtggttgatgatggcatatcctggtatttgcttgatgcacaagaagacactattcaggacggtttatggctggtcgatatcgaaggcatgcacagcatcaagaagatagccaaaatccctgtcagtaaaattcgcgtcagtgataatgatgttacgtttgattgtgctatcagcgatattcaattcattggacgcgtggctttagtgatctccagacaataaccagttacgtaacaatacgttttccatcaaagttatctctgattgccagaataactttgatggcatttatcatgttaaaagaaacataacacataaatctattcggatttatttttccatataaaaggttaaaaccaccgactttagtcggtcagctttagctgcgatactgtgttgcacgagaggtgcaatatggattacagatatggcagccacacggtatttcagattgagtatcattttgtgtgggtaacaaaatacaggcacaaagtgctaataggtgaagttggtttacgggtgagagagttagttcgtcagacctgtgaagcgttcgaaatcaggatagtagaaggggtcgtgagcaaagaccatgtacatatactggtgagttgtcctccgagcttagcgccctcagaaatcatgaggcgaataaagggaaggacagcaagtaagttgtttgaagagtttgctcacttgaaaaagcgttactggggtcagcatttttggggcagaggctatttttgtgcgacggtaggtcagttaacggaagagatgataaaggcctatctggcgcatcattttgaaccgaacccgaatgatcacttcaggctggataattgacgcatcgtttagccgatgcgtatccggactttcagtccgttaatcactaacccaccgactttagtcggtggttgttgagtcactcagtataatttgatcccaaccaacaggtgtagctactacaacaaaactacttgaattaattaggcgaatagccaaccagttatttcccattaaggtatatactgatgttctacctatactagcagggactaacacaggaaaataccagcctttctgtgaccattcaccgaaacgaaaatagagtagtctacctaacacatcacggttacaataaacggagcctccctgtgtaacccaaccagaccatataacagtttcgttattacgacgcctctgcatatatcgtccatcactctctgatttagtataactttcccccctcaatgcgtaattacctgctggttggtaatttccagctggctgatagttcccggcaggttggtagtttccttttggctgaaaacgtccatcgctctctcctttcgaatagctgtaacctgcggtcagataatttccaactggctgatacttagcgttagattcaggtttagtataactatctcccttcagcgcataattgcctttgggttgatattttccatcagattctggctttgtataactttcgcctttcagagcatagttcccggcaggcgcatagttacctttggcttgaaaacgaatatccgattcctctttgctataggcaccgacctcaccagcggtcgggtcagcttttagctctacccatgcattctctgcttttggttcttctttattgttctcaatacgtgattgccagactttctgcttgtgataaaccagtgcccgcagaggataaggttgtgcatcactgctccattgtgctgcaccaaaggcttgcattccccccacggcttcggtgatatcgtgaaaaattccgttcattttctcacgttcgatattcattgcagtaggatcttcgtttggatcaagcccatatccactaccataaccttgagcatatgaaacagtaccatcttctcgaggctgatcagaaatagaaactctatctccctgcgctgcaaagggaactttaaatgtttttgtcatgagattaggctccgaagtagctgttgaagaaattggcatgtgagtagccaaagccaaagatattactgacactactttcgacttggtttcgtgtaacagtgtgctttttcctgattggattatcaggaagcacattatctttttccgtcgccttatcaggtttattatcttgaatattcatatataaccctcatttaatcaacaaagtacattgctaagtaatatgaaggcggttagtacgtctccgccggtaaacattaaatttggtttatcaatacggaagagtctattttggcgtattgcaatgaaattgcttagggattttttacattacattttataacaggagcatgacacggaatgccaagcagagcattaataaaatttattttgttaatgaagattaatgaaacaacaggtgggatttttagctaacgcacctaatagaaatagggccagttgaccctgcataatcatgatggacttattttccaatcgcaaaccaagtcaagtaccatccttttgatgaatatatcgtttgaaaactatccgcttttaaattaaatactggccattgagtatcactcgattcaacagaaccattgtaataaatgttagggcgtgttgacgttttgttttcatcacttactcgacccacatgggtaaccagataatgataaatgccagtgctaatgtgctggcgtaatttctcgctaatttatcgtatcttgtggcgattgcacgaaaatgtttgattctggcaaatgcattttcgactaaatgacgataacgatataaatccttatcccactttttatccgaatttcggctattttttcggtagggaataaccgctgttgcaccttgttcttcaatataagttctcaatgcctgactatcgtatcccttgtcagcaacgacaaaatccgcgggcggtgatggacacccactaaagagtcccattttctctgatgttacattgcacaagataaaaatatatcatcatgaacaataaaactgtctgcttacataaacagtaatacaaggggtgttatgagccatattcaacgggaaacgtcttgctcgaggccgcgattaaattccaacatggatgctgatttatatgggtataaatgggctcgcgataatgtcgggcaatcaggtgcgacaatctatcgattgtatgggaagcccgatgcgccagagttgtttctgaaacatggcaaaggtagcgttgccaatgatgttacagatgagatggtcagactaaactggctgacggaatttatgcctcttccgaccatcaagcattttatccgtactcctgatgatgcatggttactcaccactgcgatccccgggaaaacagcattccaggtattagaagaatatcctgattcaggtgaaaatattgttgatgcgctggcagtgttcctgcgccggttgcattcgattcctgtttgtaattgtccttttaacagcgatcgcgtatttcgtctcgctcaggcgcaatcacgaatgaataacggtttggttgatgcgagtgattttgatgacgagcgtaatggctggcctgttgaacaagtctggaaagaaatgcataagcttttgccattctcaccggattcagtcgtcactcatggtgatttctcacttgataaccttatttttgacgaggggaaattaataggttgtattgatgttggacgagtcggaatcgcagaccgataccaggatcttgccatcctatggaactgcctcggtgagttttctccttcattacagaaacggctttttcaaaaatatggtattgataatcctgatatgaataaattgcagtttcatttgatgctcgatgagtttttctaatcagaattggttaattggttgtaacactggcagagcattacgctgacttgacgggacggcggctttgttgaataaatcgaacttttgctgagttgaaggatcagatcacgcatcttcccgacaacgcagaccgttccgtggcaaagcaaaagttcaaaatcaccaactggtccacctacaacaaagctctcatcaaccgtggctccctcactttctggctggatgatggggcgattcaggcctggtatgagtcagcaacaccttcttcacgaggcagacctcagcgccccccccctgcaggaattcgatatcaagcttatcgataccaccaaac

SEQ ID NO: 243 - DNA, 18688 bp, Xenorhabdus sp.; identical to SEQ ID NO: 99
  CDS (3835)..(4458)

SEQ ID NO: 244 - DNA, 20421 bp, Xenorhabdus sp.; identical to SEQ ID NO: 101
  CDS (2341)..(2775)

SEQ ID NO: 245 - DNA, 20421 bp, Xenorhabdus sp.; identical to SEQ ID NO: 101
  CDS (3058)..(3528)

SEQ ID NO: 246 - DNA, 20421 bp, Xenorhabdus sp.; identical to SEQ ID NO: 101
  CDS (5379)..(5822)

SEQ ID NO: 247 - DNA, 20421 bp, Xenorhabdus sp.; identical to SEQ ID NO: 101
  CDS (5942)..(6154)

SEQ ID NO: 248 - DNA, 20421 bp, Xenorhabdus sp.; identical to SEQ ID NO: 101
  CDS (6187)..(6651)

SEQ ID NO: 249 - DNA, 20421 bp, Xenorhabdus sp.; identical to SEQ ID NO: 101
  CDS (6654)..(7037)

SEQ ID NO: 250 - DNA, 20421 bp, Xenorhabdus sp.; identical to SEQ ID NO: 101
  CDS (7321)..(10698)

SEQ ID NO: 251 - DNA, 20421 bp, Xenorhabdus sp.; identical to SEQ ID NO: 101
  CDS (10743)..(11030)

SEQ ID NO: 252 - DNA, 20421 bp, Xenorhabdus sp.; identical to SEQ ID NO: 101
  CDS (11049)..(11789)

SEQ ID NO: 253 - DNA, 20421 bp, Xenorhabdus sp.; identical to SEQ ID NO: 101
  CDS (11792)..(12493)

SEQ ID NO: 254 - DNA, 20421 bp, Xenorhabdus sp.; identical to SEQ ID NO: 101
  CDS (13112)..(13711)

SEQ ID NO: 255 - DNA, 13449 bp, Xenorhabdus sp.
  CDS (4602)..(5339)
cgagccatgtgctctaaagttgatatttggttgtttataagttggtgcggttgtttttaaagggattttttttaaatgttttttctgaggtgtgatcgcggtaacgaattgaccaaaggagggataggcaggtacaaaaaagccctcgcggtgagggttaaggtcagtttaatttctctataaattttttattagttaggtaagttaaattttcattcaagtaaaggaaggtgtatgtaatatcagctttgttattcgctatcagtatttcatcaattgatgattgcacttcgtgcagttctttagctagcgacttaagccgcttggttggaaggttttttgtgccgtttatgtaactaaaacttttggataactctagctcagctttaatgttattgtgaacatagttacacgcattagaatatgcgcgagataagctgctgactccgcttgtattcttatacttatctttaaattgagtaaataatcttgttattccagtttcatcatcgttcggtttgcctaaagaaaatcgaataatgttttcaattgaagatcttagattaaagtaaaaataacgctcttcattcaaattgatagaggagatgcagcataaaaaatcataaatgacacttaaaagatatctattatttgttaatgttttgttgtgaattattttaagtagtagtgtcttttttacggtagaaattagacagtctctaacgtattggttttcaattgaagtaaattcatttttaaattttttaacggtttctaaaatattatatggatcagttgataaaaaactattcaccccttaaccccttgatccactttgagatgctttctgttgttgtattttttcctttcttaccttttttgttaggtatagacttcaagttattatcttctaacgcctctttttgggggtcgttgattaaaatattaatataaaatacagtgttattttttgcttttattatactttttttatcaagcttattgtatatttctttaatggttctagcgaacattagagttcttgaagccacaacatatcttttgaactcaaacccaaaaatttctttgataaattctgacaattcgctatttgtcttaaataattcttttgaaaatgtgatttgagaaacaaaaccaacaaaaaattcaatagaatcactattttttaattctattagtttatcgtttgttattgccttattttgtttctgcttcatcattgacctcgcttaatttttgctccatttcgtggcagattgcgtctatcataaccctagactgagcataggaggaagcaaaatttccttgttgaccaacctgtaaatctctaacattatggaaatgatttgtgaaaaaatacagctctttaattcccttttctgtctctattgaattttttatttcttttgtcttttttgtcagtctttttgatgttcctgtatatattacaccgagaggctttatgctaagcctttgatctttagctaatttagatattattgatagtaaattactagtacccaaaacggagtattggtctattttcattggcattatatagtggcttgaagccataatagatgattctgtatacatagaaatcgttggtgggcagtcaatcaatatatagtcatatattttttgtaagttgttatcatctataaaattgcgaatgcgtatcaatctggtgttatcaactgtgttatgctcaaacatgatatttatatcaccaggaatgatatctaagttaggatatatatttaaaaggacttcttctttttttagatcgtagtcatcttcgtaaattgatgaatttacttcaaaaattttcttgattgttcttttttcttttaccaaacttaaataatttgagatcaagtctaattttccaataaaggattgggttgcgttgaattgtggatctatatcaataattagcactttcttatctttgtggttggctagatattcaccaacgctaatacacaaagttgttttaccaacgccacctttcatattaataaaactaattacgggagcttgcatagattatctctaattaattaacccaagttagttagccagctatggctccttagctacaacaaaatacattaggttatgttcatcacatcaccatgtaacccatactagatcacctccactaatatgttgatcagaaattgtttaatttgtgagatgagcttggatttagcatgaggccgcaccttgcggcctatggtgttaaccgtgaaacttatatgcgcgtgattgactgactaaaacttttccttgaataaaaagctcgctagcttcatgctcatctaagtaccaagtttcatactttttattgtctgagataatcgccatttttttgtattgtagctgcaacctctttatatatatttgattaccaagaacaaaaatatatattccatccccatcgaaatgcttcactgaaacatcaacaaatatctgatccttagactcaaacgtaccagccatcgaatcaccattaacagcaatcatttttatatgctctgctggtctaccaccaaatagtgacttagcttccccatttgcgtattcaatagaacgaatcgtttcaataaattcatctcgaaccataacgcctcttcccgcacttgcttggacatcaaatacttcaactttgtagtattgggaatcacgtttagattcatcctctatggaggtgcccgcccggattcctaaagtggtgtcagaatcttctctagcaccagaaagccattcagggctaacgccaagagttttagctatatcaatcagttttgttgagcttaaagcatttcctccttccaatttttggatggaggcttgagttacaccaacacgctcacctaacgctttttgcgatagaccagcctgtttgcgtgctttttttaatctttctgccagtgtcgttttcatatctccaaaatacaacttgggttgtgttttttcaaacgaatttagttgttgtcaaataacaactatagttttatattatccataaataacaacggaggttttcatgaaccatgtaatcaaaaccgctattgatgttgttgggtcacagaaaaaactaggcttagcatgcggtataacgcaacaagcggtctataagtggctgcataacaaatcaaaggtttctcctgaacatgttagtcggatcgtaagtgctacaggagggaaggttaaggcgcatcaaattagacctgatcttccgcacttgttcccagtgaagtaaatgtcatcgctctttaacaatctaccgctctccttgaaaacgggagaattatcaacctgattatagtcaggttaacggttatctatctcaggatagttgatctctctttttattttctaaacaaagtctaactgtcatttcactttaggaatgttacggatgggaattgcaggcgggacaaaaagaaaaaccccagttgcacgaacaactagggcctctttatacagtttggagtgttggtatctcgatgaagaagaggtatgcaagcccactctaaagccaccaacaacgaggtaagtatacatgaaaatccgatttaatggtagggaggccgtatgagtacagcggaggtttatgattttaatgcggctagaaaaagcaggagcaacaggatggagaatcagaaatctggtttcatcccgttgtaccggagcatcagaaataaaccgtgggctaaagacgtttttctcagaacactgtgggaaaatttgcttatggatgcagccagacaaccttataccgctaatttcaaagggaaagtgtggcacttacaacccggtcaattagtcgtaacggcggctgatctggggctatctctgtgtgaccgcaacgggaagccaaccagtcgtgatgcagtagaacggatgctggcattttttgtgaaagagggaatgatttcaattgatggggagaagcgaaaaggcagagtgatcactatcacaaattacagtgattatgtcgaaaaaatagacaatttacccgcacataaggccgcacatacagccgcacatgacgaacccagtaataacgcggcctcagagcagccccccgcacatggaggcgcacataaacccgcacatcatgaacaagaatatatatctaataataaattattagatgatcgtccgagaaaatctaaatcgtctggcaaggttaatcctgatgctgctgtcagttcccccaaaggtgataagtggggaactaccgaagacctgactgctgctgagtggatttatcagaaagtcttggttgtcaggccgaataccaaaacacccaattgggcatcatgggccaatgatattcgcttgatgaggcaatccgacaatcgaacccatgcggagatctgccgcctgttcaagtgggcaaatcaggattcattctggtattgcaatatcttgtcacctaccaagttacgggaaaaatgggacacgctcgaagcacagagcacccaacccaaccgtaagcaaattgccaaccctaacccggagtcagttaacaactggaacacggctgaggcatgggaggaatttctatgaatcgcaagctggttaacgccattgctaaccgtgatggtgcggcattatctcgcttgtcagaagaccgtcagccgagtaatcaaccggtagtgaacgagaacgccgaacgattggtcaatgcgttattcaggcaactgaaacaggtatttcctgctgcaatgcagaccaatctacggaacgagtcagacgaggcattggctaaacagcagtggatcgccgcattcgctgagaacggcattcgcaccaaagagcaattatctgcgggaatgcgtcaggctcgtgccagtgagtccccgttctggccttcgccgggtcaattcgtgcaatggtgtaagcagggagaagcattgtcagtcggactgccaaccgaagacgagctttacgagatgttccgtgattattgtaagtatcgtggttggcgtgatgtcgagtggcaatctaacgcctgttactggatggtgacaaatattcacgctgaaatgttacgccagaacttaactgattcggaggttaaaaaactctgtagccgggaattgaaaatcatggctaagcgcattcaggcaggagaaaaaataccagagccagttgttcaaatagagaaaaaatacacgcctaccgactcctatgagtcattaaggcagatttactatctgaaagagatgcttaagaaaactgacttaagctttcatgagtggttatgtgagagcaacagaaaacacaaaaagggttattaacgaatgaaaatcaaaacaagtgagctgacaggtaaggcgttggattgggctgtggccttgtctttaggagcagagatttgtagtaagggtcgttttctggaattaaccagcggatattttgtagctaaaaaaagcaaatattattcatttaaaccctcaatcaattggacacagtgtgggcagttgattgatgattactcaattgatttatcatgtgaaatcgaaacaaccggtaccacttggtcagcgaaagaatattactattcgaacggttggagttatgcagaaacaccgcaaatcgccatatgccgcgctgtagtctcttttaaattaggcgacgaagtttacatccctgatgaactactggaggcagaatgaaataccaaatcacagccaccattgcatttatgagtgccgttatttcgatgtgagattaacacagggacgattaaacaccataaaaaaactcattctatcggacagggatccgccatttaattacatgtttttaaatgtttttttattgtttattacgaaaaaaccgctttacagatccattatttaactaattgaaattaaatgcatttatttaatatacgcattattttatttttgtttgtttttacgttaaaaaaattaaattgcacgttataacgaattgtgatttaattttgcacgattacgtgaaaagagatgtgaacatgactaaattaaaaggcgaaaaatcattactgaaagctaatggtggtaacgcattagcaaaaaaaagaactgctgaagaaagaaaaaaatcatcgatgaaggctgttgctgccaagaaagccaaagcagcgttgcctttggtagtaaatgaaggcccgttagtgataggtgatgttattctcgatgtggctgttttggaaaacggggatagagtcgttgctgcaggatctgtgtttgaggctttaggtagaactagaagaggaagtaaaaaaacgcagtctgaccaaagggttgtcgatggtatttccactccaccatttatggatgctattaatctaataccattcattactcaggaactcattgatgtaatgagtaaagttcaatacaagactgatactggtactgtaaaggaagggtataacgtattgatattgcctttagttggtgacctttatttgaaagctagagaatcaggcgttatcagaacatctgaacaacatgaagtggcgcacaaagctgaagtgttggttaggtctttagcgaaagtggggattatagccttagttgatgaggcaacagggtatcagcgtgataggaaaagggatgcattagcatctctattagaaaaatatatagcaaaagaaatgcgcccatggttaaggacatttcagcttgagttttttgaggagctttgcagagtctggggctataatatgccagaaaaaccaggggcatacccccccgtatttgctcatgttataagagatatcgtttatgacaggttagctcccggggttagaacaaagttacaagaattaaaaaagaaaaatggtgggaaaatgcatcaatggctcactgatcacgcagggtatggagacctaaccagacatctgggagaggttacgatgctattgaggctgacaacagatggcgataaagacggatttctgaatatgctagataaaataaaacctgtcttgacggtagatgacttgatagaggcttcggcatcaaaagataaagcgaaattaatagataaataacattccccagcgtatttttcttttccaaagccgcccagtgcggtttttttgcgtcctaacaatggagagtagaagtatgagtgaagaaattaaaaattgcagtaagtgtaatgggactagaattcgagtaaaccattacgataaacccggattcaaatgtgagctgacctgtttatcatgcggttactatattgggtcaaaattaagcatgaagaatgcgattaatttatggaataaaagagagggctgatggaatgtaattttctcttccatgcatcgacgaaagaattagcctggcaacaactcaaagaagttctcgcaacaaaccaacctcaccgcatcatcatcaagccttggaaaaacaccagaagtcaatctcagaacgcgaccgctcatatgtggtttggcgagattagccgttacgggcacgggaggaggtatgtttaccgaactagagcctgcaatcgaagaggccagatatctgaaaagaaaaacaggccatcaccgctgcattctccaactggagggcggaaggatggttgttagggtacatagaaaatcaatggcgggaattttgatgtatacgacgcgtctcgataaagagcatacagtattgccggaggtaagatgaggggtaaggactcattcccattgttggcttatgtagctaataagaaagacctacgcagagtatggggtaaaggtcgaaaaaccatcactccaagtcaacgtgtttgggtcagatatttaatgatgatatgggggcgaaaatatggagggaatgaatattacggcggagcatctagtgttattggcagattgatgatccgcactgaatggagtgataccgaaggtgaaagaataattaaggtagtaaaagacttgaacaagtcaggctatcaaggtgaagagctatttcaaaaagcccatgaaatattaaaccctaaacaatcattaagtgacatcatcgctctcgccaaagaatcagatgatgctgctttcattgagcaagtcttgaataagacatttaaacgggataatcctattcgggatattgctattaagcgatattgtgaacgcaaatacccgcaaaagattgcccgtgaattatcaagactaaccggttgtagagtggattgggctagaaaacgctctgagtggtcagaagagttactggaagaggaaatgcactatgcaattaagagggaaattagaaaagaaaactgcgataagcatcactaaatacaattattattctaaaataacttgattttgagaaatttaggtgtatatttcatgttatgctcgggcagtaaaaccgaaagcagattaaagcctcactaatcaagtggggctttttcatatctgccaatagtcaacttagagtttacagctcaaagtgaacgttacgatcaatacctatattgtagttaaatcaatatattaagtgttattttaggtgtttcggtcaacatactgatcgggagagaatactcatgaaagatgaattcgaatggcgcaatgagttcgatggattttaattcccccgaattcgagggaatctagtagtctactttttattttcgccttttttcaatttaagcccaaagagaacaagcccaatagccaataagctttcgacagtacccagtaaaaaatcatcatattgaataaatctaatacccgccataaaaagtaatatcacaccggcaagaatgaatttaaatgacttttgtttgagtgggtttttatcgttcggttgcataaaaatccttttatattaaatgttaaaatctagcatgagtatcacatgttcggtcattccgaacaactcaacctgtcggcgaaaccgactagttcaaaattctgcgcgttcgggatgttcagaggaatatccttgttctcccttttaggaacttgaagacctgtttaaggtgcgtccactcaggctaccgtctggatgacagtattgttgaaagaccatgctccccgttctcagacaatagttactatctgaataatggctggcatggcatgcatcagcaccaaacttcaaatatacacttcactgaatcacgcactcgactaacagataaactttatcatgcgctgccctattttaaggcgtattgatcttgttataggttattcaattgagataaaaatccggcctcagtaatattaactggctagttagcagtaggatgaaatgacctttaacgaataataaagtgaggtgtttatgtctgacgttaataagctggataataaaaaatgctcatttaatcctgatcaatacaaatataagaaaagtattgatattgaagttgacgatgtagcacctgtgggttctttcccatgggcggtaattcaagtgtatttgaataaaccagtaaggcgtagcgactgggattctaatatataccttatgcctaaatacgatgattcaggtagtgttacctatctccagtggttggataaagatggaaacatcttaccttggacgcctgagcaggaagatatggtagcttgcgattgggtgttgttgtctaaagtaacaccagttgaatgtatgttgtcttttgatcttacaataggaaccgcgaaagcaacattaccaggatcagaagggcataaagcctggggatatgtgaaagcaggatatgaatgggatgagtatgagtggtcgaaatattttggtgatttgaaagtcattcaaaataaaacaggtattgtggaaacttcgtcattttattggcatacgagcaatgacgatagtgatgatgtgattctttgggtcgctaattctgataccaatcaagaaagcttccagaaattaataacgttctttcaaactaaagaactttatataatagttgatggtgtgacttataatcttggtaaaagtttaaatttaaccactaattcaaaatacgaatatgaaattgacaatgtatataaaaatgatgatgcaaaaaaactaggtaccctattgcaagaaaacgctggtaatacactgcacttttgcatcaattggaaataacctaaatctacatcctaaattcaaggctgcttatgcggccttttttcgtctagaggaataacatgaaagagaccggtataatcaaaaaaaatgatatagcacttgatgacaatgaagagttattgccatattggatttcagttcgatcaagggagctggaaaacaaccaaccttatattatccgggatggattaagtgatgaggatttgtattattggctgagatatcaagcggaaatgttaaaagtgtacattgatgctaaaaatcgaaaagccgcagagttagcgcggcttcgggagattgaagaagccattaagaaatatcaacctctagtggagcaagaaaaattttgttttcctcatgttcccattcttcaggaagaaagttatcaaaagttatagatacatccggcatcatatgtatttcagtatagcgtttggcttcgggagatagatgtttaatctttatctcgtcttgtaaggtcaatattttatcctcaagagacattgatttaattaaatctatgttattccctgttttgataaaaattttgtgattcagcgctttttcaccattaagtggttcaaaaatagtcgcgtacttttctctgtgttgcctaagtatatcctccaaaatgaatatttgaagggtgcgtaaaaacaccttggattgttcggcagattgaccaaatgacgttataagtggattaactttaatgtttctaacagaaaagatacgacggttaatagtattccataggtctgaataattactcatagatatcctttatttgtacagttatttttggcaatgtaacgatagcaaagaaggatatgcgctgccagtcgcttaactggccttttctatttttgccaccgcaatcactcccataacctcagtatctgctattgcggctggcaacctactcactacaactcacaggggcgaccacagactcaccccacggacgcccattgttatgatggggtggaaatatgcgtatgactgaaaaagacacggagttctgggcgcatgtctgggactggttaattatcaatgcaccttttctgggtggtatgtttttagcggcatcaactgcatttgcccgggagaaaagggatggctcaggctggaaagcctcattagtcgaagcttttatctgtgcggcaatcagtgtcgggattattaacgcactggagtatgcacaactaccactgagtctggctcagttcttcggtgtcctgattggctttttgggtacgaagaagattggctcaattcttgatgcggtctttaccttcttcaaaaacaagttcggggtacacagatgaaaatcagcgagagtggattgagcttcatcaaacaatatgaaggcctgaaactgaaagcctatcccgatccggcaacgggtggcattccgtggacgattggctacggtcacacaaaagacgtcaagccggggcaagttatcaccgaacagcaggccgacgcattcctgcatgatgaccttcagcctatctacatcacccttgaatccgccgtgaaggtatcactaagtcagggtcagtttgatgccctgtgttcgttcatcttcaattgtggtgcaggtaactttgttcgttctaccttgctgaagaaactcaatgccggtgactatcaaggtgcagccgatgaatttcagagatggaacaaagcagcaggtaaagtgatgaacggtctgaccaagcgcagggcatctgaacgccagatgtttttatcatgagattcaatctcacctatagcgtgattattgcgctaattattgcttcgggtgcggcttacttctatcgctctggatataagaagcagctcggtatcaataatgaccaagcaaccgaaatccagcaactgaccgaccgaattaactaccagaacacgcacattgacatgctgcatgaactggacagcaaacacactcaggaactcgccaatgccaagactgaaatcgatactcttcgggctgatgttgccgctggtcgtcgtaagctgcgtatcaaggccacctgtcctgtgtctgaagcctcttcccccggcagcgtgggcgatgcaggagccccacaacttaccgaaccagctcgacaagattattaccgtctcagagaaatgatggcggagaacgaacgacagactaagtacttgcaggaatatattagagatcagtgtaaatagagtgtcgcaatcacaaaattaataaacttgcaacatatttatttttaatagtaaaatcaatctattaagcgctatttttaaggtaaattgattgtaagatggcttaaagagcatagaaataatagagaatatttataccttaagatatactccgtcatgaagagttatcaatttgataacgcagattcattggaggtttctatgttttgcgaaataaaagtagcccaaatggctgcgtacctgctatcgaaaggtggtgggcgcatggcatatctgaaactaatgaaactcatgtatctggctgacagagagtatatgaggaaatacggggaatcactcagcggtgaccgtatggtatctatgcctcaggggccagtcctctcatattcactcgatttaatgaatggctctgtgcagggttcagacgatggctggggaaaatggattgccggtgttagtaattatgagctaatcacaaaactcccatcggttgaccgtgatgaatatgatgagttaacagatgctgaaataggtgttttgagtgacgtctattcagaatatggctacatgacaaaatggcagataagggactacactcactcgcattgccctgaatgggtcgatccccatggcagctcgtacccaattgaccccagaagcgtttttcgtgcgctgggaaaatcagatgagacggcgatacaacttgcaaataggatgcgtgaacaaaacgaactggatcgagttattagcggattaacatgacaattgactttgtgcctgttaaaaaaggagcaataatgttgcttacaggcgcaaaggaacacctgttctttatttgtaacgatcctgtattttatcctgcattaacaaaagagtgttttcttgctgtcaacctaactactatttatcgcgatatcgcatatgatgatacgtgtattttaggtattggcgatcatccttttgtaaagcatgacagttatattctttataaaaaagctgaagtattgggagttgatactgtaactagtcaggtcatggctggtgatattagagtgtcagacccatgccgtaatgatgtatttgataggatactgagcggatctttagagca

SEQ ID NO: 256 - DNA, 13449 bp, Xenorhabdus sp.; identical to SEQ ID NO: 255
  CDS (6074)..(7087)

SEQ ID NO: 257 - DNA, 13449 bp, Xenorhabdus sp.; identical to SEQ ID NO: 255
  CDS (11458)..(11892)

SEQ ID NO: 258 - DNA, 13449 bp, Xenorhabdus sp.; identical to SEQ ID NO: 255
  CDS (11910)..(12338)

SEQ ID NO: 259 - DNA, 23596 bp, Xenorhabdus sp.; identical to SEQ ID NO: 105
  CDS (4154)..(4837)

SEQ ID NO: 260 - DNA, 23596 bp, Xenorhabdus sp.
  CDS (23235)..(23405)
ctcctaaagtttgtagaccatcaatcaccggcttaggcctcggagccggacgccagttctggttctggcgaataaaggtgaagtggctgttcagcgttgtaccggcgcctgagctgacggtttccagtgcctgtggctgactgccactgtggctggcagagacggtctgccatgactgattcaggtctaaccggggatggttatcaagaatgaatagtttgcccggttgcagggcgatggcattgccgctgccttgcccggtctctgcgtcgctgcgcagtgcctccaagcggtagcgggtgaaatctttgccatgggcctcatctttgaagcggcccggatagtcgtagtgctcgtagtacagctgttgcaggttttcatcgcgcatctgctgctgaaattctgcgggccatgccgggttcttgaaggtgtaatcctttagctgtacctgagccgggcggacctgagcgctgctggtcaggctgctgactgccggttcgcctaatgtgctgacttcaccgggctgatagggcaggcggatacccggtggtacagagccacagtcatcggcgaagaccagtgtgttacgcccgttactgcactcgaagaagtagaaaatgccctcttctgctgtcagccgttgcagaaaatcaaaatcactttcctgatactgtacgcagaattcgcgctccggatgcgggtggcgcaggttgaacaccacgtcgcggatgctgtgctctttgaggatggtggtgatgatattggcaatgttgagctgctggaagatgcgcgagttctggcgtaaggtcgtgcgccacaggtcagggcggatgctcatccggtaagtggtctggtgcagaccagtattgccctgttcaaagcgggtgacgatgccggtgatgctgcgttgttcgatgccgttttgcagaatagtcagtgttgctgtgcggtcaagtaccagcgggaagccaatagcagggtcggcgctggccagccctacttccagtgcaaaggggtgcgagaaatgttcgttcaggctgaagtcggtgacgacaaaagtctgtgccggtaatccgcccgctgtcagggtgaatagcaggccgctggggtcggcaccacccagtaatcccaatacctgaccagctttctgtaacagcttgcctgccgatgagttccccatggcagcctgtgctgacatcccggctttttgtcctgcgccaccggcaaagccgccaccattgatgaggctaccggcaccggtagcagtactgcctgctgcgcccgccaacaagactttggcctgtttcgccatttgcgcagtttgctgcccttgtcccaacagcgattttcctttcttcaatgtggtggcgtgttttttcactgacatctatttctgtctccctgagatgatggaatgttatgcaataggctatcccgcctgataacaacgcaggccataacattcgggcacaagcgttaaatttaactcagattgtctccgacaaatgggttaattaaggatgtaataagctgctttacgctaatttgaagagacgttgttatctgaatatatcggttgaatcgtgataaataagagaaggcaataataaataacgaatgggtaaagaccaaatgaaatcaagtggaataaaaaacggcatccgacaatgacagtgtaaaaaattaaaatgattgccgttttagaataacatgttaaattaacgtatatagttagcgcatcaggctattagatgtttatccataaaagataggtttttcgtaacgtcatgagataaaacttaactaccacctactgaagtaggtgggttagcgcacttcggtgctgacgactgaaagtcgtcgaaccacgcacctcgtaaacgcgcgtaggtcaaaacattaaagtcaaagtcaccgtctaaagacggtggttttaacctgtcatatggaaaaataaaaaaattaataatatatttgccaaggcatgatcatttctatttcgtgaaatagatcaaaaaatttattgagaaattagttttatattttctgttttaaaaaggagcaataaaaaatgattgattgacattaaatagataaatgccagtcattcaaataaacagaaagtgaaataatttccaaacgaaaataaactgattaatattttctacatttaacacaatattaattgtgcatagatagcggcatttctttgtgggaattccccatccctgctcgtgatatcggcacccgaaaatttcggctgttggacaagacggtattgaacaggcgtttaataaatagccacaaaacatcatatgtgctaatgtgggtttgtgggaaacctatgaggaattaattatgagtcgcttaactatcgatataaccgatcagcaacacaaaagtttgaaagcattggctgccttgcaaggtaagacaatcaagcaatatacgcttgaacgtttgttccctgacacgactaatgatgatcaggcatggcaagaattaaaagccttgttgaatacacgaatcaatgaggggacagaaggcaagttatctgggaaaagcgttgatgaaatccttaatgaagaacttgctgagaacggacgcgattaatggattatatactgacggaagctgcagaagctgatttacgctcaattattcgttacacacgtaaacaatggggtaatgcacagacgcgccgctacatcactaaccttaagcaaggtattgagcgtctcgcttgcggaaatggatctttcaaggacatgagcgaactctacccggcattgcgcatggcacgttgtgaatatcattatgtgttttgtttgccacgagaaagtgctccggcattaatcgtggcaatttttcatgaaaagatggatttattgacacgccttactgataggcttttgtaattttgttgttttttttaagtcacgaccattatcaggcgttaatcagtgtcaacgtatatcagggctagacaccgttatcaaattaagtgggacggatttgggacaggtatcgaaaggcaaccgcacgtaactacgggtaactttcggtaaggtgggacgtgtgagcacagataaatgcggtaattcgttgatttaaaagatgggcttactctcttctaagccgtaggtcacaggttcgaatcctgtatggcgtaccatccattcatatcgtaacgtcttccgaagtctacaaaaccccagtaaatacgcagtgttagcctttttccgttctcctatagtctagtaaggtatgttgaaatctacgatcttataggggtatatttaggggtacgttcaggttcaatgaagtgagatacccccctatgaagttaacagcccgacaggtggacactgcaaagccgaaagaaaaaccctacaaacttgccgatggtggcggactctatctattggttaaccctaatggctctcgctattggcggttaaagtaccggattgcaggcaaggaaaaattgctcgcattaggggtatatcctgaaatctcccttgccgaagctcgaaccaagagaaatgatgcgcggcggacgctatcggatggtaatgatccgatagaagaaaagagagcagaaaaggcagccaaagtatttgcggtcagcaatagttttgagtccatcgctattgagtggcatgaatataaacgcccaaactggtcacaagggtatgccgaagatattctggaatatctgaaaaaagacatcttcccgtatattggtaaacgtgctgttaccgagattaaacctgctgaaatgctagctgtgctgcgaaaaatggagcaacgcggtgttttggataaactgaagaaaaccagacaggcctgtcggcaaatcttcacctatgcggttattaccggacgggctgaattcaatcccgttaccgatcttgccagtgcactcaaagcgcccaagcaaaaacacttcccacaccttttagccgaccaactgcatgattttcttatcgccctgagtggttatagtggaagtccggttactcaatcagcaacacgtatgctgatgctgaccggagtacgcaccattgagctgagagaatcggaatggactgaattcgatttcgataacgatctctggcaaatccctgccgaacgaatgaaaatgcgtcgccctcatattgtcccactgtcaaatcaggttaaaaccatccttattaaactgcatgaaattacagggcgcgggaaatacgttttccccggtcgtaacgatgcgggtaagccgatgagtgaagccgctatcaatcaggttattaagcgaattggttatgatggacgggcaacaggccacggctttcgccataccatgagtaccatcctgcacgagcaaggctataacacagcttggattgaaacccagcttgctcatgttgacaagaacagcattcggggtacttacaaccacgctcagtatctggatggtcgtcgggaaatgctgcaatggtatgcggatcatatggagatgctggaacgaggcgaaaatgtgctgatcggaaaatttggcaaaagggcgtaaagatgtggttatttttcatgctgttgtgctcgtggcacacgcgcctgtttttcatacaacatacaaataacaagtcgaatttcctataaaaaataaattcaacaaatcgtaaaaacaattaacgctgttcatttagtcttgctttttaaataatccgcctgtcatcaaacaacgtccacgatgagcgctcaaggactcggtaacaggagaaaaaatatgacaatgatagtgtcgaaggaaaaccttattcgtttgccggaagttcaacgcagaacgggttatagcaaagcgtggatctataaactgattagtgccggagaattcccgaaacaagtcaaactcggctcccgctccatcgcctttgttgaatcagaaattgataactggattgcgcagcggatcgcggaatcacgagcggcataacatagaaaagaacatgacatagaaacgtaatataaaaacaacgccccagagtgcgcgaacacatctgaggcgtctgaccacaacgtaaaggagacttacgatatggctgatacacagtctaaccaaactcgccctaaatttacatcttcagatatcaccggcaaccaaaaactgcttgacctgatccagaccgtgaaaaaatccgctatgtatcattgggaaaacttattgcctgcctgtggcatcgatatccctgtaaagggaaaacatggtgcttgtcctgtttgcggtggcaccgaccgctttcactttattgatgatcaccatcatggcaactggcattgccgccaatgtgattatccaaactatggtgatggactggatttagtggcaaaaaccaaaggaatttccatcactgaggcagcaaaaatcattgcaggcgtactggcattgcctttgccagaacccaagcccgccagagaaaccattcaaactacgcagtcaattgccggaaaagtggcatcactaatggcacaaactgtcgctggtcaatcgccctatctggctgcaaaagggctggattttcctaatcagcggctattgctcaataattcgactttgttggcactgacaacactggataaaaaagtaacaggtgcgcagattatcacacccaatggagagaaaaaattactgtctggcagccagaaaaaaggtgcatttatttctgtctcagaactggaagatcatcccgatacagtgctcattaccgaaggttacgccacagcgctcacagctaacttgctctataaaggtactgttctggcagcattagatgcaggtaatttgtattctgtcgctaaagcgattcgggaacgttggtcagacacaaaaattattttggcagcagataatgactggcatcatcccgacgaactggataagcacggcaaactcaaagtaaatatcggcaagatttcagcagaaaaagcagctcttgcggttaagggttgggtcacgttaccaccgacagagtatacagccgactgggacgattaccgccaacaacatgatgtggaaagggcaaagctggccttttctcaggggctttatcaacccgtaccaacaaagaaaaaagcaaccactcagcccaatgataccgaatcttccaagctgacattatgccaaatgggagccagccagcgcggagaagtattactggcacgttatgacggggatttagcactggatggggcttcggaaactgttcatcactatgacggcattgtctggcgtccggttagtgaccgcgatttaaaacgggaaatggtggctgctttcatggaagagaaactgccgtattcaccgcatggtatcagttctgccgtagatgccctgaaattgcagcttcccatgatgcagctaccagaacgtcacttaattgggttcagcaacggcgtgtttgacctgaaagcctgccagttccgacctcatcgtaaaagtgactggttactgcttgccaatgatgttgcgtttaatcctcctgtttcgggggagactctgaaaaatcatgcaccgcagttctggcgctggcttaaccgggcaacagccaactgtgagaacaaatttgatcgggtactggcagcgctgtttatggtgctggcgaaccgttacgactggcagttgtttctggaaatcaccggtgccggaggcagtggcaaaagcatctttgctgaaatctgttcaatgctggcaggcaaaggcaacactgtttctgcgagtatggccgcgctggaaaacccgcgggaacgggcgctgattgtgggatattcgttgattatcctgccagatcaaactcgctatgtgggagatggctccggcatcaaagccattacaggcggggatgaagtcgctatcgacccgaagcataaacaaccttattcaacccgcattcctgcggtggtcttggcggtaaacaataatgctatgagtttcagtgatcgcagtggtggcgtatcacggcgtcgggttattttcaacttttccgaagttgtgccggaaaatgaacgtgacccattattgcgagataaaatcgcaacagagttgcctgtgattatccggcatctgttatatcgattcgctgatccacaggttgcgaggcgtttactggctgagcaacagaaatcagatgaagcgctggatatcaaacgcggtacagatccattagtcgatttttgcggctacctgattgcatctaatgaaactgacggcctgttaatcggtaatgcggaaattgtgccattcaatccccgtaagtacctttatcatgcctaccttgcttatatgaaaggcaacaatctgaataaacccgtttccgtaacccgctttggtatggatatgccgggcgcactggcagagtatgggcagcattacctgcgtaagaaaagcaaatatggcattcgcagtaatctgagcctgaatatcgataccgccattgagtggatgccaaaactgacaaggaatgaccagctagaagaataattttttctttattacagatatttttcaaagaaatataaaaaagtgttcaccactgtttaccttataatttaaacatatatatcaatatattataggatgaatagttatttttaaactgttcacaagtcttcatcactattcaccttttcctgatttgaaggtgaatggttggtgaagagtggtgatgagtttgatttcaactcatcatcatttaacaatatgaatttaaatgaaaatcatcaaaggtgaatagggtgaacagttttattcctaattctttaatagggtaggctgtgaaaatgttttttctggcaggcatagtgtttttcaaagtctctggtttgtctggttaatgtattagccggacaaatcagagaagacaagcgtagcgcgtcagtgcaattttaatctattgtgttacgtgaaatttgaatgatgtaattaactgattttatttaagaggagaagttaatcacaatttccctgctgaacttttattcatggttgtatgtaaaaacaattctattatattctgcccatattgtactaaaagcatgcaacaatagttttattgtgaaattatttttaccattcaggcagtaaataaggattgatacaccaaaagattacggagagccaaaatgagcagggtaatagataaaatcaatcaactacttgatcgctcaggtttaatattcacactgattacggaaaatttaccagaacaaactttcgctgttgtcgatttttctctgaatgaagcgctatcaactccttttcggctggaagcgacactgacttgtcagactgctgacattaacttcgctgatgttttggatagcagcgccgcttttgctgtacaccgtaacgggcgaattgaacggcaagtcacgggcatggtgacacatttttcactgcaatcaaccgggcgccatcaaagccactaccatatcacccttcaacctcctttatggcgtgcatcattacgggtcaatagccggattttccaaaatcagtccgttgtggatattgtggaaagcctgctcagagaaaatggggtacgaaactttttctttgcgcttggttacaaacatccaccaagggaattctgtgttcagtacgatgaaagcgatctggcatttatccagcgcttactggctgatgagggcattttttactatttcactttcgatcaggatcagcacgagcaacgcattgtgtttcacgactcctgcctgtctcttaatcaggtgattaccgtcccctaccgcccggaaaccgatgtaacgggagaaacaacctgtatccgccaatttagctggtcagagcgcgttggtgtggccaatattacaactaaagacagaacgtttaagaatccacgctggaaccgagaattctggtatgaagggcgcaatcttgataatcagcgaatactgaacagctaccattattatgattttcccagccgctataaagatgacgatctgggacaacaggcaagccaatatcgtctggaatacctgcgccgggacactcagcttggtaacggtcagggtgactgttttgccatgtggccggggcagttatttaacctgatggatcaccccagagaggtttttaacgaccaatggcagttaattcagataacccattcaggtcaacagccacaagccgatgaaacccagtcaggtggtagcggtacatggctgtctaatcaatttacctttaccacccgaaaaaattcttatcggccttccccctacccaaaaccccaaatggaagaaccacatattgccacggttgttgggccggagggcgaagaaattttctgtgacgaacacgggcgcgttcgtattcagtttgactgggacagatacggtgaatttaatgaccgcagttcttgctgggtacgggtcagtcaggcgtgggcagggcaattaatgggtatgattgccattccacgtattggacacgaagttttggtggattttgttcacggtgaccccgatcagccgattattgtcggacgggcttatcacgccaataatattcccccaaaccgcctgccgatggcaaaaacccagatgtctatccgctcgaaaacccataaaggtgaaggatttaatgaactgcgctttgaagatgaaaaagatcgcgaagaagtctttattcatgctcagaaaaacctcgccattcaggtgcgtaattcacgcggggaacgcattaactatgaccgcacaaccagcattggtcatgacgatgaactggtgatagccaataaccgcaaggtgaccgatagaaggtcaacaggatcataaaaccacgggcaattatattgagcagattgccggtgcccgttcgttacagttaaaaggcgatctggctgaaaaaattcagggggtagtcagtgtggatgcacagggcgatctcaccctgcaaagtggcagcaaaatcacattaaatgtcggtggaaattttgttgtgcttcacgcgggcgggattgatattaaaggcgcggcgattaacctgaactccggtggcagccccggcgatttactggcaccagctaaccccgccatcctgctggccgcagcaagcgaaggctccatgtttgtcgcccactgcccaatgaaagagaaggagaagcccgaatgagtcaggaaaaactctacgcccttattgatggtgcggcggaatctgatctgtttttgatgctggaacgttatgacccaccttccgcctgtctttatggtgagcctctccagccagaactggtggaaatcgccccttatctggtacaggtcacggaagaggttaaaatctggctggagtgtcgcagaaccccgtggggtattttcgtccacagtgcagcggacatgaaaaccgtgcggcagcatttacgaaaatacctgcaagttctgcttccccaacaggaaaaaccggtctttttccgtttttatgatccacgtaatatctgggattttctcggtgtattgagtgactgggagctgcattgttttttagggccgatcacacggataacaacactgtacctcgaagaagagcgcacggataactttgtgaaaatcagagagccttttcctgttggtgcaaccagcaagcgcaaaatgctcgctatcacagaaattcagctagaaaagatacaagccatttttacagaacggtatattgaaaaattagccggatttattcctgaatggctggaaaaagctgattttgattttatccctcatatcgacacggtggaatgcgcccggaagttttttgactggttcggtcaaaacggtattacggacgaccgtaatgttcgtgggctgctccagcttttcatcatccgacattatctcaccatcgatgatttgcccgcagctctatatgcccaattaactgaatacagccagccggggcatatgcgggcggaaagtgtattaattcaagaaatgggtcaggtgcctctttaaccaaaacagggaacaacaagatgggtaatgcagttaaagtgggtgatattggtacaaagcacggtaattgtcctgcaaccccggttattgaaggtgccagtaccgttaaagttgatggtgtctatctcgcacggcaaggtgatgcaatggcttctcatttgtcacattcacgggcaatagccggaggttcctgctccgtatttattgagggaaaacctgatgccagaacgggagatccggtggattgtggcggtgtcgtgattgccggtggcagtgtgaatattggttaaggagataaaaaatgacgtcaacaaaggcaggttcagcaatatgtggttgtgataaccccgacgattgcacacataaaattgatataaaattgggtgataaaactattagttataaacagtcttggattcaaaggcattttttctatgtacttgattcaccattgacaaccttcaagcatgctaatgagttacctaaggaagaaaaaccaaatgtagctgttgagttaagttcgatcagtaaaggttgtatctcacataaccaagattgtccaattggtaacgtatttgatgaaaaaaatctgcccttcgctcaattttcgcctaaaaaaccttataaaggaaaactggtttaccacaaatctagtaaagattttttagaaattgaaaaagagccattttctgttttgggacgttttctaaaaaaggattttcataccaatatcgaaaaacagcattatgccatcagagtcgatgaatgttcaggcaagccattaataaaaaaagaatattctggaatagaaaaaatactattcatgatattaggcgaaaaaactgtcctcagttcgaatatttatttagtgactaaagaaaaacaggagttcgatctggtttttaaagctaaaaaagacgttgaagaattcactgatcaacaaagaagaaggcaacaaattcaaactaatagaaaacggggactagagcacagaagacaccgtggctggactcaagatacaactcgttatcaagtaaaaaatacattatctgtagaggggacaataaaaattcaaaagggtgcagctagtcgtacatgggcgcataccttgcaaaaagaatttaagaagaataaaaacgagataggaccaatagaagcatgtgtgcaaagtattggtaaaataacgaatgttttatcagtagggcatgatagtgacaagttcaagatcttaaaagtggatcttatatatccttcaattaagcttcatggtgaatatgaactttctcacaataatgactttcaattctattccaaatttagtgcagatatagcagcagcacctttaattggcttggagttacgcgctgatgttcttcaaatagtagctgcttattttaaagcagaaagagcactttctgcacttcgtgaagcaggacaagtttacgaagaaaaagttaaaaaaggtgaaaatggggcatttgtcggtgcgcagttggatctcgttttaacaggagagttgaatgttaaatttggctgggaatctgatgataagggagactggtcattcaaaaaagataatatattagaaactggattttctattaaagctgacactaatattcgtggtggtgtaagctattatgctatctatggatatgtagatgcgaccgctaaagcagaggcaaaactactagctgcactggagtcaaaacccaaaagtcttgatttggtgttttatcatgatggaattaaagcaatggtagatttgagttttgcttttggtatagcaaaagaagagtcgattgaagatgataaaattaaaacaactgcaaatatagagaaaaaaggaggaacagcgcgtgaatgggtatttcaaaaacccctttctaaagataaatcgtcctatcggatttctttggggtagtctcttattttgttcttatatgttacttagtaactctgcatcaggaaaatcaaatatggaatataaatatttgctgtcattaaatacacatcaaagcctctgtgtagtacgcattaacggcatgacagctatggataatttagactctccaaatgggactcaatccagtggaataaactcaactgcttttttagagaatggctccaattcgatagagttactatttggaagtcgatcgtttgaagaagacctaaaacctgaatctcgatgtgaagtaacattaaaaaaagtgtcggcttatgataaaaacgatgaagttattagtcgtatcaaattaatggttgataaagacggtaaccccgtaactgaagaatcactcaaaaatacccctaataaagaagctggctttgattttactggaatgtctaaaataccagcagaagagggtttattttctgctaaaaaaaattattcaattagtggattaccagagtggatgtggacaaaagcccggccagtcacagaaaaagatttgccaatgataaaatctttttatcaagacataattaacttatttgctcaaaaagaactcgatagaatctggaatataagtaaaccagcgtgggaagaatgggctattgctgataacaacaatggtaaattttttttccattcgatgagatttgaagataaaatcgatagtgataaatatacagttagaacaacgcctgaatggaaaaaattcaaattagttagttataataatggtcgtctatttcgcttggaggttggtgctcatggccgatcacctatattgtttgataataaaattaccggtaatactgcgacttacagtccttacctgtcaattataaatggtaaagttgttatagctagataattaatttttagggttaaccagttgttttttgacttggttaaccaaatgataattaagtaaatgcatttcttaacggagatattttaaataacatcctcaccaagctaattatattaaaaacaacataataagatgcattgaaaaataaaaatgcatataacagaatttatctttatgatatttaattattttcactccataagcgaaaaaatataataaattaattacttgtggtttaaattataccaaagtaatgacatgaaaattatagagcatgtaaaaaaatgaaatgtttaaaatgagtaataagtatgagcataacctataccgtgaatttgattatgcactatgtaatatgtaaggaagagttggcataaatggaaaaatatggaatttccatataaatggtggggtataaccattcttgaaaagaagaaggatattatttatctaggttgtaactcaaaaaaatgtgatcctttctttatttttcctttcggtgactgaaatctatagtaataatagttgataaaataatcaatcttcattgctataactaaaaaaatcagttagtctagatcggttaaaggcgctttttagcgactataaaaactcccgtagcctgaaagggagagcaaaattgcggtacatctgcgcacttttggaagcagatatcatcaaacataaaccccttgtttgacgatgaaagtcccttaaactaaaaaagacctcaaaagggtgtttttatcttgtcacccaagtgtattgaacgttgggtcatgcacttatttttcatatcaacatcagactctgcctccgtttggctttggccttatgagcgtgttttgatcccatttcatgtcataaacaccgcgtggatttcacgcatctggttcatattcttactgtctctgcttgaatgattcagcggacagattttctacacacaaacaattaactcatcgctaccgtttgacatcgagccttgcaccgttttgctgtgcctatcggcatttcaacgcccgcacgacttttgctgactatttgctgaatttaaggcgtcacttttggctggtttatcgctgaaagtgacgccgccgccaaagagcactacaactcttacaggctcaggcctgcttcaccccgcagtgaatctgacagtgcatttttagattgaaaaaggagaacttgacgatatcgaggctggcttttttgccggtggggatgacctgtttatacaggcggcagtaccgcgtactcaaccgataccccgcaatacctcaacctgcgttcactctggcgcacagatatccgtcaagggcaaggcagatactttttgttttgccgcactgacgcgcgccagagatcgcatatcgttaggtatcaatagggaaaatgagatgagtcgattgattaaggaattaaaattttttgctcggaaaggtggaggtagtcataagacctgtcacgaccgtattcggatcgccgggcgtttgggggcgctgttattgagcctgaatattcaggtgaaaagtctcagccatttgaaagctaaacatgtggaacattacgttgatgcccgtttatctcagggaattgccaaacgaacagtgcaaaatgaaatggctgcgctacgcaatattttccgcatggcaggcagggagaaactggaaacttcacctcgtttgagcaatcaggcattggggttaaatggaaccaaccgcgccggaacgaagcaggcgatccctgatgctacgtttcagatggtttatcagaaggcgcttgaacgtgatgccggatttgccatcgcactgaaacttgcccgtttgatgggattacgttctcaggaagcggtacaatgcagtgcttcattgaaaagctggcgtaaacagttggagaaatccgagccgaaactgcatgttgtcttcggtacaaaaggcggccgaccaagacaaactcgtgtattggatgttgcagcagtaaaagaagccgtcgagcaagcaattgcttttgcagaacaacgtggcggcaaactgattgataagcctgatctcaaacaggccatgaactactggcggacatataccacaaggattggtttaaccggttgccattctccccacagtttgcgctatgcgtgggcacaggatgcccttaatttttatcaacaaaatggttttagccgtcaagaagcacgagcattggtttcaatggatctggggcatggtgatggtcgtgggcgttatgttgagcgggtttatagttgttaaacttagtggttcggttattgtatcaggtaaaacaatcagttaaagtattcctgccattggcaaaatctgatggtcaaggcgtcgcggccttgtgtaactatacactggtaggaagtttctaccagtgcgtctgctatcaccctttcaatggtggttcaggcagggaaggcttcggccttgccggtcatagttacccggtccgcgaaccctgtctgaatcgccaccatcaatattaattaatggaaggggtaacaggaatgaataacaacattagaaatgactggcaccaagccgatataattgctgcattgcgtaaacgtggtacaaccttagcggctgtttctcgtgaagcgggactcagttcatcgacactggcaaatgctttcagcagaccatggccgaaaggtgaatggataattgcgaattatcttggtatacatccctcagaaatttggccgagccgttattttgatagttacggccagcttattgaacgcaaggttcgcaaagtttcacaactagattagataagtatatcatagtggggttgtcaccccacctatattcttaacctttcaaataaccaaacactagtgattttttgttttcttttttattttaatgaagctaatttaagttaaattaccattcattagtaagtcaaatgccaaaaataattttcttaattgtgattttaaagaactattttcagtttctttaaataatgaaaatgcttcttcttgaatgtatttttttagctcaaatttatctatgtatattatatttttaattattatagataattctttatacttcgttatttcttcttttttaatagattcaatggagttgaatttcttttctgagtataatttatccagttcgattgttttaattatgtcgccaatatttccatgttcttttattcttgtttctattttatttatttcattttttgataatccaatgctatgaaagtcacatttctgtattaatttagaaaaaggaatccttttgtttgaagctaagccagtgataaaatcaatagctgcattatttggtattccatttttttcaaaaatataatcttccaagtattgaatttcttttaccctaatgtaaacaaattgtttgtcccctaaggcgacaactaaattcttactaagattaggattcttatctaattcatccaaagtagaaggtgtaaccaatacgctacctaaatttcctttttccccctcatctaaaataagcttttttatagctttctgatacctaagaacatcatatggaggtaatccttcatctattttacttatttcatcatatatttttttataattatctgtctctatggatgtatatgttatttgtgatttatcatctgttctatgtgttttgaaagtattcatttcattctctttgaattcaatgaaaataattctttccgcagactttcttttatcttcttttggtagctgtgaagaagaatcagctagtaatttttttacatttctatctgttagtgagtatccaataaaaattattgaactttttatcatgcttgataatattttggcactgattagaatggatgattcattatcatatttttcgtaatctgaactattaattactattgatttaggtgatcctatatccccgtgtatcttatataattcactccatccaatagtgtcatcaaaaaatccttcattaccaatatacactttaggttcaacattttgttcggataaaagtgtttcaataaatgagtcgtaatttgttgttatgatcatctttgcattttttaagaattttttaaatgattcaaattcctctttatcaatatttgactttaattcattttggttgaatctctggcataaggaatatttaaatggtgatataccctcatcaaaaactctttttggtgtcaatccttctaatgaaatcttacctgctttaaataatttattatattctttttcaatattatttgctgcatcagaatataccttgtgatctaaatctaactcatcgttttcttctatataattgtcttttatttctgataattaattataaaagttgacattgttattatcaattttgttccaatactcttccaataaatcttgccatgttggagagttttccaaatatcttttagacatcccagacccaataaatactattgggtagtttttgaaatcaaaaatagtgtcatacattttaaatccttctgtgttagattagcttaatgtagatgtactgcatataataaatcacagtaaatcattttttctaatgattttatcatggtttatgtagtttatgagatgtgtaaataatttttaggctttggaacatcatttaaaccagttttagtagtagcatggtcatatgaggtatcgagatgtgtaggcttcttttggagttattatttcatttttagcaatatgtattttattgatgatatttttgcaatgcaaggcctactttcacttgagccaaccagaaagaaatctgacagacagaggcaaaataatatgggggtattatagggggtatggtagaaaattgaactaaataaaatcatttaaaaacaatgtaataaatgattttatcgaatcctgtagggctttaaaatcaatatgttacgccaatctcagacccgcttgatttttcccttgtgtcgtatttgtgtcgttatcttcaaaaagcacatcaattttgcaagcatgttcacttaaatggttgggtgctaaatgtgcatatcttctaaccatttcgatagattcccatccccccatttcttgaagtgctgaaaggggaacccctgattgtatcaaccagcttgcccaagtgtggcgtaggtcatgaaaacggaagtcttctattcctgcttttttaaggccaatattccaggcactattatcatcaaccctcatttttctcactgctggggttaatgttccgtctggtcggtgcttggctttggtatgcacaaagacccaccttgagtgcttgcctatctgatcccgtaacacccggcatgcggtatcattcagagctacacctatcgctttcccggctttggcgttctctggatttatccatgccacttttctttgcatatcgacctgctgccactccagatcgatgatgttagaacgccgaagtcctgttgctaacgcaaagataacaatcggcttgatactttcaggcatacactcaatgagccttgccgcttcatcttttgtcagccatcttatgcgcttacttactggcttcttcgttttgataacaggcgctgacttaatccagttccattcattagcggctgggataccgagctgctcgtgcgtgaacgctttaatgtgttgaaccatattatctgggcgaaaccgtctggcccgtggcgcaggcagaataaagaaagcctgcggatgtattttccggccacggaacgtattatttttgccgaacattatcaaggcccctatcacccgaaaggcgatggctattcccgccaatgccgggagctgaaacagtcggtatttaagccgctaatcgattattttcgtgatgcccggaaagcgttaggcgtcacggcaaaagaaattcacgctgccaccggaaaacagatggcgagtcattggttcagcgacagccagtggcagttacccaatgaaggggactatcaaaaactgcaggtgttgtttgaccgtatcgctaaagaaaagcaccagcgtggcgaactgaataagccataccctgaattggttgaatctcatcttaccctgtcgcgtcagtatgacgaattacggcaggaatacggtttaatgcgccgttcgttcacggtcacggctgatgtgccttataccgatgtctggcagtttgcgcctgtacagtattatccgggcaagcatccctgtgaaaagcctgctgatttgatgacgcatattattcagtccagtagtcgggaaggggatctggtcgctgatttctttatgggttccggggcgacactgaaagcggctttgaaattgaatcgccgtgtgttgggtgtggaactggaagaggaacggtttaagcaaaccgagcaagagataaacgaaatattttctgtcagtagtaaactttgagtttacaactcactgaatcacgcactcgattaacagacagattttataatgagctgccctactttaaggcgtattgattttgttacaggttattcaattgagataaaaatccggcctcagtaatattaactggctagttagcagtaggatgaaatgacctttaacgaataataaagtgaggtgtttatgtctgatgttaataagctggatgataaacaatgtccgtttgatcctgacaaatataaggttgcgatttcaaatgatacagttgcacctatcggttcatatccatgggctatgattcaagtctacttagggaagaaaatgtatcgcagtaattggaattttccttccgagtatgtacgccttgcaggtgtgcctgataatgatccttacattgagaagtatacaccaaataatccagcccattggcaaccaacacaggaagatatgctagcttgtgattggatagattgcttattatctttcgatatgactatagcaactgctaaagcaacattagcaggctcagaagggcatacagcttggggatatgtaaaagctgggtatgagtgggatgagcatgagtggtcgaaatcgttcggtgatttgaacgttatccaaaataagaccgatattgtagtaacatcgtcattttattggcatacagtcagcggcagcaataagaatgtgattctttggatcgctaatcctaatgctaatcaagaaaaatttgcagaattattaggtttcttcctgactaaagaactttatataacagttaatggggtgacttataatcttggtaaaagtttaagtttgaccattgattcaaaatatgaatatgaaattgacaatgcgtatgacaatgatgatgcacaaaaattaggtgttattttacaacaaaacgtaggtaacacacttcgtttctattgtggttggatatagatttatctgaatctacacactgaatttaaggctacgcaatgcgcagcctttttgtatttcagccaaagtgaacgacccctgagcggggccgctggattatggaatgagttgttctggagtgcagttgtatatcggcctgatttcaggacgctgttgttgggaagcctgccacaactcatattgggattgcatattcgtccacatttcggcactggttcccaatgcggcttctaaacggagtgccatatctgctgatatgcctgtgttgccatttaaaatacgggataacgctacacgggttactcccagtgcttttgctgcttctgtaacagaaatgtcgcctaaatattcgcgcaaaacaaggccgggatgggcggggttatgcattctgttcatggtgttattcctcagtgataatcttgataattaaccaaaatggcatcttcgccttcaaagcgaaatgtcatccgccagtttccgttgacagaaatggcccagtggccttttaaatcagcgccttttaatggatgtaatttccagccgggtgcgttcatgtcatcgggttttttggcggcatttaacgcggtcaattgaatattcagttttacagcgtgatttgtttgaatgcccgctgtagagcctgttttaaagaatttttctaaccctttatgtttaaaacttttgatcattgtgtaacgccgtatattgtatagatacagtatacatttgatgtatgcaatgtcaaccgaatttgccaccgcaatcactcacagaacctcagtatctcctattgcggctggcaccctattaactcactagcgaggaaaatgatgaagattgatgtggcttttcctaagatgaattcgaggacgaaatttaagaagaatgaaggcataacacagcaaaatatattgtctttctcgtctgagcgagtcgcagtgctagaagctgatgtgtatgtttatccgcaagaaaacgatgaaatgccttctaataaaatcccgcacgtaaaactcttttatgttgagcaatacaatgaaaaatcgacattttcagaatttgaattcagagcaacggagtgggctaagagtcagtcgttagaatttgctaaccatatgatgcaaataactcactagtgaggaaaatgatggaaaagcgtattgaagaactggaaagaaaggttgttgagttggaaaaacagctctctgatattcaaaagtcagtgagctgtgatattgacgctctaagagcagattcagctgtaattagacacgcaataattagtaaatcttaagacaattattttatggtcacgtttagcttattaatactgttggctaattcagtatagacttgctttaccgttggattttggtgctgctcggcaaattgttgaagattgactatcacatcatttttaactgatgggatagctgtatccaagctagccagtgtaatagacaacgctgattcaagcgcttcaatttttacgattaaagctgctaaatcaatagattgataagacatttaaaattctcactccgaagctactcagccatcacttcggtcagttaatactcggctgatacagtagcataccttaattattaacttattacatttctcacaggggcgaacctatttcaccccacggacgcccattgtgctaatgggatggaataggcgtatggacaaatacaccagcccctctgcctacggatggggcgcatttactgccatgcttggtgcgttatcattgaacgactgggcgattattatcggcatcatctgcacagtaggcacgtttgctgtgaactggtactacaagcatcgggaattcagcaaacatgaaaaagacgagtaagctcacgacagcggtcataggtctgattatctccggcgcaggtgcgacagccattctgtctcagttcttggatgagaaagaaggcaaccggttatcagcgtaccgggatgcaggcggtatctggacaatctgccggggcgtgacccgaattgagggtgttcccgttcggcaagggatgaaactgacagagagtcaatgtaatgacctcaacgttaaagaagcagaacaggccattgcatgggtaagaagtaatatcaaagtgtcattaactgaaccgcaaatcgcgggaattgccagtttctgcccgtacaatattggccccggtaaatgctttgctgcgcagtgaatgcactgctgattaatgctaactcgccagcctgcgtgtcgatttcaccttgtagccctttatcacccgactggatctcagcccgcagttgcgaggtggattccgcaaaagccttgtcggtctcagattgcgcgtgcttaatctcaacaatggcagcctctgacgcttcgagcctttagagcacatggctc

SEQ ID NO: 261 - DNA, 23596 bp, Xenorhabdus sp.; identical to SEQ ID NO: 260
  CDS (22880)..(23059)

SEQ ID NO: 262 - DNA, 23596 bp, Xenorhabdus sp.; identical to SEQ ID NO: 260
  CDS (19453)..(20247)

SEQ ID NO: 263 - DNA, 23596 bp, Xenorhabdus sp.; identical to SEQ ID NO: 260
  CDS (5081)..(7519)

SEQ ID NO: 264 - DNA, 23596 bp, Xenorhabdus sp.; identical to SEQ ID NO: 260
  CDS (3341)..(4555)

SEQ ID NO: 265 - DNA, 30011 bp, Xenorhabdus sp.
  CDS (5779)..(6933)
catggggatagtatgtctccggtaatccccaatggctctacagttacagtaattaccggatgcaaaaaaattattgacggcagcatatatgccattgaacaaggagatctgctgcgagtaaggatattattacgtcagccggaaggtaagttgatcattcggagctataattcggtcgattacccagatgaaactgccgatgccaatacggtaaacataattggcagagtctttaactggtcagtgatgggctggtaaaaattaagcataatcattaagaccctctcattgagggtttttttgtgatctaaatcgcaaatacaaacttctcaataaaataatatctttacatatcaacacaataacaacattaacttgtttttttctttactttaagtaaagcaatgcttgctttagaaaagcattgcttgtatctttcaaaacaagcaaaacttgatatgaaaataacatcgtcaagttaaatacttagaaatttaaatcctgttagtacttaacaagataaaggttgaaacgcggatattgcacgcgccgctacaaaactttatttattcgcaatcattgagagatctaacatgaaacaaacacgccctatatgcgttaaagctcaagcactcaatgaacaagaagcaaaaaggttattagctcccgtatatgtaatctatggctggatgggacaaatagttaatcgtcactgaaataaacaatattaattctctggaaaataaaatgactaaatctcaagctaaatttgcaatgttatgcgctcaatctgataaagaaggatatgaccattatcgtagtaagttaattgtttatcgagataaccctgttttacgtaggcttcatattgaaatttgcttgatgtatcgtaggcattatcgctcatggcttaatgatattcctttatatctacgtaacaactatggttgcatttaactaactccagctcatttccgagtgggctgaggctaaatgggacaaatagttaataaacaataaggccaatcaacatgaaaacaaaaatatcagttggggataaatattacttagagagtgctattgaaattaatgcggaaatgcatgttttgttaatactagcgctaaaggaattaaaaaaaaccatcgaggatgatgattactttatgttgcgagcaataaaacgattatcaatccgtcagtttgaagtgcttaatgaattaaataataacttcgaataaatatatcagggtggaatatgtcaaacaaactacaaaccgccgtccaaattgcagaagagattaaattacaattaattccaatgatggtggaaattgaaaatgagggtgaagaagatacatatataatgtgtcgaggaatttatcgccaaatgaaagggttaattgaaaatttaaaagaagtctcagggggggggtaatcaagaaagtaataatgaatctctgtgtaataaattggaagttagcgccagtaaagtagaaggactgataacatatcttgctttattactcgaaaatgaaagtgatgatcaaagcgctcacttacttagtatagctttagatatagctttcggaataggtaaagaaatagctcaagtcagaggcttggattattaattaaaacaacaaaccaaatttaattacagcgtcatcgctggggactcgctcaacttaaaaataggaaatagaaatgaaagaaaaatttgaaataacactaacattaacaaacagcactgacgatgaattagatttaggcatcaaagctggccttgttggcgatataagaccaagtatttattttgctgttgcatgtaatacattcaagaagctgattatatcagatttagagaccaagctggaattatcagatcaagtagcccaactactaaaaagagatgccgattgctcatgtgctgatgaggatgattaacaatgcatagctctgatttattatctaaaaagcgaaaggctcttattaacgccaagctggatgcattacaaaagaaacatggttgtcattctgtaatagtcaaagtgggtagaactaattacaggctggatttagacgaggaaatattaaatctagctctaattgaattatttgaaaaagatactttagcagttggaggagaaaaaatacttattgattcatacaacaacttttacaccaagcatggaaatctaaccatagagggcgatgcatttatggaagtaatactagaacacatcgcacaaaaaacggagccaataaaatgaaaaaacaatcctatttagattttgccaatatcgctattcaaatggaaaaagaagaaaagtataacctcgctgccgaatattgggaaaaagctaataaattagcaaatacgctgaatacccaactctggtctgaatatcgtcaagagcataatgaaaaaagatattcattgcatcatagccatagcaccgcattaagaagtcagaaagaaaatcagcgaacaaaagaggtattaaaaaagcaccttgataatcacactgaaaccaataagtggaaacaaaaatttcaacaggcgatgaataatgaaggtatatgaacaggcaggcgaattagcgcgtaatttagaatcgaaaggtttatttcgtcgcgctgcgaataaatggggtgaagccctttcattatcgcagaaccttaaacaagaacaggaatgtattaaaaacggaaatcgctgcattcaaaaagcaaaagtaattattcgtgatgggtggtaatgaaatacacagaatcaatgatagaagaaatgatttccgatttaaaggaaagcagatttgaacctcctgcttgtcttttagataaggaaagagtgctagctaattatccgccaattaccgatgaggaaaagatggaatgcgctgaattttcggttaagcaaaagcgagccatcgctgccaaagaatacttagtttcatgcggtgagcgcttcggaaggcttgaaaatgggaatgtcgtattttcccatgaaaattgcacagtcgaattagattctgaagttattgaaacgttacttattcaccaaatagaaaaaccaattttagaaattaatccagtcgaaaaatatattgcgttgcaacgtttctatttaggaaacgaagtaaatgaaaaagaaaacggtagtacatggatgcgtgattttatcgacggggtatttatcaacggattcaaattatttactgccgaaccagtatcacccagcacacattgagagacgagatatgagcaagaaaaatgaagtgatcacaatcaatcaaactcaaatgcctgtcgttgaatatcaagggcaacgtgttgtgacattttccatgattgaccaagttcacgcacgtccagaaggaacggcgaaagctgcattcaacagaaacaatcaccgttttgtgcaaggtgtggattaccaagttttaagtcaggacgatatacgtaccgacctcccccgatgggcttgttttcaaagttcgcccccaacggggattgtgctttttgagtctggttacctgatgttaaccaagccgttcaacgatgacttagcttggcaggtacagcgggaattggtcagtagctacttccgtaaaccacaaaccgcaataaatgagcttgagatgattgccagaattgccagtcataccgctcagcagcagcgccagattaaccatattggtgaaaaggttgatcaggttcaggaaacgatcgagcaaatcaagcgcggcactatccctgttggctggattggcttctctctggctacgactgaatcaggactcagtaacgccaaatgtcgcactttagctgaacaatatagtgttcctacgcaaagcatcaccaccctgacccctgatggacaacctcgtcctatgaaggtggtgttcaaagaagattttatgatcgcattcaacctaatgatgagtgaagcagaaaaacgcggcactcgctggtcacatcccaaaatgggcagttttcaggttattggatgggaggacaaacaatgattattaattctaacttgctacgcgctgctttggtctgtgtagcgaaaaaagacccacgttattacctatgtggagttcatatcacctctaactatctggaggcaaccaacggtcatgttgctctgcgattagaacacggcattagcacacgccgcaaagcgattgtgcagttccacgggaggatccccagaaaagcagaaactacagaactgcatttcaccaaagagccttatgccgttcacagagatattaccggaatgagagtgggatttagcgctttaaccttactggatggccgtttccctgatttagatcggcttatccccaagaaagtagaaagtgtcattccccactttcaggctgaatatctggcttatccccaaaaaatgtttgagggtgattcggcatttatcgctgtctctatgtatccatccagtatgacagatgcctgcttaatgaagtttagcgacaacatcaaccagcgctacggcaacccacagctcgttgttatgccatgtcgggtatagggaggctcatatgataacaaaaaactttcgcctcaacgcgctggcgaacagctattcagccgctatctataacgatgtagtgacccgtaacggtggcgctcacttcacgatgcaagtcggcaaaacagaaatcaatattgctattgtcgaaggggtaaaaggcattcgtgaactggtggacagttacgcactggaagcattacagcagagttatccggcatgggaagttatcgccatcgctctgatggagaaatgtgtcgtcaatggtctcctgacagtctacgggcgtgagatatggcaaagcatgatcaatgacatgggtgaaacactggcagctaaggggatgtttcaatgaaaattgaatatatcgacgaaggtatgtcttcaaaaatcattgagagtagtgtcattactgcacatcgacgtcataaccggtgtattgatgctgctctgctggctacacctgttcgtgcttctacttctgtcggcttcctttttaggatgaccgttattacaggcaaaacacctcacgtactacgtgcttacaaaattatctttgatgatgagcgccatgactgcgggacacctccagatggtagacattcacgacgaactggtcagaacaatagtccacattgatgacggcttggattggggtcagcgcattatccacattatgaatcgtaatcggcatattcacgagggcatctgccctcctcttccaccagcacccaaagtgtcggtagtgaagataataccagcgaagaaaaagcataacaaacggggtagaaaataatgataagcatcgataacgcacagaatgacattggtttacactacaaaaacacttactaccaaaacgtaaatacccaagtgtccaagagaaactcatatatatatagttaagttttttgcaaaaaatgatgtcccgctgtcccgaaacacttaacaatatgatttataaaaattaaatggcggggcgagcctgtcccagacatattttctcacacgtcccaaaacttaaaaaaatcaccattaaccaattgatttaaatataaaaaataaaacggggacgcttagacaccgagggacgcagtacaaggttaaagaggtaaaaagttagtagtaacagcccaactacaccaataaaccgctactactaccaacggaaaacgcttactactaccaccgagaacacttactactacggttagaggtgcccgatgcctaaaaagataacgccgctttcccctacaacggtatctaatgccaaagccaaacttgatagcaaaacaggtaagcccaaagacacgatctaccgtgacggggataatttagaactcctcgtaaaagcatcaggcattaagctctggtattttcgatactacaagccattcacccaaaagcgcacaatgattgcatttggtgaatacccctctactaagctggctgacgctcgccgactcaaagacgaagcaaaagcgatgctggctaaagatattgatcctgttgattggtgtaaacagcaaacagcggcaatacaggaagagaacagcaacaccttacggaatattgctacccgctggtttgaggtaaagaaaaccactgtcagtgaagattacgccaaagatatctggcgctcactggaaaaagatatattccctaaactcggtgatgtaccgatatcaaacctcaaagcacctatgctggtggaagtgctcaagccgattgaagcacgaggcaatctggaaacgattaaacgcctgacgcaaagaacggtagagatcatcgactatgccatgaatttaggcgttattgatgctaacccttttaccactgtcagcaaggcatttcctaaaccaaagaaaaaacataaccctaccattcgacccgaagaactccccgggttaatgcaagcactctccgttgcacaggtagaacggcaaacacgtttagtcattgagtggcaactattaacggctgtacgcccgggggaagccgtaaaagcacgttggtcagaaatagactttgaaaataaagtctggaatatacccgccgaaacgatgaaaacatcgcacgcccatactgtgcctttatgccaaccggctttagaccttcttgaaattatgaaacctatcagcggacatagggaatttgtcttcccacacagatctaccccaagtacccatatgagcagccagaccgctaatatggcgttaaagcgcatggggtatcaagatatgcttactgcgcacggcatccgctcaattgtcagtaccgcgatgaatgagcagggttttatgcccgatgccatagaagcggtattggctcacagagaaaagaactctgtccgggcagcgtatagccccatcgaataacattgtgctatagctggtggtttttgtccaaagtctgatagtgctgggatggaacaattaagcctaatcaaattgttatggataggatagttgtataacttattgattgttaataacttaccccaatggtggaagttgaacggcctgaggtattgccgaggagtggctaagcggctgaattagttcaattccgtttagtagacggaatcactttgctggtggatttacgggcaagatgtaaatatgcagcttggcatctacacccgatcatggcttctaggttgatactattgagaacactaaaatggaattacatggccttaccatcgtccctattccccaacgattaggccaatatttttcctcaaaccatgttctaaaattatggcggttcgggaaatggacgcaaccaaaattgggatcaaaaaaatcaacgctatcgaaagttactgctagcccaacagcatgattttcatacgctaaagcttcataacctgcatcggtagtagctaagttttctacaaaattgtcgccctcataacggctggcattcatagtaaataacccgttttcactcagaaatttaagttgctccatgctgctagctttaagattttcaactatttttatatagctaggtagtcttatatttcctggaaataagtgggactttcctaatttgtgcatcttcacccaagccattaccaaactactacaagccccattttgcgtagtcgaagaaaacttaaggggaaaattcagagtttgattgaagcgaaatacccaatttccttcaaattcatcagcatctaataacgacatttttaaatatatccccattcactatgagtttagtttacgccaaaaaagttaaaggtaaaaatatgttgaaaacagagtatatgggttctacctaatgtaaagggttttaaaagaagtgttaataaagggttttaaaagaagttttaaagactctgaacaagctttatattccggtgaattaggtcgattccgataaaaaagcctaactctttgatactctcgaaaacctgcattgcaggaagccgggcgatatgggaattcccataacggttcaaactctgcgtttcaccgtatttaagttttatcaattggttatgaggtcgggtaaaagttttccgcgaccctgtgagctaagccctatagagggctttgcattgctcgtaatacctgagctttgcccctgcgggttgatggtgcttggcgaaacttattattacaacagccaacacgatcagaccactgagtttcattattgttgtattaattgggtaaaaaataataatgaaaatagctcctatgaaatagggctgtaatatcccaataaatataaatcttgtcattttaatattttacaaaattaaaaaagagagaattatatgaaaatgaaaataacaaattattcaaataaagcagtttctgtttgtgttagcagatggaataaaagtggtgaaacgagttggttcattctaagaccaggcatgggtgacaattggggtcgtagcggttggcgaggttttataatgggtgtttctaaaaatggaaaagatgatttttattatatattcgaagatagcaatgtccttatttatgaagattacattgaggattttggtagaaaaataaaaccggcaacagaccgctattattaaaaaccaacaattattgatgtgttatatagtaaatctgttcgctactaatactatatgttaaataaaaaaggcaatgttggcactttaatataagtaagcattgccttaattttttgttcaaatttatccacttaacttataagcgggtggaaccgttcgcacggatatacgggcaagggataggatttttactatggggtgtttaatgctgaactagacgaattcacccggttaccgtggaagccatagattaggtctatttctaagggttcatttaacgcctccagacacccaagaataaaactctcagccaccagcattcgctttctaacctcgctctcaccgagcttaaacttacggtctatggctcttttcgacatgccgctaacgtagtggtgctcgataaaatcacactcctgagccataccaacgttgcgtagcttggcgacacagctatctatgatcatgccgtcctcgtcacagcacgacagcttattgttaccggtataagtcaccacatttttaaacccggctgatactgacttccaaccaatgttaactttgccctgcactatccgggcaagttcgccgccgatcttgtctttcgctgaacccgttaccatcttgagctggtacatctgggtcataaagttgttggcgtgtttggcggcaagcgctggatcatatcccaattgcttgatgaccttcttataatccgccgcatagccccccaccccacggcgcatagcaagcatggtattctcatcaataccgagcatactggcgtactgattggccctgaacgatggcatgcctgacaaccgttctccgaccaatgccaccagcgaagcggtatctctaagctgtccgttagtatcacgggtctgaatacccatattgcgcaggaagccttcgccaccgggattgttacgtaagaaccgggcgacattctcaagggaggagttcagcccctcgactgtgccacccgcctgagacacggcatagcccaatgttttgatctgctctgccgtaccaccggtgcgctgtgcctgccagtagagtttatccagtccactggcaacctgcgccgtaaagcccacgactgccagtgccgcgccttccacggcggcacccagctttaaagcattggcggtgacgcctgacagcactgcactgaattttttcgagtcagactctttgatatcaaatccaagcgatatcaaaaactctttaattacatctgcgttagtgttgctcatcacgttgccttagattaacggtatttccctgacggaccgtaggaccaaccacataggtatatattataaaaacgtacttaggatctcatggattacacaatgaagaaaatctggacaccatactggaggtactcggctatgctaccgacgaaactcccagcattatggctgtgcgtgtcgatactcattatcccccgatacttgatgacactgtatgctgtttccctaaccttgaacccggtgtaatatcccggttcattaactcgttaaaagcgatgctgaaagctagtgaacaacgcagaaggcgtgatggtaccagaatccatcctaataccttgcgtgatgtttgggctaaagaatatagcttggcaggtaaatgccacttccacgtttgcctgatatttaacgaacaggcttacaacaggctgggagattataatatcgacactagcttgaggatgatgatcgttagagcttggtacagcgcattagggctcgtaccagaggactatcctgggctggttcattttcctgaaaactacaggtacatcctggatcgaaactcagcagattatatctatgagtttggagaactagtccatcgtctggactacctgacaaaactcgatagcaaaatttacgaagaaggtgaacgcaatttcggcggtagtcacaaatagtcatatgggcaagccttcccaatcgggaaggcctttttcacgttagggataagtgatatgtcctacaatcgcgcagatgagtcgataatcgctaacgtagaagatctccggattttcagtatcttgctcgccgataaagaatacccaagctttatctttcagccccttgcctttggcttctattgcctctgtacgggcagcctccagctctttacgaaccactgtacgcttggcttttgaccagctagcccaatcgatgtagatctggtagcttcgggtaggtttaggtttacctgactcatcttccccccattcaccagacaatggaatgatgaggttttcatcattttcagtaaatttgttccagagcagtggtgcataaaagatcttcggctccgggtaaggttgaacctcattccggagctttttaaacgccgtcatgtagatttgaccactgataccgggaacgttaagcgacattccccggtcatgcgggaaacggatgaaggcacggcaaatattgcgaatagcattcacttgacgccgggattgtcgttcgggtgaattaccttcaccagattgtgaggatgctgaacgtgtcgaactggatttactttcatcaccagggaaacctagttcaacaaccgggcgtttttcgatcaactttaatcccgagggcattaaacccggagcactgtccagtatgttgcggacactcgccttctggccttggcgaattactgtgctttcagcatcagcatcacattcatgatgatgttgaatatgtcgtttctttttaaaataggctctgacttttttatctttttcccatgcagcaggatgcatggttataccacacccccagcacacatagccttcagtatcaacgctatcaagcaaccacagatcctctgcctctacaatctcacgggtatgtttatcacgtgcagactccatcacattttccttttgtagaataaaaatccagcatacctagtattggcagtcaaatgcgcacaaagatgattctccataaaactcgtcggtaatgtctctcgctgccaattccccctaaaagttatgaggttccttggcttaagtacgttgcggttactcgctatgtcaacaaacggcatacgcattgagacttacatcatccgactaaaatatctattaaacctgtggcaattgaataccatttcgtttaaaaattgagagcaattcgatcgttccccatctgtccaagcaacgttttcgtattgtttaacaattgtagctttacatcattttcaggcattgaccacgcctcgcccagcaatcgaactgtaatattgaaatcccatggcatcacagttcgattgctaaattgagcaaatggcccgtcgctctctggcacaaccctgtctttagggagcttagtagcaagagctttccctgcggcagagttgaaagcagccggaccaatactgaaccagcatccctgcgctgaagcatccctcaattccgtaacacttccagtgaaccaatgtaaaataggaattccgtgagaggggaacgcttttaaggtagccagcacatccggaacggcctgtcttgagtgaatgctcattgctcgtcccccaacatcgtggcacttcctgaccacctcggaaaacactcgacgttgcatcgcgtaattggtggaatatcgttttgaaccatccaatccaatctcacctacagcagctacgttttgaatcaactcgagaagcatttccaattcctggaaacgatcagcaacaatttcaggatgaagtccaggactgatcattaccgattcatgtttttctaaaacatgacttgtagcctgaaaagcctttgggctcgtagtaactaaccaagtgaaaacattacgcttgatcgcaccggcataaacatctctagcctcgggatacaaatcaacgtgacagtgaaaatcaatcaaagcaatttatcctgaacgagtacagtttctagctcttttataccttgctgcaaaaccctacgatacatggggcgctctttaatcggtgcaaaaaccaacgaaccaccaagaaatctgtcaagccctcttttccttacatcaaggatggcaagtgcaacagccataggatcatctggcgcactagacttgtcactgccaacaacagattcaaagcggtaagacgttgtatccccctcaggtttccatgcaaggaatgcagcccgacggatcaagcatggaacacaacgtccacagtgctgacgattataggttcgaaagcggccacaacttgtagaatcagcagcccatttttgcaaaaggtcttggtcaaggcactcccgcatcatttcgcccttagttttgaaacggtacggcaactcaagctgtacatggatgcccaaattatccagaactctttgcaacatatcgataaacataggatgagttgtacgagtactcaaactggatacgcgccccggaaccaaaggaggatttatggagatcaccccattttcgggaatatatattgttgggtttggtaagtttattttcgttgaggcaagtaatgcaaatgtataaaaagctaatgagcgaccacgtgtcgaaggttcgcgcgatcctttgaaactgatgccatgactccattgataatgtgaaccatttcccatcagcatggatgcgtatgccctctgtcgctcagaatctttatgtgcgagttgagaaacaaataggggttttcgacacttagccaccaaatcaattccacctattagactatccagcccgccggatactcaacaaccaccgactaaagtcggtgggttagtgattaacggactgaaagtccggatacgcatcggctaaacgatgcgtcaattatccagcctgaagtgatcattcgggttcggttcaaaatgatgcgccagataggcctttatcatctcttccgttaactgacctaccgtcgcacaaaaatagcctctgccccaaaaatgctgaccccagtaacgctttttcaagtgagcaaactcttcaaacaacttacttgctgtccttccctttattcgcctcatgatttctgagggcgctaagctcggaggacaactcaccagtatatgtacatggtctttgctcacgaccccttctactatcctgatttcgaacgcttcacaggtctgacgaactaactctctcacccgtaaaccaacttcacctgttagcactttgtgcctgtattttgttacccacacaaaatgatactcaatctgaaataccgtgtggctgccatatctgtaatccatattgcacctctcgtgtaacacagtatcgcagctaaagctgaccgactaaagtcggtggttttaaccttttatatggaaaactcaacaaccaccgactaaagtcggtgggttagtgattaacggactgaaagtccggatacgcatcggctaaacgatgcgtcaattatccagcctgaagtgatcattcgggttcggttcaaaatgatgcgccagataggcctttatcatctcttccgttaactgacctaccgtcgcacaaaaatagcctctgccccaaaaatgctgaccccagtaacgctttttcaagtgagcaaactcttcaaacaacttacttgctgtccttccctttattcgcctcatgatttctgagggcgctaagctcggaggacaactcaccagtatatgtacatggtctttgctcacgaccccttctactatcctgatttcgaacgcttcacaggtctgacgaactaactctctcacccgtaaaccaacttcacctattagcactttgtgcctgtattttgttacccacacaaaatgatactcaatctgaaataccgtgtggctgccatatctgtaatccatattgcacctctcgtgcaacacagtatcgcagctaaagctgaccgactaaagtcggtggttttaaccttttatatggaaaaataaattagctgtttttatgccttccctgcacgttcagggcaatcgcagaaactatatgaagtaacgacatgcgtataatgtggcttgccatcacaatgcctacattaactttcatcgccatagcggcaaatagcattgcttccatactgccgggtgcccatgaaaggatcagcaagtgcattgggtaatccatcacctgtgcggtcactgctgcaactaaaactgtgatggtcagtgcaataaacacagattgtatggaagaccaaatattactaatcaatgctgaaaacggaaacgcactaaaatacaaaccaatcctcatgcccattaaccccattgataataaactgagcaattcaggcagcttcagtgttacatcagacagatagtgaacaataatagcaacaaccaatgaagtcagcatatagggtgccggaatatgtaaacgctccaacaaaacgccgacgatataacctccggtggcaatcaggatcaaccagccaataatgccgggtgtataagaaaaaggtgctacttcaatcactggaggaggatttaatccggtaataatcccggcaataataatcaaaacgaccaaacgaatggcatgggagataacaattttctgtggtggtgttttagagtgttcagtcagcactaagatcgcagccagcgcaccgggaacagcgcccaataccgactctgtgcgtgtccatcccattttccggtgaaaccaaaaatagccgacattaaattgcagaatcaggcagattaataatgcggggagtaacatcaggatatcacgcccttcttccatcggtaatcctttgaccatcaacccgatagagcttcctaatacaatttgaaccaccgtcagactgtgttttggggctgtaagtgatattctcagccgggatgcaataataacagccgccattgccccaaacatatatgccagaggtagccccagcagtgataaaacccatcctaaaagcatgcaaggtataacacttaacagtgatttcaccgccactccttagttcagtctgtttatttgaatttttatcgaaattactgcaataatttcaaattacgacgataactcttctgatttatcttccggccagacattaataacagctttaatcagcgtcgccaatggaatcgcgaagaaaacgccccaaaatccccacaatccgccaaaaataatgacggaaataatgataataagcggatgaagattaactgcctctgaaaataaaataggaacaagcagattaccgtctaatccctgaacaaccagataagcaataaatagtgtccaaaaatctgcgcctaatccccactgaaatagggctaccacaatgacaggaatagtcactattaccgtgcctacatagggaatcaaaacagataaaccaaccagaacagcaagtaacatggaataatgcaactcaaagaaagcaaatacagcataagtacaaatggttaaaataaccatctccacaacttttccccgaatataattcgtaatctgctgattcatctcatgccataattgcccggctaaaccgtgattacgcggtaatatacgctggaatgccgctaccattttatttttatctttcaacaggaaaaataccattaaaggaacaataatcagataaatagagaacgtcatcaggccaatcaaagacgctacagaaaatttaaatacagattctcccgctaaagaaaatttattgcgcagattttcggcaaacatatcaatgataccgacatcaactaaaatagggtaacgagagggaaaagtccgggcgtattccttaaagcgattaagcatattcggcaaatcagaaaatagattgagtccctgttgccagactgttggggcaacaatcaggataatcaatgcactgatccccataaaaatggctaatacgattgtcactgaaagagtacgactacaacccagcttttctaattttaccgtcggccattccaataaataagccaacacaattgcagcaagaacaggagctaaaataccattgaaaaaataaattatgccaaagccagccagcaaaatgaatgatagagcagcaacttgcggatcagcaaaacggcggcgataccatcgcatgatcatatccaacataaaccaaactccttaataacaatacttaatgactattttactaaaagtgcttacggctgatcgattttaagttaaccttagctatcatacacgtatcctgaaattgatagctaactgggcacagcattttataaaaatcgttttatgagaatcgctctatgaaaaaaacatctactaaatccctgatagcgatactgatcagtctgacactatttggcaatagccctgcatactctgtacctactgacgagacattacccgatattggtacaaccgctgcatccacactcagtaccaatcaagagatagagatgggtgatttctatatccgtgaaatacgtgctggaactcccttgatttatgatcctctattaacacaatacatcaataaattaggccagaaactcgtcaaccatgctgatgcagtgaaaacaccttttcacttttatatcgtcaataatcctaacattaatgcgtatgcctttttcggtggcaacgttgtactccattctgctctgttccgttatagccgaaatgaaagcgaactggcttcagttatggcccatgaaatatctcatgtaacacagcgccatttggcccgtatgatggaagatacacagcgaaaagcgccactggcatgggccggcacacttggatctatcttactgctaatggctaacccacaggcaggaatggcagctctaagtggtacactggctggtttttcacaaggtatgatcagctttactcgtgaaaatgagcaggaggcagatcgtatcggtatgcgaatattaagccgggctgggtttgatccttatggaatgcctaattttatgcaaactttgagtgagcgcactttacacaactcagaaattccagaaattttatatacccatccactgcctgatagccgattagcagatgcccgtaacagagctaatcaatacccgaaaaaatctattccagaatcacaggaatatctactggcccgggtgcgaattctgacactagaatccacactaagctcagcctatattgaagggctgctcaataaatacagtcgtggaactccaaaagaacaaatttcggcctcttatgggcgggttctgctactgactaaacagaaaaaatatgccgaagccagaaaagtgctcaccccgttattgaatagccagccagataatatctggtttattgatgcgatgacggatatcgatattgaacaaacacaatatgagcaggcgattacccgcttacagcaagccttacataaacacaaaaataaccctgtgctgcaaatcaatcttgctaacgtgtatatcgaagccaaacagtatccgaaagcatcacagctgctattccaatacaccttcagccatccggatagtttaacgggttggtcattaatggccgaagcagcaagcaaacaagggaaacgcagtgaagaactgtcagcttacgccgaaacaatggcattacagggtaaatttgatatggcaatcaattatctcagtcaggccagtgcattagcaaaactgaacagctatgatcaggcccgttacgatgcccgtatcgaccagttacgcaagctgcaacagcgctatagccaatataagaaatgaggttcttttatatgcaacatgttattttttatcataacccccgctgttcaaaaagccgggaaacgcttaagttagttcaggaactcggtattacaccagaagttattcattatctcgatactcccccaacagcagaacagctggctgttttactgaaacaactggggttcagtgatgcccgccaattaatgcgaacaaaagaagaattgtataaagagctaaggcttgataatagtgaactcacacaagaagccttacttcaggcaatggctgataatcctaagctcatagagcgcccgattgttgttgcaggagataaagcacgtttagggcggccaccagaacaggtcaaagagattttgggcaattaatcattaaaaaagtgatagggaaatctactttgtacctctatcactttttttctgagctggtgtattaaagatcaagaatatcttttacaaatgggatagtcagtttacgttgagccacaatagaagcacggtcaagctcatccaacgttctgaatagcgtctgcatttctctgtcaagccgctttaacacaaaacgccccacatcttcaggtaattcaaatccccgtaacttagctcgtaattgcaatgcctgaattttttcatcatcagacaaaggctgcaatttatagatttgcccccagtcaagccgggatgctaaatctggcaatgttaaattaatttgccggggtggacgatctccggtgatcaacagacaggttttgccaatctctacaattcggttataaagattaaaaatagccatttcccatacctgatcacctgcgatgcattcaacattgtcaatacacaccaatgataaatgttccataccatcaagaacttccggaacaaaatatgcacgtttatcgagtggcacgtacccgacagcctctccttgctgggatagttcggcacaggctgcgtgaagcaaatgactcttgcccccgccatcgcgggaccaaaaatagatataactgccatgtgactgactaatagccaattttattgcggctaataaagaagaattctcacctgcaaaaaaactggcgaatgtttcatcatctggcaaatataagggcaatgaaagctgcgccggtgtattcagaagcacctcaaacagaatggataacgaacagcattaagtttaccatagaaaccaagtttaccacaaaaaacgataacaaatgaaatgaatacttagtttaagatggtcgctgtcgtaggcactcactttttcatgaaaaaaagaaaaataacgcaaagaagtagtaaaaatttatttttaataaaaattatcattgacatatattcaatattattcctttctcccatttaagaacattatttatactgaacatcccaaaatactctttgtcaaatttgtgtttaaaatcactattgattatgacatatccgaaatgaataatatgacctatactgaactccatgaacattacaaataacaatcaatacagaatatagcaaaacttaaaatataagatgaaaaactgggaattatctttctttatcagactgagaaataatcagagcacttgcttctttcagaacctcaataatttcatctttatctaaatcaccttcaatagatatggagctaccatcatttttagtgatagatatttttagattacgctcaccacctaaaagagcaattaatgattttcttaaaccatcaagataccttacattatctttaataaacgtgaacgttcgcttagctatattgagtgttttaaaatccgagcctattgagttaacttctatattaaactttttaagctctgtataaaattctttttccaatgacttatctatatatagagtaatattatttatactttccattttatccctcaatatttttcatctttgagtgtttgtacttacaattatagtaaaagattatgacaaaaaggcagcaaaccgataggtaggaatgaggtaactataaggatatcaagagaaattagccaatatttttctaataaaaaataagagaaagagttcgttgaaaaccctttctcttaaaggaagacccatacaaattattttatgatttcacacgcttttttatcatcactgaatgattccacagaagaactaatatacggttcatccggacgaatgatactaatcaacttgaaaatcaggctcataccaatacccactaccgttgccagtgccatacctttcagctctgctgcaccaatttggattttcgcaccactcacgccgataatcagaatgacagaagtcaggatcagattctgagctttgctgtaatctactttagaatcaatcagtacccgtataccagatgccccgatcacaccatacagtaataaggatacgcctcccattaccggaaccggaattatctggatcgcagccgccagtttaccgacacaagaaagtaaaatcgccagaatcgctgctccgccaatgacccatgtgctatacacgcgagtcagagccattacaccaatgttttcgccataagtggtatttggtgttgagccaaaaaaccctgagataatcgttgaaaaaccattagcaaacattgaacggtgcaatcccggatttttcagcaaatctttttgcactatattcgctgtcacaaccaaatgaccaacatgctctgcaatgacaactagtgccgcaggcaaaatcgtcataatagcaaaccactcaaaacgcggagtgtaaaaagtcggcaatgcaaaccatggagcttcacgcactggtgtaaaatcgacgactcccataaaaaaggatagcgtataacccaccagcaccccaatcaggattggaatgatcgccataaaaccgcggaacatgactgaacccaatattgtcacagccagtgtcaccattgagatgatcaggttcgtcgtattaacatccgttcccgcagcaggacgtaacccggccatatcagcggcaaccccagccagctccagaccaatcactgcaacaatagctcccatcgcagccggaggaaacatcacattaagccagcctcttcccgcgattttaacaatcagggaaaccaggcagaacagcaatccacagacaataaatccgcccaatgccagttcataccctaaaggcaacaacaataatacaggagatataaaggcaaaactggagcctaaataagccgggatccttcctttacaaataaacagataaaacagtgttccaataccattaaacaataaaattgtggcgggattaattttaaacagaatgggaaccagaactgtcgccccaaacatcgcaaataaatgttgcaaacttaatggaatggtctgtcttaaaggtggcctttcatctaccccaatagtccgacgggtcactatttatgtcctcttatgttttactaggaaccaaaaaaaagccgacttttcagccggctaaaaatattattttgtaccaaatatcttatcgcctgcatcccccaggccaggaacaatatatccgtgctcattaaggcgctcatcaattgatgcagtatataattcaacatcaggatgtgctttttctaaagcggcaaccccttctggagcagcaaccagaaccaaaaccttaataacagggcatcctgcttttttcagtaaatcaatggtggcaatcatagagccacctgttgccagcatcggatctacaaccaacgccatacgctcattgatatcagaaaccagtttctgaaaataaggtacaggttcaaaggttttttcatcacgatacacaccaacaacactgatgcgggcactcggaatattttccagaacaccatccatcattcccagacctgcacgcaggataggcacgacagtaattttcttccctttaatctggtctatttctaccggaccacaccatccctcgatggtcactttctcagtttctaaatcagcagttgcttcatatgtcagaagacttcccacctctgaagccagttcacgaaagcgcttagtgcttatatcatgatcacgcatcaggcccagtttatgtttaacgagtgggtgtttaacctcaacgatcttcatgggtttctcctactgtatatagccggcagataaaaaaatcgcgggattatacctcctttttgggatcaggcaactatcaatatattgatttttagcaactacaagtcattttttcctattttttatccgcaataaacctgcataaagctatcgcaaacgtttgccttggctgttagaattattccgttctgttttattcattcaaatgcaaccgcctgggagctacgcagtgaccaacaaaacctctcttagctataaagatgctggtgtcgatattgatgctggtaatgccttagtcaatcgtatcaaaagtgtagtgaaacagacccgacgcccggaagtgatggggggattgggtggctttggtgcattatgttctctgccacaaaaatatcgtgaacctgttttagtttctggcacagatggtgtggggactaaattgcgtctggccatggatctgatacgccacgatacaatcggcattgatttggtcgccatgtgcgtcaacgatctggtggttcagggagctgagcctctgttcttccttgattactatgcaacagggaaattagatgttgataccgcatcaagcgttataaccggcatcgcagaaggctgtaaacaggctggctgtgctctggtcggcggagaaacagctgaaatgccgggcatgtaccacggtgaagattacgatgttgcaggcttctgtgtcggtgtggttgaaaaatcagaaatcattgacggcagtaaagttcaggctggagatgcactcatagcactgtcatccagcgggccacactccaatggttattcactgatccgtaaaatccttgaagtcagtcagaccaatcccgagacaactgagctggatggtaaaacactggctgatcatcttctcgctccaacccgtatttacgttaaaccactgcttgaactgattgagcaagttgaaatccatgcgatttgccatcttacaggtggtggtttctgggagaatattccccgcgttctgcctgaaaatatgcaggcaaaaatcgacggcaccagttggcaatggcctgccatttttaaatggctgcaacaggctggcaatgtcagcgaccatgaaatgtaccgtacgtttaactgcggcgtcggcatgataattgcgctgcctcagtctcaggcaacacaggcaattgaatggctgaataaagcgggtgaaaacgcatggcaaatcggcagcatcgctgaatctgatcatagcgggcaacaagttacgatcagtgaataaaaagccagttaatagaaagtgattcaatgaagactatgaaaaaaattgcggtcttaatttctggtaatggcagtaatctgcaatctatcattgatgcctgccagcaaaaccggattaatggtcagatctgtgctgtgttcagcaataatgctgacgcttatggtctgcaacgcgctgaagaatcagctattccaactcatttcctcaatccgaaggaatattctgatcgcacagattatgactctgccctgcttacagccattgatcaatatcagcccgatttagtcgttttagcgggttatatgaggatcctgtcatctggctttgtgcagcattaccgtggacgactactcaatattcatccttccctgctgcctaaatatcccggattacatactcaccgtaaggcgatagaaagcggcgatcaggaacatggcatttctgtccactttgtcaccaaagaacttgatggtggtcctattatcttacaggccaaagtgcccatttttgcagaagatcaagaagaggaagtgattcaacgcgtgcaaactcaggagcataatatttacccgctggtcattggctggtttttggaaggccgtttgagcatgggcaataataccgccattttggatgggaaagtgctttctcaacaaggatatgcttcagactaaccgatataattaattcccaaatttattattagtttcaaaactacagcattgtgttaaggttagttaattaagctaaacttaatcatactaaggtaaaaataattagccaggcaccttgctgtactttattacttcataatattctcttttataaaaatcaaaactaagtcgtccctacgttaaaaacactgaggtatctaatgtccagtggttccgaaaatctacccgtaaatctacgtccacttgagcgggaagatctccctttcgtccaccaacttgataataatgccagtgtcatgcgctactggtttgaagagccttatgaggctttcgttgaattatgcgatctctatgacaaacatatccatgatcaaagtgaacgccgttttattattgagagtatgaattccaaagtgggtttggtggaattggtggaaattgattatgtccaccgtcgggctgagtttcagctcattattgcgccagcttatcaggggcaaggctatgcaacagaagcagttaaacttgcgatggagtacgcattttcagtactaaatctttataaactctatttaattgttgataaagaaaacgaaaaagcaattcatatatacaataaactgggattttatacagaaggagagctcattgatgagttctttgtaaacggctcttatcatactgctatccgcatgtgtactttccagcatcactattttgctaacaaaattaggcattcccagagtaaaaagcagcactgttaaccaatggaccaaatggagtagtaatgtcccaagaccgcctctatacagaaaaagaactcagctggctctctttcaatgaacgtgtgcttcaggaagcggctgacaaaagtaatccacttattgaaaggatgaggtttttagggatctactccaataatctggatgagttttataaagtccgtttcgccgatgtaaaacgtcgcattctgattagcgaagcccgcggctctgcaacgggttcccggcaattattaaaaaaaattcagtcaaaagttgccaaaatcgatcaggagtttgatgaactctataacgatttattattggagatggcacgtaatcagattttcctaatcaatgaacggcagatatccccgaatcagcaaatctggctacggcaatattttcgccagcatttgcgtccacacattacgcctatcgttatcaatccagaaacgaatctggttgaatttttaaaagatgattacacctatttagcggtggaaattatccgcgggcaggaaaccaaatacgctttgctggaaatcccttccgataaagttccccgtttcgttaatttaccgccggaaatgcccaaaagacgcaaatcgatgatcctgattgataacattctgcgctacacactggatgaaatttttaagggattttttgattacgacacactaagtgtttactccatgaaaatgacccgtgatgctgaatacgatttagcgacggaaatggaatccagcttgctggagttaatgtcttcaacactaaagcaaagactgacagccgaacctgtccgttttgtttatcagcgcgatatgcctgatgaaatggtcgaattattgcgtagcaaactggggctttccaatgatgactcagtcattgccggcagccgttatcacaatttcagagatttcattaaattccccaatgaaggtaaccggactctgctgaataaacccatgccccgactgcgccatacctggtttgatcatttccgcaatggctttgatgctatccgtgaacaggatgtattgctttattatccttatcacactttcgagcatgtactggaattactgcggcaggcatcattcgatccaagcgtattatcaataaaaattaacatctatcgggtagcgaaagactcacgcatagttgaatccatgatccatgcagcccacaatggcaaaaaagtgacagtggtcgtggaattacaggctcgttttgatgaagaagccaacattcactgggcaaaacgcctgactgaagcgggtgtgcatgtcattttctcggctcccggcctgaaaattcacgccaaactgtttatcatttcacgccttgaagggaatgaaattatccgttatgcccacatcggcacagggaatttcaatgaaaaaacagcccgcttatataccgactacttcctactgacagccaaacccgaagtcaccaacgaagtacgccggctatttaacttaatagaatacccttatcgcccggtgacgtttgagaatttgatggtttctccccaaaactcacgggctatgctcaataaactaattgatcaggaaattgaaaatgccagagcaggagaaattgcaggtatcactctgaaaataaataatctggtagacagagaattagtagatcgcctatacgatgcctctgaagcgggtgtcaaaatacggcttctgatccggggaatgtgctctctggttcccggccagcccggttttagtgaaaatattcaggtcaccagtattgtcgatcgtttccttgaacatgatcgggtttatgttttcactaataaaggggatgagaaaatcttcctttcttccgcagactggatgacacggaacattgattatcgtattgaagttgctgtttgtctgcttgacccgctgttaaaacaacgtgttctcgatattctcgaattacagtttagtgatacggtcaaggctcgttatattgataaagaattgagtaataggtatgtcccacgagggaataaacgtaaaattcgcgcacaaactgccatttacgattatctgaaaaatctggaacagcctgaatcaagagtttaatttatgccgttgaaacacgatacaccaacacctaaaccgctggaaattgcaaccatcgatctgggttccaatagttttcatatggttatcgcccgaattgtaaatggggcattacaagttatcggtcgcctgaaaaaacgggtttaccttgctgatggattcaacgataaaaatgaactgagtgaagaagccatcaaacgtggtcttgagagcctttcgttattcgctgaacgtttgcaaggtttccccgcagaaaacgtctgccttgtgggaactcacagtttacgggaagcaagtaacgccgaagaattcctgcaacgagccaaagaagtcatcccctatcctattgaaattatttccggtcatgaagaagcccgtttaatctttatgggagtagagcatactcagccagaaaaaggtcgtaagctggtgattgatattggtggcggttcaaccgagctggttattggtgaaggcttcgaacctcttctcattgaaagccgtcgtatgggatgcgtcagttttgcccggcagtttttccctgatggggtgataaatgaacacaatttccgcaaagcacgacttcaagcggaacaaaagctggaaaatctcatctggcaattccgtacaaaaggctgggattttgctctgggggcgtcgggtacaattaaggcagtgcatgaattactggttgaattgggtgaaaaagatggcctgattacacctgagcgacttcagatgctggtcaaaagagtgctgaaatacaaaaattttaaatcgctggatctgcctggtttatcggacgatcgcaaacagactctggttccgggtctggcaatcctgtgcggtatatttgatgccctaaatattcaggaattatgcttgtctgacggagcactacgtgaaggcgttctttacgaaatggaagaccgtttccgccatctggatatccgccagagaaccgccaaaagtcttgcagatcactataatatcgatcgcgaacaggccagtcgtgtctgggatacagctaaaacactgtatgatcagtgggctgcgcaaaatccgaaacgggtacaaccacaactggagtctattctgctctgggctgccatgctgcatgaagttggcttaagtattaatctgagtggcctgcaacggcattctgcctatattctgcaacatactgatctgccgggattcaaccaagaacagcagtcattactggcaacattagttcgttatcaccgcaaagcggttaaagttcatgagcaccctcgtttctatttgtttaagaaaaagcaatatcttcctatgctccagatattaagattagcaacactactgaataatcagcgtcagtccacaacaacacctgagtcactgagactggaaacggatcatgggcactggatactttctttcccgagaaactatttaactcaaaatacactcatgcaactggatttagaaaaagagcaagcttactggaaggatgtgacaggctggcatctacatatccaagaggaatcaacttaacgatatcgtattatgaaaaagaaaaagaaaaccgctcagattacaaaattaattctgcttatcagctttctgattttatttgggcgttttatctattcatcaattgcagcgttagaacatcatcagcaaaaaaagcagaatatgatggaacaaagcagcgatcttaagacaaaataacatcattcctgatagtgtaattttggcaaaaactaaaggtcatataatgttacagccagcctttaaacccgataatacgaatgttgccagccagcattcgcaaaagctagctcttgcccgccagcatctattttctctgttaattaacgataagctattcgttgatacattattaggacaggctgatgcacatgcaaagattagcaatgatctgctactcgaaaaaattgaagaagtccgctctttactaaccagcctgcatgcagcagatatcgcagatattctggaggcactgccttatgatgagcgccttgctttatggcgactcattgacaacaaccagcgtggtgaagttttggtggaagcttcaatcttcagggggaacttccgctcactaccctgctaaccagcgcccccgataaattagtcgctgaagtgatgaacatagataccgtgacttttctgcctgagcaaaaaggtgaagacgcagccagtgcgttcgaacgttatgacctgatttctgctgctgttgtagataataatggccgtctgatggggcgtctgactgttgaagatatcgtcgataccttaagcgaagagactgataccaatatccggcgtatggggggcctgagccgtgaagaagatgttttcgctccggttgggcaggcagtaaaaacccgctgggcatggctagccattaatctgtgcactgcattcgttgcttcacgggtgatcggtctgtttgagcataccatttcccagcttgttgcccttgccacgctgatgcctatcgtggcaggtatcggggggaataccggcaatcagaccatcactatgatcgtgcgagcactggcactccatcaaatccggacagggagttttccttatattttattaagggaactgggtgttgccctgataaacggtattatttggggaggaattatggggcttgtcacttatctgctctatgatgacccagcaatgggcggagtgatgaccatggcaatgatactcaacctgctgatggctgccctgatgggtgtgctgatcccttttattatgatgaga

SEQ ID NO: 266 - DNA, 30011 bp, Xenorhabdus sp.; identical to SEQ ID NO: 265
  CDS (1)..(258)

SEQ ID NO: 267 - DNA, 22514 bp, Xenorhabdus sp.
  CDS (2330)..(4669)
tgctctaaagtggaacgcaaaaaagccctttatcagacctatgctgacgccgaagttatctctcagcaacgcaaaggtgaactgattcttgctgccgaacgcgatacggacagtaaacggattgaagccgccaaacaggtctttgcgagtcagggtgagttacagtcacttgccgtcacgatgtttgagaccacgcaggagcggatggggaatatggtcaccggcctgctgaccgggagtaaatccctgcgggaagggatgtcggagctgttcgcgtcactggcgcaggatgtggtgaaaagtctggtcaaaatggcggcacaggccttgatcactaacaccattatgaaagggatggggtcaatgggtggcggcggtatgttcagtggctttgcgtcgatgttcactcagaatgccaaaggcggcgtttatacctcggccaacctgagtcagtacagtggacaaattgttaatagcccgacgctgtttgcttttgctaagggggcaggtctgatgggggaagccggtcccgaagcgattatgccgctggcccgcaccagtaatggcagtctcggggtcaggttagtcggacaaaacctgaataccgccggtgcagcacctcaggtctacatcactatcagcaatgaacaaaccactcaaacgacctcaccgggctgggaacagttcggcagtgagatcgggcgttttgtcgaacaacgttaccgggaattgatgaaccgggatttaggtcagggtggtgtacttaaccgggctatcagaggaggccgataatggcattggaagaatttacctatattccgcgcgtgaacccgataggggatatcacacaacgggtgcgcacagtgcagtttggtgacgggtacacgcaacgcagcggtagcggactgaataacgaacatcaaagctggaccgttagttttgtgggcaatctggactatattgaagaaatccggcaatttctggtgcgtcatgctgggtatcgtgcctttacatggcggaatccactgtcaaaattgggtttatatgtctgtcagggacaccggattactgccatgggtatgaatagccgacaggaacagatgtatcagctgtctgctgcctttgaaaccagctatcaaccttaggagacgataatgtcaatgcaagccgatctccagcgtctggtgccggggagcaaagtcttattgtttacccttgatggttcggcgtttggcggaccagagctgtattttcacagtcaccccattccctatacccagaccgaattgactgatcctgataagctgccagtgaaatctctctggtggcagggcttagaatataagccatggccggttgaaattaagggactggaaattcagagtgatggcagtaccgcttctcccgcgttaaaggtcgccaatctggacggcacgatcagtgcgctgtgtctggcttatcagaacatggtgcaggcgcgtattactatccatatgacctttgtacattatctggatgcgcgtaatttccccgaaggtaatcccgaagcagacccgacacaggaaaaaatagacgttttttacatcgacagcaagacgcacgaggacaatgaaagcgttcagtttgctttatcttccccggcagatttgcaggggattcagatccccacgcgccagattcacggtttgtgtacatggtgtatgcgggggctgtatcgcaaatctccctgtaactacacgggaacgcgctattttgatgaagagggcaacccaacggacgatccgtcaaaggatgtgtgctcagggttattatcaacaggatgcgagccgcgccatggaataggtaatcaacttccctttggtggttttcccggttctgcgttattgaggcgttaatatggaaatactgcgcccgcacattatcagtagcatcctagaacacgccaaagccgactaccccaatgaatgctgcggactggtgattcagaacagtcgcaagcaacagtatatcccctgccgtaataccgcctcagtcccaacagagcaattcagtcttcacccagaagattacgcaactgccgaagatgccggaacgatagtggcgattgtccacagtcacccggatgcgaccacccagcccagtcagttagacattgcccagtgtgatctgtcacagctcccgtgggtgattgtctcatggccggaaggggataaatgaggtaacgatgatggctgatacacagtctaaccaaactcaccccaaatttacatcttcatataaaacagacgaacaaaaaccactcgattttatccagtctgtgaaaaaatccgccatgtatcactgggaaaatctgctgccagcatgtggtattgatattccggcaaagggtaaacatggcgcttgccctgtctgcggtggtaatgaccgtttccactttattgatgatcaccattatggcaattggcattgtcgccagtgtgatgctccgaattttggcgatggattggatttagtggcaaaaaccaaagggatctcaatttttgaagcagcaaaggttgttgtagatgctctggcattgcctgtgccagaatccaaactagccaaaacgctgactaggaacgctaagccaattgctgaacgtatcgcggcactggttgccactgctgttgcgggggaatctcaatatctggtgaaaaagggactgcaatgctccaatcagcggatgttaaaagacggttctttattgctggtaactcagacactggatggcgcaattactggcgcacagaccatcaagccaaatggtgaaaaacgacttgttgtaggtacacagaaaaaaggcagttttattctggtaactgagattactggaacgccggacacaatcatcattaccgaaggttatgctacagctttaactgtcagccaactgcataaaggcgtggtattggcagcgattgatgaaagtaatctattgattgttgccgaacgggctagagagcagtatccaaactccaaaattataattgccgctgataacgacaggcacgaaccggaagaacaagacaaaaacggcaggctaaaaaagaatgttggcaaaatagcagcagagaaaacagccaaagcgatcaacggatgggtaacgttaccaccaactgagtacaaagctgactgggatgattatcgccagcaacatggtgtggatatggcaaaacaagcctttactcaagggctttatcaaccgacatcaaccaagaaaaaagcagccattcagcttaataatgatgccgagctttcaaaactgacattatgtcagatgggagccagccaacgcggggaagtattgctgtcacgttataacggtgatctggcactggatggtgcttcggaaaccgttcatcactatgacagtattatctggcgtccggtcagtgaccgtgatttaagacgggaaatggtcgccgcctttatggaagaaaaattaccgtattcaccgcatggtatcagctctgccgtagatgccctgaaattacagcttcccatgatgcaaccaccagaacgccacttaatcggattcaataatggtgtttttgacctgaaaacgtgccagtttcggcctcaccgcaaagatgattggctattgcttgccaatgacgttgaattcaattcccctgtttcgagggaaactctgcaagatcacgcatcacaattctggcgctggctcaatcaggcaacagctaactgtgaaaacaaggcatatagagtgctagcggcgctgtttatggtgttggcgaaccgttatgactggcaattttttctggaaatcaccggagcagaaggcagtggcaaaagcatctttgccgaaatttgttccatgctggcaggtaaaggcaatactgtttcggcaagtatggccgcactggaaaacccacgggaacgggcattgattgtcggctattcgctgattatcctgccagaccaaacccgttatgtaggtgatggttccggcatcaaggcgattacaggcggcgatgaagttgctattgatccaaagcataaacaaccttattcaacccgcattcctgcggtagtgctggcagtaaataataatgccatgagtttcagtgatcgcagtggtggtgtgtcgcggcgtcgggttatttttaacttttccgaagtcgtaccggaaaatgaacgcgatccacttctgcggaataaaattgcggcagaattgcccgtgattattagacatttgcttcacagattccttgatccgcaaactgcaaggtgtttactggcagagcaacagaaatctgcggaggcgctggatatcaaacgcggcacagatccactggtcgatttttgcggttatctcattgcttcccatgaagctgacggtttgttaatcggtaatgcggaaattatgccgttcaatccccgtaaatacctttatcacgcctatcttgcttatatgaaaggcaataacctgaataaacctgtttccgtgactcgcttcgggatggatatgccgggcgcactggcggagtacagccagcaatatttacgcaagaaaagcaaacagggcattcgtagcaatctgagcctgaatcttgataccgctatcgaatggatgccaaaactgacaaggaatagccagccagaagaataattttttttctgattaccaccacttttcaaataaatataaaaaagtgttcaccactgttcaccctataatttaaaccaaatatatcaaagtattatagggtgaatagttatttttaaactgttcacaactattcatcactgttcaccttttttctggttggaggtgaacggttgggtgaagagtggtgatgagtttaatttcaactcatcaccctttaacaacatgaatttaaataaaaatactcaaagatgatcagggtgaacagttttatccataattctttaatagggaggggggaggtaaaaatgttttctctggtaggtgatcttttagctatccaagttaccgggttaatgcattagcccggtaacttggagaagacaagcgtagcgcgtcagtgtggctttagctgtctttattaaattatatttttttatttatggctttagccagtttaagtcgcgttagcgtcttaaacataaaaccacccgctttgcgggtggagttcaaaggttataccaagaaaaacacctttccgttacgatatagatgttcaagctaatattcgtaactcaaataaggaaaggtgtttatgggcattaaagcacaaagctcagcgcatacaaagtggctgtgtaaataccatatcgtcttttcgccgaaatatagacggaaagtgatttttaataatattcgttcaagtgtgggagagatcctcagagacctttgtaagtataaaggtgtggaaataatcgaaggtcatctcatgccagctcatgttcatatgttggtgagtattccaccaaagctaagcgtttcaagctttatgggatatttgaagggtaaaagttcgttgatgatctttgatagacacgccaatttaaaatataaatttggcaacagaaagttttgggcggaagggttctatgtcagtacggtagggctaaatgaagcgacaattcaaaagtatatcagagagcaagaaaagtcggatttaatctcggataaattgagtagtaaagagcatgtagaccccttcaaggggtaggccaaagcagcaaagacacttagcttgaacgaagagaaagcagcgtcatttaggcgcagtcggtaacaagcccttatagggcaagagcaaaccacccgttatacgggtggttatgatttaccatttggaatggtaataaataatctgaagtaggtatgattgaaagcaaatagttaattgtttaatatcatggttattagcgtgtttttctctccttcttttttgggtaattttttaaatccatttgaagtgtatagttcgataagtttggtgttgttttcacattctaaggcaattactcttcctccaatcagagtttttaccgtaagaataatacttttcacataagtaaaaattccgtttaactttatcgtatttttcctaatggagaagttttttgctatttgcccgactaaataaacctttattgtattagcatttttactgataccgtttagtttctttgtcgttgtttttgaaattgaaaaattatatgtttttaattccttaaaagttaatgaaaagtaggcaagaattaaccctgtttcattcactatcaggtatgtcctagtgacatcagcctgttcaaatctaattgcatttatatgtaaaaaatattctacatctgggtttacggggcaggagaatgaaagtaaataccttgcggttttatctctgcctagtatcgataatactttacttaaagtgagaattttcgttttaatatttctatcgcctcttcttgttgagcgtcaatgtctattttttcaaagtcggttttaaatggccttctattagccttgcgtaacatcttaattgccttgggatcagtaatcacaatttgccggaaaattgacgaggtagccattttatctccttttatttaaatatattaagttacttaaaatagtaagtaatattatttttgctataaggaaagtatatcgatattagaaaattgaacaagactctgtttttgggaaaacagagccggctcgaaaaatttagaagtaattacaattgattttcaaattctggcgatatcagcaaatgaaccacttagtagttggcataaatcagtaggggccagttcaatatccagtcctcgcttgcctccggaaataaacagagtagataaagcttctgcctggatatcaataacagtagggagacgtttcttctggcctaatggactgattcctcctaccagatagcccgtaatcttttgtgcaagttgagggtctgccatatcggctttttttgctttaaatgccttggcgacttttttcaaatccagttgccctgcaaccggggtgacagcgacaacaagatttttaggattaccatttaatgaaaccaaaagggttttgaaaacttttgttgcatctaaacccagttttctgactacttcatcaccaaaattatgttcattggcatcatgttcgtaaggatgaatcttaaaattaattttttgtttttcgagaagaattatggcgggggtcatatgttatgtcctatataagctctcaattatttgaaatgttttttattcttgttgctgcaacaactgtagcaaattgttttcaccatgaaggtgtaatgcaccgaccgccacgacatattttcccgcaggtaaggcacgcaattgcacactccattgggagttacgttcagtcatcagggtttggtaaatagcgtcgcagaaagtttgtggcaataccgggtttttctggtctgatttgtaattcatccaccagctaatcatagtttgtaaagctcgggcgttagtatgccagtgagcaagagtgtcttctaatagagaaaggccaccattgggcaactcggtaagcaaattgatttgcttatctgttccttccagctcgatgatatctttatcaatggcttttgcactgttcagtaattggtaatcaatcccatattgaggactcattcccaggtatttagcctgagcagcctgaaggatcagggcaacctgccaggaaggcagacgatccagcaattctatcggctgatggatctcatgacagtattgctgtagaaacgaaaagtgttcagatgataaacgttgtgacagcccggcctgctcggggagtatttgctgaaatggcgaccctgactgtgtaatatctgcttcaacaattaaagcattgcattgttccagttgttccagcaatacttcagaaagtggatacatattttctgtacccatatggatactgccaacaatatgtaattgtttgttctcaggcagagtgacatcataagcaggataggggtaatttcgttgggaatttagtcctaatacattactgagataggtcataagttttcccatttcacaactccgttaatggacgtaaattgatatgctaatgtattaaaggttaacaggaaagtgtgaaaaagtgcgaaatccatagggtgtgtatgataagtagaaagctaaacttccttgtttagctttccgaagcttagatcagttaatctttcgttttaaagcgtaataatcggttagcgttactgactacggtaatagaagagagagccatggcggcactggcaatcaccggatttaataatgtaccggtgaaagggtagaggataccggctgcaatcgggatccccagcgtattatagataaatgccccgaacaggttctgtttcatattacgtaatgtccctttagataattcagcggcatcggcaactccatgcaggctgtggcgcatcagggtaattgatgctgtttcaatagcaatatcactgccgcttcccatcgcaatacctacatcggcttgtgctaatgccggagcatcattaattccgtcaccaatcatcgctacttttctgccctctgattgtaaggtctgaatagttgctgccttaccatcaggcaagactccagcaataacctgatcaatgcccgcttctttggctatagcatgagctgttgccggatgatctcccgtcagcatcactaaatgatacccctgcttatgcagacgttgcagggctgagattgtatcctgacgcagtggatcatgtattgaaaacagggctgctattttaccgtcaacagccagaagaacaggggtaatacctttttccgcctgttgtactacttgctgttgtaatgtgcttgtttcaacctgattctgttcaagtaggctcagattacctaacagcagtgccgtgttaccgatattgccgctaattcctgtgcctgccagagtgcgaaactgcgtgacgtcagttaattgtttactctctatttttctgtcttcagctttcaggagaattgcttttgctaaaggatggtttgaaccgctttccagcgcacctgcccacagtaatacctgttcttccgtgtagccgttgaaagtatgaatttccgtaacctgtggcatgccttctgtcagggttccggttttgtcaaaaacaagggtatcgagttgactggcctgttgcagggcatcagcatcgcgtattaatacgcctaattcagcagcccttccgactcctgaaataatagacattggagttgccagaccaagcgcacaagggcaggcaataatcagtaccgttgtgataatgaccagtgcatacatgatttgtggagccgggccggcaaaataccagatagcaccggcaaccaatgcaataacaacgacgacagggacaaatattgaggatattttatccaccagttgaccgatttccggtttactgctttgtgcctgacgtaccagattgataattctggctaaagtggtttggctgcctacggctgaagctttgaacagtaccgttccgtcctgaacgactgtcccggcatgaactgtatcaccgagtgttttttgctgcggaatagcttctcccgtcagcatcgcttcatccagccagactgtgccctgaatgatctctccatcaacaggaaccctatcacccgttaccagccgtaatgtcatatcgggttcaacatcagccagcggtaatgatacttcgccttctgatgtgatgactcgggctgttggaggcgttaaatccaacagtcgctcaagtgcttgtgaagagcgctggcgtgctcgctgttctaaggcatgaccaagattaattaagccgataatgatagcgctggcttcataataaatatggcgcgcctgaggtggaaaaatatccggccataagttgacgctgatggaatatagccatgcagcccctgttcccagtgcaactaatgtatccattgtcgcgctgccatttttcaggctttgccaggcgttgcgataaaaatgcccgccagcaaataccatgacggcaagagtcaccagaccaatactcagccagatggtatgattttccggtgtgagcatcatattgtcgcctatcatgccccaaatcataaccggaaccccgacaatcagagcgagggctgattgccagcggaaacggcgcatattggcttgtgcaatttgttgctgtcgttcccggcgttcagtttcatccagaatgatttcagcgccataaccggctttgataaccgcattgaccaaagcatcaggggaagctgaacccgtgaccagagcacttctttccgccagattgactctggcatttttaacaccttcaacagattgcagagctttttgcactttactgacacaacttgcacagctcatgccatccagcagaagctgaatgctgtcgtcgctgttatgagaagcaccagagccagtttttttatcagattttgtgataggaatagaagtggaatctgttgccgctggcaaaaattctggttcaggtgttgtcagcggctcattttttgggagatgcgaactcatgactgattcagcatgatagcctgcttgtttcactgcgctaattaaggcattttcgtcagccttgccgtaaattctggctgtttgcttatcgacttcagtagcaacaacaccttccactgattccagggctttctgggttttgccgacacacttcatacagcttaatccggaaagttgtaacgcaatatcggggagatctgcgattgaagcctgataaccagcatcacggatagccgctatcaagacatcaggtgttacgttactgataactttagtgtattcaggggtgacctcagcctgttcaactccgggtagatgctccaacgcttttttgaccctgctgacacagtgcatacaggttaagccctgaagtgcaagaatggttgttgtagacataataaaatctcctgaaacagagtgatatacgccgcgatgcaactcgaaatccattgggtatatacttactattattattggggatagctcgttatctgtttaggctaaaccttcctgcaaggggaaggtcaagggggaataatgaatatcagtgaaattgcccagaaaacgggcttaaccagcaaagctatcaggttttatgaagaaaaagatttgattacagcgccggggcgggaagagaatggctaccgtttttatcagcagaagcatattgatgaattaatccttttacgacaggcgagggaggtggggtttactcttgaagagtgccgggaattattacggttatttcacaaccctaatcgtcatagtattgatgtgaaggctacaacattgcaaaaagtggctgaaatagaaaaaacgattgcagaattacagaatatcaggaaaaagttattaacactggcggctgaatgtccgggagatgatggcgctgaatgccccatcattgaacaactatctggtatttgtgccaaaacatggttgatgataccagcttaattgtcagaggcctgtgtatagtgaaaatattttatatccagagtcgcttaacctgattgcatatgcgctcccagtcaggtgtttgcaaatatttatccacttcagcttcaaggatttcgatatcttgccaattgtctatatcgaacggtttgctgagcgaaaaatttgcgcgtaaatagttttttccaagaattttttcggcctgaaattctgccatcttagctgtcgtttcaaatatgagcatcaacagagctgctggtggtatctcatctttgttcccccaccgcagaggccacaaccaccaatttgctccccagcttaacggtgcataatagttgtcgaaattgatcgaagtcactccgttagacatatctccggtacctacggatagcatgcggatgtcagttgggccagaaactcccttcagggataatgcttcggtaagtgctgtcatggacggattattggcaaaaactccaccatctacgaaatagccaaaatccgtgctattcacctgaatacgatatggctggaagaacgttggagccgcagatgtcgccattgctgcatcaaccatggagatattacgaaagggattttctggcaggttggaaaaagtacacggtagccaggattgattgttttcgttccaaagctgggctgcattaatcgctataaaacgttctgagctggatagttgtgcatcagaaaaaaattcctgtagaatttttctcaggccatagttgtaatatcttgtgcccatagcaccgggtcttccaagaggttcatcattttgagcggaaacccctctagttctgcttatattttgcaatgatatttcattcgagccaaaatgctgaataccatcatttctgcaccggtcaatcattttcgaaagagtgatatcttgtggcataccttgtgatgatattccttctgtggatatcccggtaaacctactggtttttttagtaatttgaaattgtttatctaaatcctggatgagtttggtgacctgcgaatcacaaattccaggcctgtatttattctgtaataaactatggactatgaaaatattagctccctcctttttgtataaatcaaccatttttgagatagggacaccatgtgccatgcccagagctaataagcctcctgtggatgttccggcaaatccattggttcttttaataatctgaaatttcttatcgagatcttcaataagtctggctgttagcaaaccacgaattccgccgccatcgcagcaaatgattttaaaagtcatgattaaatccctattcgtttttctcagaactgggtattcgattaattttaactttcgctacattgaaatatttttatcttgactattcgttcgaagtggagctgtcatttctgctgttcttttcagaagaaacgtacatcctgtcagagcttaggtgtgcttgtttgctagggttatgtggtattgataagttttgatataacgataaatgaatgataattcagttacctgtaacatattgtaaacggaaattactaaactccaatcaatggccgttttcaacattttccatcggattcatcgtttggtttcattaaaggttaaatatggctggcatggccagcctgtattaggagtgtcgttgatgaatggttaactgcattaactgacaacaagggtttaatattttctgtgtcggtttgttgccaccccgtattatatcggcttaaccttcagtgttatcccgtcgacggcgatgatttcaacttctgtattggcagtgagttcatggtcacagtgaatgcgccagctaccatcagccagtttgattcgtccatagccattttcagtatctgtcgttaagcgggcgtgctgcccgattaattgctgatttttctgattgagcctctcatcactactcttttgtgggtggcggcgcaaccaggcccgccacgcgatagcagagagtaatgttaataaggcaaacagtatgccttgtagctcccagctcattgagggaaaaatccatgtgatcagggcgacaatgaccgctgcaatccctgtccacagcaaatatccccccgtacccagcaattcagcaattaacagtaatccaccaaaacagagccagaaccagaccggttgagtggctatctgttcaatcatagttagttatcctgtctatccttcttactttcgttaatcagctcagcaatgcctccgatagcacccatcagattgctggcatccagcggcatcataatgactttgctattatctgctgcaccgatactcgtaagagcatccgtatatttctgggcgacgaagtagttaatcgcctgcatattgccgtcagcaatcgcgtcagaaaccatttttgttgctcttgcttcagcttctgcggcacgttcacgggcttctgcctgtaagaatgctgactggcgttcaccttctgctttcaggatctgagactgtttttccccttcggctttcagaatagcggcctgacgaaccccttcagcttccagaatatccgcacgtttggtacgctcagctttcatctgggcattcatcgcggagatcaattccttcggtggacgcacatcacggatctcgatacgggtaattttcaccccccacgggttagtcgcttcatcgacgatggtcagcaggcggctgttaattaaatcgcgctgtgacagcatttcgtccagctccattgaacccagaacagtacggaagttagtcatagtcaggttgataatagacagctcaaggttactgacttcataggcagcacgtaccggatcgacaacctgaataaagcagacagcatcaatagtgacattggcgttatcgcgggaaatcacctcttgcgatggaatatccagtacctgttccatcatattgattctacgacccacgcgatcaataaacggaaccagaatatgcaaccccggcgttaaggtgcgtgtatagcggccgaaacgttctacggtccactgatatccttgtggaacggttttaacacaggtaaagacgataacgactgcaataataatcagaatgggcacagccccgagagaaagtaaatccataacaattcctttattagttaatcatggaatacataaatgcgcttaattaatagagtaaagagtatacatgacgacgatatttggatgctagtgcatctccggtaccgagcgcggtgataatatccattagtgtttttttcacttcaccattggcagcagagagatcttttttcagaaaaccgaacaataattcaagcgcttcttcattacgtccgacttcatgtaatttagacgccaattgaagcgcaagttccgcattttccggctgagacgccatttccagcaaaagctgcctgatttcaggagaatccgctgcttgtttgtgtgattcaatggtagccagtaaatcatgataacgttggtcttgctcttctgatggaatagtttccagtactttttgcgcttcttccagatgattgaatgaaatatgaacttcagccaaaaataagctaagttccatatcctgcggatcttcctgatgagcttctttcagtaaagacagcgcttcctgattttttccttcaacaagtaattcacttgcctgttccagcggggactttcctgaaagtggcagaatttgggcaaacatctttctgatgttttcgtcggtttgtaccccttcaaagccgtggaaagggcgggcttcacgcacaaaaagtacggttggtacagtccgcaccccgaattgtgccgagatatggcccagttggtcacaatcgactttcgccagaataaattgaccggcatattcatgggcgagtttatcgagggtggactctaattcatgacaatgcagatcctgaggggaccagaaatagaatacaacaagtgtggttagagactgttgaacaacctgagcgatatttgcttcattaatgcgaacaatctgagcagtgttgctgttagtattcattgttggttccatgggttctctctcgttatatgggcattcattaaagtatacatagggctggcttgccggtttttcaatctgatgactaatgcgaagatacgattttatcgattaatcttgctggcagcaggcgacgcagaacagtaacagcatgagatattagcgtcacaggatagcgtaacttagggttagggctttccagtgcatggattaatttttccacaacatcttccggcgtcatcgttaaacggcgagccattgccgagttttcgacggggttatcaatctcggtctgagcaacattttctgtgaaacgcgttttaatcggtcccggttgtatcagactgacttttattccacttcctgctaattccattctcagggcatcagaccaggcttcaagcgcatatttactggcagaataggcaccacgtcccggcgtggcaattaaccccagcacagagctggtctggatgatccgcccttcaccattcgcccggattgcgggtagaagcagacacgtcagctgatgggtaccaaagaagttggtggaaaattgtttttccatctgttcacgggaaatactcgccaacgggccataaacgccaaaaccaccattattgaataatccgaacaaacgaccatttgttaactcaataacttgctcagcagctttcttaacactttccggatcatctaaatccagttcgatgggttctaaacctaattcgcgcatatgtgctaaatcagcaggttacgggcaagcagccaaaacacgatagccacgttgatgaagtgttttggctgcggttaatccgataccgctggagcatcccgtaataagaatggctttttgcataactttacctgtcaatttacaacaatttactggcataaatgatttactattaataagtgaacatttttacttatgggtaatatatgccgatagttttctggacatccaatctgcgataaaaggttgtgcggcctgattggggtgcaacccgtcatcttgcatccattctggtttgatagcaacttgctccataaaaaagggcaataaagggatatcattattttttgataaagcagggtaaattccggcaaaagattcggtgtaacgtttcccataattgggcggaatgcggatttgcattaagagcggctgagctttgctctgtttgactaatgaaatgactttttgcagatcctgttctatttgccgaacgggaaaaccgcgcagtccatcgttagccccgagttctattaaaacccatttgggtttgtgttgtttcagtaattcaggcaggcgttcaaaaccttgtgctgcggtattcgcgctgatactaccattaatgatattcactttattaccggattgatgccactggtttgccataagaacaggccacgactgctcaatcggcaagcgataacctgcactgaggctgtctcctaatatcagcagagtatcagccgccattgctctggcactgcatagcattaacaataaaaggaaaaatacatggctgtagagtgtgctcttaaagttcataatctcattaaatatgttggtgaaggggaacaggtaattaatatattgcaaggtgttgagctgcttgtcgagccagcgcagacaattgcattaattggtgaatcaggttcagggaaatcgacccttttgggtattattgctggtttggatgacggcagttcaggtgaagttcatctgctggggcagaatatcagccgtatgaatgaggaacagcgggcacagctacgggcagaaaatatcggttttgttttccagtcgtttatgttgatccccactttgaatgcactggagaatgtccagcttcccgcacttctgcgcggagaatctgaaagtcagagccgccagcaggctatcgaattactggagcaactgggtttgggtaaacgcctgaaacacatgccagcccagctttcaggcggggagcagcagcgcgttgcattagccagagcgttcagtacccgtcctaaaattttgtttgcagatgagccgacaggcaatcttgatcgtcagacaggtgagcgtattgcggatctcctgttttcactcaaccatgattatgcaaccacactgattttggtcactcatgatagccagcttgctgcccgctgtcagcggcgcttacgtctggtagacggaaaattgcaggaggaagcatgatctggcgctggttctggcgtgagtggcgtactccgtcgctgttgattgtctggttatcgctgacgctggctgtggcttgtgtcttggcgctggggcgtattggtgatcgtattgatcagagtgttcattatcagagccgcgattttctggccggcgatctggtattacgggcatcatatcctgttgatccatcctggctgcaactggcacagaaaaaagggctgacactcagccgacagatctcattttcaacgatgacttatgcgggagacgttccacaactaacggatgtaaaagccgccgataaacattatccgttgtatggtgaactggaaaccagccctccgggactgaagccggaaaaaggttcagttctggttgccccgcgtttgctggcgttattacatatcaaagtgggagatagccttgatgttggtgataccacactgaagatcagtggagaacttttgcaggagccggatagtggtttcaatccgttccagctctctccccggatcttaatcaatatcgatgatgcgcaagcgacgggtgctattcagccgggaagccgtctgacatatcgttacatgtttgctggttcaccagatgcgattcagtcattccaacaattaattgaccctgaattaaaagcggatcaacgctggttaacattgaaacaggataatggcgcgctggcaaaatccatcgaacgcgcccagcaattcctgttgttatcagccttgctgacattattactggctgtcgctgccgttgcggtttctatgacgcattattgccgcagtcgccataatttggttgcgatactgaaaacgctgggggccgggcgttgggcactacgcaaatggattatcgggcagtggctggtgatattactcgcggcaactgttgttggttccgtattggggctggtttttgaagctgccctgatccgggtattggctgcgatgttgcctaaaatgttgccggaagcagggatgtggccgtgggtatgggcgattggcgctctgctcagtattgctctgctggtgggaattcgtccttaccgccagttgatggcaacccaaccctccagagtattaagaagtggtgtttctgccagtgtctggccactacgctattatttgcctgtagttgctctgattattgcaggaggattaatactgttggcagggactgaaccactattatggtcattactggcgggagtccctgttgtcgcacttttactaggtggattaggctggagtggcctgtggttactgcgccgtatcacatttcgtcagctgagcctgcgtctggctgtgagcaggctgttatgccggccattccagacaatgactcagttggccgcgttttcactctctttcatgctactggcattgctggtaatggtgagaggagatttactgaaccagtggcagcaacagttaccgccggatagcccgaattatttcctgatcaatatgactcaaccacaactcacatcagtggatgagctgttggcacaatatgacgtaaagccaacggaattttatccggtggtactggcgcgtctgacagaaattaatgggcagtctgcgcttgaatgggctgacaaagtacatccgaagagcacgacggtacggcgtgaacttaacttaacatggaaaaaagaattaccgccgttcaatacccttgttgaaggtaactggccgccgcaatcaaaggaagtttcccttgagcagggagttgcggatcggttgcagattaaaatcggcgataaactgactttcaccggtgacaccagaacttttaacgttacagtcagcagtattcgcaaagtggactgggaaagtctgcatccgaactttttctttatttttgataaagaaacactggcacagcagcctcagacatggctgactagcttccactatgtcggaaacgggaaattactgacagaaattaatcgccatttcccaacgatcagcatgctggatattggttctatggttaagcagatccaaggtatcttgcagcaggttagccgggcactggaaatcatggttgtgctggtaatgatatgtggagggttactcttattggcacaaattcaggtcggtatgagccagaggcagcttgagctggtggtttatcgcacactgggagccagtaagaaactattgcggcgtacattatggagtgaattcgccttgcttggttttatggctggtctggcggcggcatttggggctgaaatcgccctttggctgttacagacacaagtctttgagtttccgtggcagccacagtggttgatgtggcttctgttgccggttatcagcagcctgttactttcactttgcgggggggggctgggagtgcggctgttgcgcaggcaggcgcaataccggcgtctaccggaataaataaaacgtttctgttctattcacttttaacacattaccgagaatgggaagctttggcttcccatgcttcagaacagtgaatttccgggtgatacaggcatcctattcagttttaactgaagcgcctcttattttatggctgggtggtttcattaccattgttacgattaacacagcaaaaacagggaaagcaatgatgaggaaagcccaggtaaaactaccggaataatctttaatagctccagcgaagaaaggagccaaacaagctaatgtagaaatcagattcatgatcgagaatagttccagataaggcttacgaccaaaataattggcgagcaatacactggaagcgagaaaagtcatgccgtatcccataccgacgaacagcgtaaatgcaatcaggaatggccatgaaaaggcaatactcagcgcgattaagccaagaataatgatagtcaggctaccaagcagtaattttttgggctcaagccattccccgacagcacctccggccagtcttgagaatgcattgataaaagccatggagcttagtaatcctgcggcaatggcttcattgaaaccattttcaataatatgggctacagcgaaactattaaccgtaataccacaccacaaaaatgccgtgtaggtggccgcaataacataaaactgccatgtccgtagtgcctgatgggctgtccagaactgttgggtgcgatatatactggatgagttttccctattatttttttggctgattgctttagcgtgggcaatttccttttccccttcccgaagggtgaaaatagtcacgataacaaaaacagtgagcactatggcggagatcatccagtgcattcgccaagttccccagacccgggttgccagaaaatagatccacgggccaatcacgccgcccagcccgccaattgtaaaatagaacccgaaagccagagactgtttttcatataatcgtgaaataacataggtgccgggtacagtggccagaaaggtaaaaccgacaccaattaaagccgttccaataaaatatgatgcaatggcatgggtatgataaaggttgtagaagccagccagaaaaatcagtaacccaataaagagtgtgaaccgaacaccgaccctgcgaataaacacggttggcaggaaactggacagcccgcaggtcaggccaagcagtgtgaaccctaaaccggcatcagtccagctccagcccagttcattaatcatgctgggaaggacaacacccaatgacgtaaaggttgttgctgtggatagaaaatagaccatgcctaaaagtatcagcaaaaaccactgataagtacgcccgaatttgtcgtattgagtggacattatgaccccatcaaggatatgaaccgttaaaaacagcactattttaagtggttatcaggaaaaactgtatcgaataaacacaccatagctcaattggttagtatgaaaataagatgtatctttgattttgtatttatttttaaccggattgaggaaaaaaaagcctatagatgactggcttgatatcctagttgttttccaagtgataatgcaattttggttgaaagttaaacacttttgaagtaaagactggtatcaattgatggagaattgacggaattaacgaattacacttaacttttttcattatcttatggaaaattacataattttcgctgtcatcaattaaattaacgttacaatcaaaaaaagtgctagtgttaaaaccagcacttttataaggagaaatgaatggaagaggagatatagtatttttattatttaaaatctgatttttatttcatggaagaattagtatttcctaccatcattacataatagataatatattaacctgtgatttattgcagaataatctagctatgtcgtcatcatgattttgggttctatttgttttctggatcattattatctgtatgaacgcctccccgtttgcaaggcttccgttgttttaacattgacgagtagttgcagctctgtatccggccttattgcagccagcgctgcgggccactatgagattcgctgacctgatccttattcctctggcgggctttatgccctggcaattattcaggtttctcaggtcacggtcttaccgtctttgtcatcactctggctgccatagcaactttttagcattcacccttttctaacgagttaatatttatccgtatccgcgattaatatggcctgatactgacatgatttttttcgtatttacggtcatgagcagctattgcccatattgttcgggccagttttatg

SEQ ID NO: 268 - DNA, 22514 bp, Xenorhabdus sp.; identical to SEQ ID NO: 267
  CDS (1906)..(2217)

SEQ ID NO: 269 - DNA, 22514 bp, Xenorhabdus sp.; identical to SEQ ID NO: 267
  CDS (1155)..(1895)

SEQ ID NO: 270 - DNA, 22514 bp, Xenorhabdus sp.; identical to SEQ ID NO: 267
  CDS (1)..(792)

SEQ ID NO: 271 - DNA, 15714 bp, Xenorhabdus sp.
  CDS (6485)..(6973)
gtaaaaggaagttcgctctttaacaatttaacttcctccttgaaaacgggaggccaaaacaagttggttttggggtgtggtgactgagcctaaaagtaatcagtcctcaagcgcaggtgatgactgtatcaggactacgggaggcgcgatctgcgatagagccacaacgtagcgatcaccacaccatcaaaatcaatttgcggaggacatatgaactcacgacaacgttataaattgagacggaagcaaaaccgcatggaagcaaggatgacagcaccaagaacgatcgaggaaattttggattcaatcattaagccagtagatgaaattgatgtactggcgcaattgatgattgagttgaagaaagagattaagaacgacaacaacagcggctcttgctgtatgagtgaagtagcactttattcaactaaaaccaagctccgctctcgtctaaaatcggaagatattacagctagagcgtaagaacatgaggtattatttaaaatttatcttactgaagaatttatgtgctttttctttggatactccacaataatgtgtagataaatcttttacctcttttttacataagctgcatattaacggtatctcttttttgtacttattctgttttttagattttttactattagcaggatctgcaatattcttgttacattgttttgcagtatctttttttgcatcaagctctaaattagctatttgtttcatttgagcgggctgataactgactcctgtggtatcacaatcactcgtaactattctattggtggatactgaatctatatacccccatcccccacaaatagagcatgaagtattatttccaccacaagaacacagcttgtcaagtaacccactcatatctatttccttttcttgttaagttattacatcataaaaagggattaataagtaaaaatgagacataagtgactcttttatcaccaaaaataaaggaaagcaatactgttaacgcattaacctgctttattacgacagttaacggtgctccatcgaaaaaaccaatttcaaccaaaaccaaatcccgccgtcgattggagtcggggaatgttactgcgagggtgtaagtatgactaaatctcaagctaaatttgcaatgttatgcgctcaatctgataaagaaggatatgaccattatcgtagtaagttaattgtttatcgagataaccctgttttacgtagacttcatattgaaatttgcttgatgtatcgtaggcattatcgctcatggcttaatgatattcctttatatctacgtaacaactatggttgcatttaactaattccagctcatttccgagtgggctgtggtgagttaaataacagcctcgccaatgcggggctttttattacctgaatataggaaagtgtaatgagcagaattaatctaacaattaaacaaatacagtatatctgtgatatggctggtatttcttacgagaaagtggaagaagatagattgaatgaagaatataccatcggtaaagtaggcattcaagatgaaggtgggatttacttcgaacaaatgggggtctattgcactgattatccagaagatggagctatgtctttggaggatagataatgccgaaacacattcacgctgatttaatatctgagtacgctaggttgtctcatattaccgataggccgtgggagtattttgaggttaagtatgaagttaatggcgaatgggaatcttgtttatctgatacctcatttcatcaattattttcttaccgcctcaaaccccgcactatcaaaatcggggaatatgatgttcctgagccagttagcaaccctgatttattcaagttagaggataaaaatgaatattttatgccatcaattataaatggagttcctgattatttaatatctcgttgggattggtataaaactgactcagaaagactaaattcaggaattattcatctagataaggaatcggcgatattgcacgcaaaagcccttattgctctgactcagaaaaaggaatagccatgggtgatgtcggtgatgattatagagtgtggagggaggaattaaaaagacgtaaggaggaacggcattcaatcaatagagataaatattcgtcgattgatattccctacactatcgataataacggaactgttcgttttaataccccaaaagggaaagtacttttttatccaaccacaaataagtaccagtataagcaaatcgtcaagcgcggttctttggaatcggcaattaatttcgctaaaagtctcggcgctaaataatccaacccaaaaataacgcatcgttttcactaacgagggctttttatatgcgtaataactcattcgattggtgcatggtcatacccaaaaaaccacaagcagtcaggaaccggcgcgcatggaagcgccgtctcgccttattccttatttcaattgttgtgcttattccagcttaacggaggtcattatgtaccccatcactctaagttatacctatgcagaaacaaccagcagagtcttgcacggacgtactgaaatcacgttcacctaccccgcagatctggtactcgatataccattcactgagtatgctaaacgttcgagtccagatatcagtgatatgtatacccatatccgaacacattgcgatgaggagcgagcagccgaagagatgaaaaaggcaggctatacctatcatgaagtcatggctattgctcagtatttcgaagaggaggtcgtatgagatacgactctaatgaaacctattggaatgaccgccgtaatgaagctgacgatattattacggcagcagcttgtcaggaaatgaccgaaaaagaactcgacgaagaggttgagaaaattgtcttgagttttatcgataattcattacctgaagaggctggcaaagtacttaacccgatattcaaaagcaacccctctgcgtgggatagatacgtaggtgtcctgaatgaggtcgtgatgataggcctgaaggataaaatcattgggagggcagcatgaagcccggcatttattacgatatctccaatgaggactatcacaagggcgagggggtgagtaagtcgatgctggataaggtggcaaaaacaccggctcttttaatctgggacagagacgcgcctgaagatgaggagaaaaggaatgctcttgatatgggaacagctttgcattgcttgttattggaaccggatgaatttgataacaggtttattaaggcaccagagtttaatcgtcgtactaatgaaggaaaacaagaagagaaagaattcatagagggatgcaagagtacgggaaaaataataatggactatgaacagcatcgaaaactgcaattaatgcgagacagtgttatggcgcatccgggaggaagaaaaatatttgagcatgacggaacatgcgaaacatctatctactgggacgatcctgaaactggcgaattatgtcgaatacgcccagataaactgatacctgatgaaaatctcattgtagacgtcaagaaagtttctggcataaataggtttccttctaacatcgaggaatatcgctatcacgttcaggatgccatgtatagtgaaggctaccgacaacataccggcggaattatcccaaccttttgttttttagcagtcagtgagtctatcgattgcggtaaatatccggtacgcctatttgtgctggatcagtacgacagagaagttggttttgatttgttcagaagagacttaaatacgtaccacgagtgccgacaaaagggaaatttcggcttaggttttgaagttgttcaacgccctgaatgggctaggagaagagatgagtaacgttatcaatccatttggttctaatgtaccgcaagcacagtccacgcaggggatggtagcagttgaacagcagcgcgcgatacaagaagtacaggccgcaatggtgattgccaaaaaattcccgcgtgacccaattgttgctatggacaaaatattacaggcatgtactcgcgctacattggctgagagtgccttgtattcatactcacgtggtggtgctgaggttactggccccagtattagattggctgaagcggtcgctcaaaactggggaaatattcaattcggtattcgtgagctggaacaaaaaagcggggagtcgactgttgaagcctttgcatgggatatagagacgaatactcgacaggtaaaaacatttactgtccctcatattcgctttactcgcaacggtaaaaagaaactggaagaccctcgcgatatctatgaattagtagccaaccaaggctcaaggcggttacgtgcctgtattctcagtgtcataccgggcgatgttattgaagctgcggttaatcagtgtgatgtgacactcaaaagtaacgccgatacatcgccagagtctatcaagaaaatggttgacgtattcaaaacagaatttggcgtaaccagtgatcagattcagaaacgtattcagtgccgtgttgaggcaatgcgccccgctcagatggtacaaatgaagaaaatctacgcttctttgcgtgatggaatgtcaagtgtagatgattggttcgataaaccagaaacaacccagaagcaggttgataaactcaatagcatgggagataaagctgatgatcgaggaaccgaataaatattttgaaggtaagccgtgtaaattaggtcacacagtgaggtatgttagaaataaatgctgtgttgagtgccataaggaatcagacaggaaaagtagaaagaactctaaaaatcatgaaaggatatcaagaggaagaatttacctacctaccgattttcagcaccgagtgtttgtgctcggcaatccaaatagaactctttaaccccataccctatcactacgctgctgtgcggcgggaggattatttatgtctactaattatgattcaaaactaattgtcggaactgaactggaaaatgtaagtattagcgatgaagaaattgaagatttagtttgtgaaggttatgcgcgtcatggctcttatttttctggtgagttctattttattggcaaggaaattcacaccgccactatcacatctgaaaatttcgatgaagagtatttatcactaaaggatgaggttgcaaaagcgttaggggtagatattgatgatgtctctttgcgaaatggtgttctaatttggtaaatgtagaaacatttaattggtatgtaatgccgtgaaagcagcattaaggaggttgcatgtataccccatggaacccaaatccaaaagcgatcctcagagttaacgacccctaccccatcccgacacactgccgatattgtggcaggcacgtgatgattgagcatcatctgaatgtctttaaacgcatccatgacagccgctggccgtggttataccactgctggacatgtggcgcgcgtgtcagcattcatccgggaaccgatatcccgatggggtcactggcggataagaaaacgcgtcaggctagagtatcagcacatcgatactttgatgatgtcgtcaggagtcgtaatttagaacgcacggaagcgtatcaatggttagcacgtcaattagacatcagttttaacacctgtcacttcggctggtttgatactgatatgtgtaagaaagcagagagtatatgtagggagtttaaatgaagccactgaaatttaatgatgaaatgatagacgctattttggcaggaactaaaacacagactcgaagaccaattaaaccacagcctcagctggatgaacaaaggctaagtcaaatgggttcgataggagaaggatttactcttgaagaagtagttaatggcgcatggcaaagtggttttattgatgttgactgcccgtatggtcagtttagcgacattattaacttcaccgacaaagacggcaatatcaaagggaagcttgagattactgatatttggattcaacgagtacaaagtataagcaaaaaagatgctatagcagaaggcggcccaccaagccacacatcaatagatgaagtatcacagcagtttggttttcctgatttttctcgctcgtggttcgcacaaacatggtggtcaatctacgacaaagaaagttgggatgctaatccgtgggtttgggtaattgaatttcggagaattaataatgagcaatgatgtaattgagttggcgcgggaaatagaagatatggtgttcagggcagaaatagaaataactaattttccaaaaagcaaagatggtaaagggattgtgtacgggaaagtatttcatgacagcaagaaagaattccctgatggaagtgaaataattaccactttagttcggaacatcgaaacttatgaatcggacgggtatataaaaacccagaattcagtttataaaatacgtcacccaaacaaataacgagaaataacatgtcagattttggtggtagcaatactccacccgaatttaaagatttatggcaaactcccctcccgttatttaaagcactcgacctagaatttaactttacccttgatgtagccgcatctgctcaaaataccctgtgcacacattatctcacggaacgagataatgcattggagtctgactgggtgagttacggtgctatctggtgcaacccaccttattccaatattagtccgtgggtagaaaaagccgctatcgaatgccaaaagcaattgcagcccgtcgtgatgttagttccgtccgatacctctgtgggctggtttaagttggcattggaaacggttgatgaggtcaggttaataacgggtggaagagttcaatttatacccgtagagcaaagaaagagaaattcaaatacaaaaggctccatgtttttaatttggcagccttttattaccccacgaaaattaataaccactgtagataaagaatacctattcaatataggtaataacgaaataaggaaaataacgtgaatataccaaaaatatcaattgaaatatctcgtaaatcagctaaagagttttgtgatttttatgatgatgacaagttatctgatgaaagtttggttttgtccataactgatactgtacaggatgcattaaatgatattgagtttccagcttcggaaataaaaaccacacttaccgatgactaacgaattcgagaacgccaggaggaaggtggcaagggattgccttaaagaaattgagaaactatccaaatacgacgacaaatcagtcaccgcaattctagataaacatacccccaaatttaaaccactcaaccacatgagattcagtgctaaatcagtgctggcttattatgtgcggattattcggaaggagaggaaatgaaactcatgcaccgccatcaggaaaaaaatgaagtgttcagtcactcattccaactaactcagattattgcctcagtatggggtgatccgtctgatatcactgatgtagtctggcattctggataccgtaagccggaacgggaagcaacagaaatagctcagctcactatcgacattatggaaggtgtgcccgatggggtgccctactctgcaagaccgaagaatttgaacgatattctcatggcggaactgagcgacattattttcgatgcaacgtggagtgataaagcaacaccggcgagtgtggcgagggtgatattggagagcgggtatcagaaaggaggggagcagtgaaaatgaatacggtattcttattaatggcagagtttgaaacttcgcaaattcttctgtcagctatagccgagaagtaccttaaattgactccagcgacagcagaacgtaaggctattgaaggtaagctaaaatttccgacatacagaatgaatgacagtcagaagtcgccgagaattgttcatgtgcatgacctcgcggagtacatcgataagcaaagggagctggcagcaaaagaagtggaaagaatgcagtcgaagaagaaagtaaattgattggaattcatatccgggtgctatttctcagcaccccaatagcacccctgtaattattaattatttgttttttatgttaatttacactataattaatagaacaaacagcctctaaaccttccagactccattcacctgtatctgtatcaacattcggcgtataactttttgctggtgaataaatagacccatcactgttataccccgtaatttgaacctgcatatgtttttcatcatcagctgtatcgctatttatccgacccgataagctgtattttccgggaggaatagtttgcccatccttcattgaggtaatcgtttctccacatgggggaccattaaatgtaacacccgagtcacccataccagaaatactcacagtgccgctaataccgcacggcatccagagatgtgctgtccaattatcaccatcacctgtaggctgggttgaataactatggctatcgaaactggtaacaagctcaggccagcttccatcttcagtacggcctgttcctgaaacagtaatatagttattgccaacggtggaattaggtttcgggctggttatctttgccgggcaactttgtacagaataattgacttctggtagacccggcattcccgatgtatcaatatagcttgaagacacagatgaagaagctttatacttaatggaacaaacagcctctatatcttccagactccatcgacctgtatccgtatcaacagtcggcgtataattctttgttggtaaataaatcgacccatcacggttataacccgtaattttaacctgcatacgttttgattcatcaatcgtatcgctattcaccagaccagataaactgtattttccagcaggaatagtttgcccatcctgcattgaagtaattgttgcaccacaccagggaccatataacattatagtagtataaactacgtctttaatttgaatgtcactcttgatataacaaggccaccagatttgcgccatccaattatcaccatcacctgtagaccgagttggataagtttcactccaaacaaaggcgtaaatctcaggtaagcttccatcttcattgagccctttccctaaaattgtagtatagttgttgcttaactgtgttcccgatttaggagatgtaattcttggcgactcccagtttttatcatcttttatagtgatagtaatgttataatcgtctgtaataggtgttccatcattatttaaacaattattcccaccacaatcggcggaaacctctaacccacatcctcttttcgtatcaacatggtaaaaccaacccatccctgggccgaggagcgcgaacggattataagaaaaagtcaaatcaacatagcaacttttatattctttattattaaaataagttgttgctgtccaactaatgctttttgctacttgagaacatacaggaaaagaaaaaacgctgtttctaatttcaatttgttctgttttttcgtcccctgcctgcaaatcaatatttttttctcctgaattatacatacaatgatcatcatttctataaagatttaatttatcatatttactcgcgttcttaattgttaaattgtaataagaagaaggaggtactaaaaatggctttcctttcggtttatcttggttatttatcttatagggaacaataacatttttatctaaatcaattgcactagagttatgaaaaaaaattggggtaataaaaaacaacatggcatataagtttatttttttcataagataatagctcattaaaaaataatgccgttgatgaaaaacaacagaagtaattcacaataaattcataaagaataaaattcaaccaattgcatttataaaaaatgagccatctgttatagacttaaactactgatcgatataacccattcaatatacaccgaagaaaaatacatcaaaaaaacggttgacaagcaaacaaggaaccagtttactagtacgcaagatttacttgttgaacacatataactaacactctactttaacaaggcacttacgatgatcacacttatgaaagcagctcaaaatatgcgttggtggcccagcttcccattcagggcggttgagtagcacacataagtcgagatccaaagtgccaataacccgccctgaaaagcgggtttttttataccaattttctgtagaaaaagataacaaaagaggtgggtatgatgggtaaagaatttaatatttcagtaaatcaacgagagacagtctaccagtctgatccaacgttgcttttcaatgagttatgcaataaccggccagcaacattattgttagaatcagcggaagttaacagtaagaacgctatcaaaagcatgctgattattgatagcgctatgcgtattaccgctaatggccgacaggttgattttgcagcgttaactgaaaatggcaaaaatctgctgcccatcttagccggcctactatcagacaaagctcagatcactctcgaagcacacactcttcaggctcaatttcctgctattaaggaaaatttagatgaagacagccgtttaaaagccgattctgtttttgatgcattacgtgctctgactcaattatccaccctggctgaagattctgatgccattttttcaggtggattattttcctatgatttagtagcagaatttgaacagcttcccatactcaaaacctctcaacgctgccctgatttctgtttttatctggcagaaaccatgatggtgatcgaccatccgcgccagcacgccatattgcaaacaacacgatttggtgaatcagaagcagaagaacagcgccttaacgagcgtttatctgcactggaaaacatcattgctaagcctcgtcaacccttaacgcccgtaacattacctgttatacaaattgcctgtaaccgcagtgatgagcagtatgccgacatcgttcagcaattacagggttttatccggaagggtgatatatttcaggtcgttccatcccggcgtttcacgttaccctgcccagcaccactgaatgcttatcacaccctgaaaagactcaatccgagcccgtatatgtttttcatgcaggatcaggatttttgcctgtttggtgcttcccctgaaagtgcccttaaatatgatgccgatagccagcaaattgaaatttatccaatcgcgggcacacgcccccgtggacgcaatgccagtagtgaactaaatgcggatctggatagccggcttgaactagaaatgcgtaccgatgctaaggaattatcggagcatatcatgctggttgatttagcccgtaatgacatagcgcgtatttgtgaatcaggtagccgctacgttgctgatctgatgaacgttgaccgttattcatttgttatgcatcttgtttcccgagtggtcggtacactgcgccacgatctggatattttccatgcttatcaggcctgtatgaatatgggaacactaacaggtgcaccgaaagtccgggcgatgcaacttattgctcaatatgagaatgaacgtcggggcagctatgccggtgcagtgggttatttcaccggtaaaggggattttgacacatgcattgtgattcgttctgcctatgtagaaaacggagaagcaacggttcaggtcggagccggcatcgttctggattccgtcccacaatccgaagttcaggaaacccagagcaaatccagagccgtcattcacgctatcgctcaagctcataacacagaggtaacattctgatggcaaatattcttctgatcgataatgttgactcttttacctacaatcttgtggatcaactacgctgtgggggtcatcaggttgttatctaccgtaatacggtatccgtcgagataatcatggctcaactggaaaacatggcatcaccattactgatgctgtctccgggccccggaaaaccttcagaagccgggtgtatgccacaattacttcagcaggttatcggtaaaatccctgtgatcggtatctgcctcgggcatcaggccattatcgaagcctatggtggcaatatctcagccgccagtgaaattctgcacggtaaatcaacattagcggctcatgatgggctggctatgttttccggtttacctaacccgcttcccgttgcccgttatcactctctggtgggtgtaaatattccggcaacactgattgtttccgcttattgtcacgatacagtaatggcagttcgtcacgacgagaacagagtttgtggattccagtttcaccctgaatccatcctgacaacacagggaacccgcttacttgagcaaacactggcatgggcactgaattcacaggaatcggggcaataaaagggagggtgggaaaatgcaattaattttagaaaaactatttagtgcccaggcactgacccagcaagaaagccaaaaactttttactgctattatttgtggcgagctgagtgagcctcaactcgcggccgtactaatcagtatgaaactgcgcggagaacagcctcaggaaattgccggggctgcacaggcactattagccaatgcatcttcatttccacgccctgactaccctttctgcgacatcgtcggaacaggtggtgacggaacaaacagcgtcaatatctccacaaccagcgcttttgttgccgcagcctgcggccttaaagtggcaaagcatggcaatcgcagcatttccagccgttcagggtcatctgatttactggctgagtttggtatcgcactcaatgccagtgctgaagaatcccgtcgggcactggatgaaatcagtatctgctttctgtttgctccgcagtaccacagcggatttcgccatgcagttaatgttcgccagcaactgaaaacccgtactttgtttaatgtacttggtccgttaatcaatcctgctcgcccgcctcttgccctgattggtgtttacagcccggaattggtaaaccctattgctcagacattacaggtattggggtttcagcgtgctgcggtcgtacatagcggcggcatggatgaagtcgctttacacgctccaattcaggttgctgaacttaactgtggtgaaattatccaatatcagttaacagcagaagactttgggctgccaaatcacccgatatcatcactcagcggaggaacaccgcaagaaaatcgccatatgacgagcttattattacaagggcaaggtaaaaaagcgcatgtcgatgcggtagctgccaatgttgctcttttaatgaaaatacatggtcaggaagatttacggcaaaatacacaacaggcattggacacgatttacagtggccgggcctatgaaaaagtgatcgcactagcagcagggatttaatcatgaaaagtaatgtattacagaaaatcgttgaagataaggcgttatctctcatcacccgcaaggctgaacagccgctggagagttttctggatgctgttgtaccgagccatcgccgattttatcaggcactgactcacaaacagactgtttttattttggagtgtaaaaaggcgtctccttcaaaaggtttaattcggtctgattttgacccggtacgcattgctaaaacttaccagccttatgcggctgcgatctcagtactgaccgacgaaaaatattttcagggcagttatgattttctccgtatggttagtgcagccgtacaccaacctgttctgtgtaaagacttcatcattgatccctatcaggtttatctggcccgctattatcaggcggatgctatcctgttgatgctttccgtacttgatgatgatacctatcgcgaactttccgctctggcacatagccttaatatgggagtattaacggaagtcagtaatgaagctgaacgccaccgggcaattgctctgggagcaaaagtcattggcatcaataaccgtgacctgcgcgatctgtccatcgatttacaacgtacccaaaaactggccgccggtttaccaaaagagactatcgttattagcgaatcaggaattcacagccaccagcaggtacgtgatttaagccagtttgctcacggttttctgattggcagtgctttaatggttcagtccgatttggatctagcgttacgacgattgattctgggtgacaacaaaatttgtggtttgacccgtccacaggatgccaaagctgcattgcaggccggagctgtttatggtggcctgatttttgctgaaaaatctccacgtagaattagccagcaacaagcgcaacaaattattaatgaagttcctttattatatgttggcgtattccagaatcagcccgttgattttgtctgccagactgcccgggcgctttcactgacagccgttcaattacatggtaatgaagatcagccctatattgatgcacttcgttctttattgccggaaaattgtgaaatctggaaatctgttgatatgtcgaaaactgaagtattttccggtctctccaatattgatcacttattactggataatggtttcggcggtacaggaaaaacgtttgactggaaattaattgataaaggttctcaacataacagtgttctcgcgggtggtttaaatgctgagaactgtcgacaggccgccgcattgggttgttacggactggattttaattccggtgtcgaaatccagcctgggattaaaagcagccagaaaataaaacaagtcttccaacaattacgctgctacccgtaatctttcagataactaatattcagacagaaagtggaaaatgaaaataatgagtaaattaaatccgtattttggtgattttggcgggcagttcgtcccccaaattctcgtccctgcccttgatcaattagaagaagcatttatcgaggcaaaagatgatcctgaatttcagcaagaatttcataacttactgaaaaactatgctggccgcccaacggctttaacgttatgccagaatttaaccaaaggcacaaaaacccgtttatatctgaaacgtgaagatttacttcatggcggtgcacacaaaaccaatcaggtattagggcaggcattactggcaaagcgaatgggaaaagaagaaatcattgccgaaaccggtgcaggtcagcatggggttgcaaccgcactggcatgcgcccttctgggcttaaaatgccgtgtctatatgggtgcaaaagatattgaacgccagtcccccaacgtattccgtatgcgtcttatgggagcagaagtcattcccgttcacagtgggtcttcaacactgaaagatgcctgtaacgaagccatgcgtgactggtccggcagctatgataaagcgcattatttgcttggcactgctgcggggccccatccttatccaacaatggtacgtgaattccagcgcatgattggtgaagaagccaaagctcagattctggaaaaagaaggacgcctgcccgatgcgggtattgcctgtattggcggtggttcaaatgctatcggcttatttacagaatttattccggaaactcatgtgcgcctgatagggtgttgaacccgcagggcatggcatcgaaaccggagagcatggcgcaccattaaaacacgggaaactgggcatctactttggtattgaaaacgcccgatatgccgacagaagatgggcaaatagaagaggcatactccattttgccggggtagat

SEQ ID NO: 272 - DNA, 28262 bp, Xenorhabdus sp.
  CDS (27820)..(28260)
ccagagtagcaggaacaatgagggactggaaaaataatatgttgctgacgagcgtgggtcaatgggacaagccaaaagcagcggctcaagataagaatccggttcatggttttttatcaggggcagccacattcgttaatccgttcggctttaataacggtggcgaccagctagcattattgaaaaaagcaaaaaaagatgatgaattcaggaaaacactgagctttaaagaaaaaacggatttattgcttgaatatgcgtcagaagacttaatcaacaagctaaatgcttactatttcccgaataaaaaacctagccatgttggggaaaaagtccctgatatccctgttgtgcggggatccaactacgctaacccgctaaaagaatctggaaggcaacctcgcggtattcgcaataataatcccggtaatttaacagcagctcctcatgctgtgggtaaagaatatgataataatcatacttacgtgaaatttgacacagcccatgatggtttatcagcgatggctcgtcagttgatgctcgatgcagaaaggggtcttaatactattgatctctttcttgataaatacgcttctcgaaaaggccggaaacaatactgaggcttatatacgttcagtttctcaacgaactggatacgcccgtaatcaacgtttagatatgcatgatccagaggtgttaaataacctgatggctgccatgattaaacatgaaaatgacaatataaacccctatagctatgagcaaatcaaagtaggcattaatgatgcaattcatagcgatcgctggaggggattacgaaaaccagaaataattagagagcagcgcttgcagcatcctcgaaataaacgagagtcgcagcccgaaccatcgctttatggtaataaaaaagagcctgaatcacagatggatatcgtacagggcatggcaaaggcgttccaagaagctatcgcaggtaagccgttccaattcgaagttattttaattaatgataaaactggtgaacggcaaaagttccagtcgaattctgctgggaaagtcacaacttctatgaggcaaccttgaaatggcttatttcttatacattaatatgattttatcttattattaatggaggcgtggatgaatagattcggacggttcttgatattggtcggtgttatatggcttattgtggccttaaatatgagtacaaattattatggtgaatctatccataacattgggttagtatcaagcaagcaaaaccacgtcattatagggtgttttattattttgtatggattgataattactttatttaataaagaaaagtgatcttatagaggtctttttagataaaaacacgacattacccagtgtgcaatatttattaataaggtaatctcatgaaaaaattatttataactctattatttactccgtttatggtaagtgcagcctggattacaaatgtagaagaaagtatttttggtgataatatcgccattcttataggggagcttaaaaacactaaatcaggtattgcattcaaatgcgatagtaatgacctatcagtttcttatgttgagttaatagatgatagcgatattaaatctacacctgcgacttttttaataagagttgatggtaatcaggtggtcgaatttaacacagttctacaaagaagaaattctgatgcaatagaagctaggagtactgatagaaaaaagattttgtcgttattaaagcaattaggttcagcaaagcaaaaatttttagcgggcatttctgttgatgaggttgattacaggcaatctttttcaggaaatatatctggttcagcagttgctgttaataaattcgctaaagcatgtaatttaaccccaattccgcttaagctattgctgaaatatcttcttctgagtagaaaattttcagtgatggctttttctctttaaggcagtaagcaaccaatcccgttaaaatcgttaacaaaaaaccggttatacttcggtgacgagaatgttctaattgagagtcgttttttaattgtccattaatcgtttcaatgataaaacgctttttaagcataatattatcccactcagccagtgcaagcgctttcatgttgcggcgctttttcgtgataaaggtgatatccgttttagctaaatcatccgccaatttctgactcagatatcttttgtcgccgtaaagagaacccgtgagatcttttgataattcgcgaacaggttccctatcatccacattacccggggtcactttaagcgctaaaatttcgcccagatggttaacaatcaggtgtaatttgaacccatagaaccatcccattgaggtttttccgcgttgcgcgatgccctgaaagaccttatgacgaggaatacggatgttatggcaaacgcgcaaactcgtggagtcgataaaagcaatgtctgtcggttttccttttaattgagtcagataactggataaggggaccaaaacggacggagcaacgctgataaaacgggtataactgagcaaggaggggaagtcgtggtgatggtattgccagatatgctccaaataaaagtttttaaaatcacggtaatgcgaccgctgaaagaggattaaaattgtcatgatttcactgggatacatgcggccttgtctgcggcgcaggcggtatccgttatcgagacaaaactgctcccactgggggatgaaaagacgacaaaagtcgtcgacaccgcagaaaatttcaactaacttgtccatggcctgttcctccccggagtagttttaggctttcaccaaaactttgctcctggaacaggcttctcgtcaatttcttatccagaattcaggttaatttaaatatcaagtagaagacggatagcacgaaacagccccctacggggcttttttgtgtcccaaaaagaggtctcgcatggcttttattaaagatgccgtttcttccctactggggggtggcaatgatgcgtcatggcagtgggctgaacatctgcacccggcttcgttccgcggggtgccgtttgcggtggtctccggggaaagtgtcttcggtcgccgtcaggcggtgcatgaatacccgtaccgtgatacggcatggctggaggatttaggccgggctacccggcggttcacgttgcgcggttttatcattcagaacagtgcggtttatcacgcgccggatgtgatcacccagcgtaaaaatctggtggccgcctgtgaaaccggctcgacggggaccttagtccatccgacactgggggagctgacggtcagtgtgaccgaaagtggcctgcgcatgaatgagagcaaggagtttggccgggtatttgagttcacgctcaccgtgattgaatcagggctgaaagtctttgcagtcaccaacagcaccaaatccgccaccgaagtaaaaaagcattggttacaaacctataccaccacactggcaaaatatatcgccatggtcagaggtgagatccgttcggtgacgcagggcatacggattattaaacagaccgcgaaccaatggatcggtatggtgacccgttcaatggatgaagtgaccaacctcagcgatatgctgaaaaccaccttcggcagtgagcgctacgggcgttatcagcgcgggaaaattggcggcaccgtttccggggctaccggtctgcggtcacgggatgaccggcagcataatgaagcggacatcatcagaaaaaccacggcgggggtggtgatgagccgcaaaaccattaccgacaggctggatacattaaacgccgcccacaccgtggaaaccttcagcgaggccgccgggcaggtcgtgatcgcgattattgattcttccggtagcgtggatgaaaaagtggcaattttcgaggcattggctgcatttcagaacacccgctatcagcaaggagcggttgaccgccatatcacggcaatgaccgtgttgctgttggttgtcctgtcagagggggcgatggcgcaggttgccagtgactttattccccccacgcttttagaagcggagtggtttaatactctgcaacgggaaattattaatgtgctgctgaaagcggggatgcagcccaataaaagcaacgatgcccagttgtctgaagcgattggtaaattggttaatcaggtcaacgacaacgccaatagccgtgttcccgccacgcgcaaaattaatgacaaatcactggtgagtgatgtcactctttcctctcaggatattttcagtcaggttgaatcattgggtaatcgtattgacctgaatacgatcaccgttccggggatttatgcacaatattccagtgaacaagcctataacggaaaaaactatccctcgacggtagcaggtacactgattgtctatcgtagtgccggtatatttcaggaatacacagaatattccaccggagtgagttatcggcggacgtttcacccttcagaaaataattggtctgcatggagcgaagtgctgaccacgacatctgcgtatatttataatacctttctcgaaaaaaccaagaatggggcggatatcctggataaaaatgcgttcattaacaatctggctttacgggataccgtcaatcaggcaaaacgctctgtgcctgacaaccggaaaattaatggtaaatccttggcaagggatattgtgctttcctctcaggatatctttaatcaggttgaatctctgggtgagaggattgatctgaatacgattactactccggggatttacgtgcagttttcgagtaccgaagcacaccgaggtaaaaattacccgtcaacactggcggggacattggttgtttatcgcagtgtgggcgtgattcaggaataccttgagtacggtacaggcgttaaataccggcgcgcctatcatccgtcggaaaatagctggtcaaactgggatgaaatattaaccgtggcgtcctcaaaaattaaacaaacccgtcagggcggtatcgcggcgtttaccctgaatggcatgttgattcagaccggtgttgtcatggctccgacaggatcaaccacccgttattccttgccggtggcgtttaaatcgtttggtcatgttgtgggtggcgttggtgcaagcagtggtccgggtgtgaacgccggtgtcagtttggtgggcttgaaccagattgaagtctcccggacggtcaatgctgaccctatcagatttattgcagtcggagattattaacatgaaattgtttagtgcggccaaaaatggtttttatatccgggggatgagtactgaaatcccggctgatgcggtggagattactgaagagttatagctgaatcaaaataattagacatatttcacatgcgtcataaacagttcatcaattgaacacctttctcgtcttcttatcgctttgacttcagcccatttcggttcgatggggttcaaatccgggctgtaaggaggtaaccattccaacaggcaaccgtggtctgctatcgcttttattgtgtcatgccgtttatggaatggggcattatccatcacaatcacggctccgctggggagcttgggcagcaaatcttgtgtcatccaggcatgaaagacatccgcattaatgtttcccgaaaataaacttaaggtcacgaaggtctttttgaggatcgcgccaatgacattaatgcggcctttggcctgccaatcgtgtgtgccgaagcagcgtaaccctttcgccgaataaccctgtgtgcggggcatagactgcgaaaaaccgctttcatccagataaacaatcggtttcatcgcctgttcgtagtggctgatgcgttcgacaaacgcctgacgagcctgagcgtcagcgttggggtgtcttagcgttttttttgacggttattttcagccgtttcaaggcgtaatggatagcagattgcgcgacacccaagcgttttgccctttcccattgatagtcatcggggtaatttttgacatcagtgagaagcgcttcatcactgattttcgtgggcggcttattccgtgtcacacagggttctattttgtgacgccaccgaaataaggtccgcatagaaatctcaaaatgggtacacgtttgttcgaaggtcaacgaatgcttgtctttatatgccagtactcgctttcgaaaatccagactatagcccatctcactttatcctttgtcatatgaatccagctattatgtcatattaatatgattctgctatatcatgcagatgcggctgcaactaatggactgaaagcgatggtgccgcatttcttttcggatattaaagcgcgttatcactatctttcaatggcgaagaaaaacttcaggggttatttgcagggtgagcaggttcggctaaaaaaatacttttacgtattgcgtccgttactggctgtgcgttggattgagatgggtaaaggtgctcctcccatagattttgaaacgctggtggctggtaccgtttatgactctcaattgaaagctgaaattgcagatttactgcgaattaaacgagctgccaatgaagcagaatatggtttgcgcaagccgggagttcacgcatttattgaatcagaactgagtgagacagtagtgcgttgtgagctgaaggataatcgtgaacgcagtcaggatttacttgatagttatctgaagcgttgggtactgaaaaatagataaaaaacgccgattactgagggaaaatatggatcatatcgatactaaaatcagcaaatttttaagttacgtattgcgccatcagcctgaatctattggcttaacactggatagtgaaggctgggcggatatcagtacgctgattaaatgcgcagtgaagcaaggaaagcggctgaattaccctatgattgaaacaattgtcgcgactaatgataaaaaacgctttgcgatttcggaagacaggaaacgtatcagggcagtacaagggcattcagccaaaccggtagatatctcttatcaggaaaagatacctccggccgttttgtttcacggtaccgcaacccgctttctggattcaatatttaaacaagggctggtggcgggaaatcgccattatgtgcatttatcggcggatgaagtgaccgcgattaaggtgggtcaacgacatggcaaagttgctattctaaaaattgatgcccagttaatgtatgaacagggaattaaattccatcaggctgagaacggtgtctggttgacaaaggcggtttctgtcgcatatatcagtataaaataacatcataattaaacatgtttatgcacacttaactctggagataaaaatgacagttctggattctctacttgcattcatggttgctgctacgttattgacattaactcccggtctggatacagctttggttttaagaaccgcagcagcggaaggtgggaaaaaagcctttcaggccgctcttggaattgatgccggatgttttatatggggagcgatggtggcatttggtctgggtgcattgatagccgtatctgaactggcattcaatattctgaaatggtgtggagcgctgtatctatgctggttaggccttcagatgatcctgcgccctaattccgatcttggtggtgagaatacttcttcggttaaaacgtcgaactggtttatcaggggcatgctgggaaatgtgctgaatccaaaggtaggtgtgttttatgtctctttcttgcctcagtttattcctcaggggcattcacccatgatctggacatttggcttagttgctattcatgccgcattgggtacgatatggtcactgattctgatttttgccacacgtccgctttcccatgtgttaaagcgtggtaatgtcatcaaatggatgaaccgggcgacaggtggattatttctgttttttgcggttaatctggcgttaagccggcgatgagtgacggggaatagttgcttgtttcagtgaaaaaagacaagcggtgctcaggtgcaccgcataatactttaatcataaatccagctcctgtactaatgtagccaccatgacagctttaatcgtatgcatacggttttctgcctgatcaaaaacaatgctgtattctgattcaaacacatcattagtcacttccaggccaccagacaagttgaattcttccgcaagctgtttaccaagaatggtttcttcatcatgaaaagccggcaggcaatgcaggaatttcacatccggatttcccgttagtttcacgagatccatattaacctgataaggcgctaataattcaatgcgctcctgccagacatttttaggttcacccattgagacccagacatcggtataaaggaaatcagcagcctgtacgccagccacgatatcttccgtcagtgtaatttttccacctgttttcgttgcctgtttttggcattcactcactaattgagcatccggccaggcaggtttttggtgcaaccagacgcaaatctaatcctgttaatgcagccgcttccagcaagctattacccatgttattacgggcatcgcccagataggccagttttatttcagttaagggttttctactgtgttcctgcattgtcagcaaatctgccagtagctgagtcgggtggaactcatccgtcagtccattccagacaggcacaccagcatattcagctagcgtatcgactattgcctgcccatagccacggtactgaatgccatcataccaacgcccaagtacccttgctgtatccctgatagactccttatgcccaatctggctgccgctggggcctaaataggtgacattagccccttgatcatgtgctgcaacttcaaatgcacagcgtgtgcgggtggagtctttctcaaaaatcagggcgatattctttcctgccagcaagggaatttctttacctgattttttattcgctttcaatttcattgacagggataaaaaaagctcaatttctttaggcttgtaatcaagtaatctcaggagatgacggtgaaaaaatggattcatgtgacattttctccatagggataaattgaattaatatgcactatatatcaataaaaaatcttattacaagcgctatatacacaatggatttcaagacgcgtcgcggcggcaagagagagaatccccgggagcatagataactatgtgacaggggtgaacgagcgtagccaacaaagaggcaactggaaagacgaagtgtatagtgtgtattgaagatttaaggatagccaagagaattgtgacccggcgcttaaggcctgtacttttggtttaacagcacgggatagctatatcctttgcaaagaaaagatgggagaatgcggaacaggatagccaactgacagaggggattggcatggcagacccacatgcactggaagaacagcgcgaagaaactcgcttgatcatcgaagagttattggaagatggcagtgatcctgaagcgctttatatcattgaacaccatttttcagcagacgattttgaccgtctggagaaagcagcagttgaagcatttaaacttggttatgaagtgacagatgcggaagagctggaaacagaagacagcgttattttgatgtgttgtgatgtcatcagtgagagccgtctggaggctgacctgatcattgcacaggttgagcaattgatggatctggctgaaaaaatgggtgtgaattacgatggctggggaacttattttgaagaccctaatgcttcagatgatgaagatgatgtaggcgatctcttcccggaagaagatgaacccagattacactgagtttttctatcgcatttgccccacggttcgcgcggggcatattattatgttttacagcatcttaaccattctaacctcacaatcactgtgcccagtattgcccaggggggcatcaaggtaactgaatcccagtttttcatacaaagcgatggccgctttcaggttttctgttgtttctaaataacagcgtgtaaagccttgttctaccccgaattccagcgattgttttacgatttgtctggcaacacccttgccacgtaatgctgacgaaagatacattttttgcagttcacaggtattactatcacctcctgacagtggggcaactccaccgcctccaacgactttccccgccatttcaaccacccagtatgcactgcggggctggctgtaaacttcgtacagagtatccagaattgggtcagcgacggcgaagcctttgtcagcggttaaaccgtgttcggcagatacttcacgaataatggcggcaatatctgggttatcttgttgggtaatagggcggatgacgtagtcgtgatttgtgttttctgccatttcttcctctttactatttttcattaaagataatcgagacaataggcgtgtctcgaaaagaacgactgaataagcgaggatactggaagcctgcttgaaattattattgatactgtaacggtgtaattattagatcgatattaattgaaaagaaaaataagtaaatgattaaatcagaagggattacggaaatataaaataaagcggcaccattatgatgccgcaattttacaaactgtatgatgaactacttcgaaatatcagttccaaagtatttctcagaaatgcgggcataagttccgtcatctttcatgccttgcagtgctttattaatagcttcgactaattcaggatcacctttacgcagtaatacggccgatttactggcatcagtctgctgagcgacaattttcaccggcgcattcgggcgctggtttttgaagtccagaaatgacaaacgatcatttagtgtggcatctgcccgaccggtggcgaccaaatcaatggactggttaaaaccatccgtgctgaccagcgtagcaccataagatgttgctaattgcccatagttgctggttaaagattgtgcggagcgttttcctttgaggtcagaaaaggatttgatgctgtcattgttatcacgggtgataagaacaacctgagatgttgtgtaaggaattgagaaactgaatttagcttcccgcgcaggagtcacaccaacctgattaacaacagcatcaaagcgtttggcatccagtcctgcaattaaaccgtcccattttacttctgtaaattcaggttttacatccatacgacgtgcaatttctctggcaatatcgacatcaaagccggttaatttattgctggtatcatggtaggtaaatggagggtaagtcccttcagtaccaattttaaatacgccagaggcttttatggcatctaaatctttaccggcatagctgggagcagagatagcaagagtaacggcacctgcaagcagcaattttaagaatactttcatgatgttctccaaatgaatttttataaaaatgtagtggctctctatatttgccaatccggtaaagtttcagtcagagttgaaacaaactcgatagtgcgctggtgatccgggcgggtaaacatgtgcttggcgcttcccgattcgataatttccccaaattccagaaagataacatcatgagcaaggttagcagccagacgcagatcgtgcgttgccattaacattgttgtcccttcatctgccagctgtttcagtacggagacgacttcttttgatagttcagggtcaagggctgaagtcggttcatcacacagtaatacctttggcgatggcgccatcgctctggcgattgcaacacgctgctgctgaccaccggataatgtggttggccacacatctgctttatgcgacatttcaactttttccagtagctccatcgcccgttctctggcacgttcacgaggccatttctgtacccaaatcagcccctccatgatgttttcaatcacagtgaggtgtggaaaaagctggaaattctggaataccatgccggtttgcaggctaaagcgctggatttccttgtgggaaagccgctctttgccggtaaatgtaattctttctttccctagcatgagttgaccggcctgtggaatttccagcagattaatgcagcgtaacagggtgcttttcccactgccggaaggcccaataagggcggtcaggctgccttccttaatagtcaggttaatatttttcagcaccttttgtccgtcgaaacttttttcaatgttagagagctgaatcattattggcttccttattattgctatttttagcgtattgctgggagaacttgttttccatacgggtttgcagtgctgataacagcgaactcaggagcagataaaggatagctgcttcggtatataggatcagtggctggtatgtcacagcggcgatgcgctgtgcggccagaaacatttccggcacggtaataacagacgccagtgaggtatcttttaccagagaaataaaggtatttgacagtggaggaatagaaactcttgctgcctgtggcagaacgatacgacgcagggattgccaccaactcataccgatagagtgggaggcttcccattggcctttaggcactgaattcagtgcagcccggataacttctgatgtataagcaccgacgttcagcgtaaagccaatcacggcggaagtgaatgcttccagtgtaatgccgatgctgggcagtgcataaaatatcagaaacagttgcactaataacggtgtcccgcggatcagccagacataaaaacgtacgactgcaaccaatggcttaggcccgtaaagcctgatcagggcaacgataaaccccagcgtaagcccgagggcaaatgtgatcagggtgaggggtatagtgaatgtcaggcctgcgtaaatcatcggccagagagaatccagtgctaagctgagccaggatggagtcatatatcgttcctatattaacatcaaaaagtatttattttttataagattgttttagtgatgatatggcaataagagagcatccttatataaaataaagttatagcttagaactggcggatcagtgactaaaatacttgtcccagatgcgttggtaagttccgtcagcgttgatttcagtaatggcttcatcgattgcagcctttaacccggtatcgtttttgcgcaggagtatagccgtctgtgctgcatgggtatcggttgccacaatttgtaccggcgcttccgggcgatgttttttataatcgaggtaggatagcttatcgttgatggtggcatctgcacggcccgtactgacaagctcaacttcctgattaaagccatttgtagcgataatttctgctccgtgctgacgcgcaatctgggcgaagttattggttaaggtatgggcggactttttgtcttttaaatcactaaacgttttaatcttattgttatcggttctggtaatcagaacagcttctgaaatgacataaggcaaggagaaaatatattttttctgacgttcgggagtaatcgcaatctggttcataactgcatctgatcgtcccgcatccagaccagcaatcagcccatcccatttcccttcaataaattcaggttttactttcattcgtttggcaatttcacggccgatttctacatcaaatccagttaattttcccgaggcatcatgataactgaatggagcatacgcaccctctgttccgatcctgaatatgccagaggactggatcttattcagggtggattctgcataagttaaatgtgtaaagcccagttgaatcattcctgctaataatattttatggataattttcattttaccttcctgataatgagagctattatcaaatataatacatgactggctttttagtcccaatgatttatatataataggaaattatatattgtattttaattcctatatgaaaatattgtgagaaaactaatagttcatacctgttcttgtaaccaatgttgattacttccattttttaataatagagaaacattttttaaaaaacatatttgtttttttaattttattatccttttgattttaaatggttttgtttttgctatttaatctctcagggtttaattccccgtcgcttgcgacgagcaaataagagttgaacgatgcgaagcgggtgatttcatatcggaataccccgctgcttgcggcggggatgtttatttggttttattaacatggaataaaagtaattaaatgtgcaagccacattaataataattgttctcaataacatagcgtcaaaaacattgaagcatcattttttttaatgtaatgtttttccatattatgattttttgtgtgaatttattgatattaaaagttggtgttcaatgcaaagttcattatttagaaaaggaatgttagattcattacctgtttgcatttcttttttcctcatttttgcatccgttggtgctctgtatcaaaataaagggctttcattaatagagacaatggtgggttctgtattcacttttgctgcaccgttgcaggtcgcggttgttaattatcttgctaatggcgcatttttatcagtgataatactcaccctgatcattaactttcgcttctttctaatgtcgatggttatgtcacagtattttcatggcatctcaaaaagcaaggttgtattgtcaatgttggcattcagtgccagcacatacactgtaactcatgctcatttagtttcggagaagatccctgaaggaaaggcgcaatttaattattatctgggtgtatctatccccagttttgttattgctgttcttgcaaccttattgggatatgtatcttcagattatctgaattacgattcaatctctctttttcttgttatgttaattccgattcatttttcatcccttactgctaagcgtgccggaaaagatttgtctgtttttgctacgctggtaggtgggttatgtgcaccattcatcaatgaattaaatattcagcttatggatatagcaatacccattatggttggaatgtgcattgcattttatgaattaaaaattaaaaagggagcctgaacatgattatgatcttattgatgggagcaatcagttaccttcttcgggttataccatttttaatgggtaacaagaaaattaagaaagatggttttcttattacctctttagattattcagtatgttttatccttggcagtattattgtaaatatttctcttggtaatataaaaatcagcgagttaatttatcattttgaaattaagtatgctcttgcaattattacggttataactgcttattttatcagtaagcgtacaggctctatattaaagagcttaattatatcatctgttttatttacattaatatcatggtgggttaatgaaaaaaatatgtttttttgatacaatattgagagatggtgagcaggggattgggtgtttactctcgaatgaaaaaaagttgaaattgttaccacgtttaattgatttaggggttgattctattgagattggcatggtaacagatgaagatagcgaaaatttttttatgaggccgcatcatctgatatcgattttaaagatacctatattgccgctttatgccgattaaaacccgatgatattgaaagaacaactttagctttaagcagatttaaaaagcccaaattaaatttgctgtgtgttggttcagaaatacatatcagaaaaaagtttgattccaccaaagacagcatattattgatgctgaaggattctttggaatatatagctaatagtgtttatacaggtaaagtttcagctattttagaagactcatcaagagggagctttgatcttttagaagagaaaattgagttactgacagcttaccatgttaacgatatctgctttgccgataccaccggttgtgctacaccgttatatatcagtaatctgattagttattttaaaaataagtttccgggtatacggttctctgttcattgtcacaatgatttaggtctggcggttgctaactcaatcagtgcaattgatgccggagcagatgaagtgcaggtgacactgggtggagtcggtgagcgctgtggtaatgcgtcgtttgaagaaataatggcaattctgtcttatagaagtgaatataaaaataggtttaaagcagatattgatatgaaagatctcattgacctatgcaatttttattatgacattatcaataaattgcctcatcctaataaacctttattaggtaaatatgcgttttcaacttgcgcaggtattcatcaaaatggaattaaaaaattccctgaaacttacgaatttatcaaccctgatacattaggtttggaacgaaaattttattttaatagattatcaagcagtaaactttctcagcaagatatttaataggaatggttatgaatttttctcagaaaattggcttctcaacaaacatttttgaaaatccggcagatatagacgttttggttgaacagttaagtaaatattttaagcgtattgaaattgaatttgaaaaagagctaagagacttaattgattatcatcctgagaaatggaatgagaaagttgctgtattgaataagttaaaagaagataacgatctttactattctgtccacgcgccttatatcggcatcaaaacagatattgctaatagtgaagaattggacagaattattgctgttgattatcttgaatcattcatttatgaagcgaagaagatcggtgctgaatatattactattcatcccggctatcttgaatttgatgataatgggatttctgattttgattttcagcaattgtctaaatctatccagaacttatcagaagttgcaaaagaaaatgggatgaccatcctgctggaaaataccggaagtgacagagagaagtatatcgtactaagtgatgaacagcatgagatcttatgccatcagtacggtgttttcctgactctggacattgtgcattttgaatcatttatgcataaaaacagtaccagagaatataaggaagggttaaaaagaattctgccctatattaggaatgcgcatttcaatgatgtactgaatggcgaacacgttcacttaccgttggatgaaggcaacttcgactatcacaaagtattatcctatatggtgagtgaaggttatcaggggaattttattattgaagaatcaggcggcggtttttcaccggaagaatttattatcgccgggaagaagtatgttgaatgtttgaatggcatggaatgatcctaattgtaaaatgaaacattttgttagtattaataaaaatgaaatcgaatttttttctgatgaaaacataactatattggaacaagccgaaaataacggacattctttaaaaaatggttgccggttaggagcctgtcgggtttgtaagttaaagttattatccggtgatatagagtatacggtcgggaataaaattggattaacaaagaaagaactggacgataattactttttaccatgctgcgcgattgccaagagcaatattgtttgtgaagcagatggtgataataaaacgctttcagataccaaagaaggcgctgttatatgtgatataacaagaactcccggaatcactgttataagattcaagttatcgaaaagatctaagatggattttattccgggacaatatattggtatagaagtccctaatggaaaatgccggtattattctgtagctaatatcccgaaggatgatgggtatgttgaaattcatgtagctaagaataaaaatggcgtgttttcagatgtgatttgtgaaaagctgaaagtcaatgatgtattgtggatatacgggccttatggtgattttatttcggattatcatgatgaggtaagagatattgtttttgttgcgacaggaacaggatttgcaccgataaaatccataatagaatctggcgtattcaatgaacgaaaaattcatcttttttggggaggaagacgaaaagctgatcactatttctctgagattgtagataactggaaaaacacattaggaaatttctatttccatatggctttatcacggtcagatgaagaagactatcccgaagtccattgtgggtatgtgcaggatgtctttaaaagagaaattgaccagaataatcagatagaagtttatatgtgtggttctcctaatatgatcagtgatatgtctgagctattaaaagagagttatcaactgaatgaagattatattcatgttgatgtattctatcccaatagctagcaatcaaaaaaaagccactgcaaatatacagtggcttaatttaattcagaaaatattacagagcagcaatagttactttctgtgccagtaatttttctttagctgcattgtttgttgccagacgctcacgctctttggcaacaacggcttctggtgcgcggctgacaaatccttcattagacagcttgccttcgatgccgctgatttctttatccagcttctcgatttctttatccagacgtgccagttctgcatctttgtctactaagccagccattgggatcagcacttctgcaccgttgatcagcttggtcacagaaacaggtgcttcttctcctgctgccagaacggtaacagaggagagacggcccattgcctgaaggaagttcaggttttcagcaacgcggcgttgtgcatcggcattcgcttcacgcagcagaacttccagtggcttgcttggcgcaatgttcatttctgcacggatgttacgtactgcaatgatcgcttctttaatccactccagatcgttcagcgctaattcatcaactttcgcctgatcgaattcagggaaagattgcagcatgatggtatctgcatcaatgcctttaaccactttcacacgctgccagatggtttcggtgatgaatggaatgattggatgagccagacgcagcaggccttccagcacttcaatcagagtatggcgcgctgcgcggacttctgcttcagaacctttattgatagccggtttggaaagttccagataccagtcacagaactggttccatgtgaattcgtaaagaatattagccgcgatgtcgaaacggtaagtatccagcgcttcgcgataagctttcactgtctggttgaattctgccaggatccagcggtctgccagtgacagtgacatttcgccaccattctgaccacagtcctgtccttcggtgttcatcagcacgaaacggctggcattccacagtttgttacagaagttgcgataaccttgcaggcgcttcatatcccagttgatatcacgaccggtggaagccagtgccgccagggtgaaacgcagggcgtcagtaccgtgggcttcaatgccttccgggaactgcttttcagtacgtttgcggattttctctgccatttgtggctgcatcatattgccggtacgtttttccagcagattttccagcggaatgccgtcaatcatatccagcgggtcgataacgttccctttggatttagacatcttctggccttcttcatcgcggatcagacctgtcatatagaccgtcttgaatggcacctgaggcttgccgtcttcatctttgatgaagtgcatggtcatcatgatcatgcgggcaatccagaagaagatgatatcgaagccactgaccagtacatcggtcggatggaacgttttcagtgcttcagtctgttcaggccagccgagagtggagaatgtccacagaccggaagagaaccaggtatccagcacatcatcgtcctgagtcagaattatatctgcacccagattgttttcacgacggacttcttcttcattgcgacccacatagacgttaccttctgcgtcataccatgccggaatacggtggccccaccacaactgacgggaaatacaccagtcctgaatatcacgcatccaagagtagtacatgttctcgtactgttttggtacgaactggatgtcgccattctcaacagcttcaattgccacttttgccagcggtgcagtgcggacataccactggtcggtcagcattggctcgatgactacaccaccacggtcaccataaggaatggtcagatcgtgaggtttgatgtctaccagcagaccctgcttttcgaattctgcaacgatagctttacgggcggcaaaacgctccattccacggtattcagccgggatctcggttgaataagcgtcagaagcttcgccattgctattgaacacctctgcggcttcgcggatatcaccgtcgagcgtcaggatattgatcatcggcaggctgtgacgtttacccacttcatagtcattgaaatcgtgggccggagtgattttcacacaaccggtgcctttttccatatcagcgtgctcatcgcccacgataggaatacggcggtttaccagtggcagaatgatttctttgccaatcagatctttataacgtggatcttccgggttaactgcaacaccggtatctcccagcaccgtttccgggcgggttgttgcaacaacaaggtaatctttgccttcggctgttttcgcgccatcagctaacggataacgcagatgccacattgaacctttgacttcgcggttttcaacttcgatatcagaaattgctgtgcgcagttttggatcccagttaaccagacgcttaccacgataaatcaggtcgtcctgatacatgcgtacgaaggcttctttgacggcttttgacaacccttcatccatggtgaagcgctcacgctcccaatccacagagttacccagacgacgcatctggttagtgattgtgccaccggattccgctttccactgccaaatcttgtcaataaaagcatcgcggccataatcgtagcgggttttgttttcttcagctgcgattttgcgctcaacaaccatttgcgttgcgatacctgcgtggtcagtaccgacctgccacagcgtgtttttgccttgcatacgctggtaacgcaccattgtatccatgatagtctgctggaaggcgtgccccatatgcaggctaccggtcacatttggcggtggaatgacgatgcagaagctttcacggctggtgtcaccgtttggcttgaaataaccactcttttcccagtgatcgtaaagaggttgctctatctctgtcgggttatacgttttatcgagagatggctcagattgcgttttagtagcgggtgtcttttccattttatcttgatatttaataggttggcggggttgccatggtcaaattaaagccgacgctacgataggatttatatcgttcgcgagctaactgtttcagattttcatcaatagggacgaagtctaccacttcatggaaagctgtggcaaagtctgcaaaatgaggaagcagtgttatcagaatatcacggggagcattgcctcttttctgcggccagcacaattctacaggtgcgccataacgggggccttctcctgcaagattgtgtggcacaaactggcccggctctcgctgccataggacttcatccagcttttcggcctgctgctggctttcacaagcaatcagaacccgcttccctgcacgccattggtcagcggcaagctgacatgccagccattcatgtggctgtaaatcatctaaagacgatgattgttccggtgacatcttttccaataaatagaaagtggcgtttttcatagtctcatgattatcgaaaataggttacagaaaaatggttaaacgacaggcaaggtgacggaaaaagggtattgctgctgcaatacccttttctttaatacctttttatcgccatcatttttcaggttgtaacctgaaatctgttgggtatacgccatattattatgcaaaaaatggcggaggggtattaatcatcagcattaagacctgcacgatttaacaggaattgtgccaacagtgcaaccggacgacctgttgctcctttctgcttacctgcccgccatgctgtaccagcgatatccagatgtgcccaattgtatttagccgtataacgcgacaggaaagcaccggcagtaatcgcgccgccaagacgcccacaggagttaaccatatccgcgaaattcgactccaactgctcggaaaactcatcgcccaacggcagacgccatgcccgatctccggcctgttctgacgcattcagcagttcatgggccagtggattatggttggacatcaaaccagtataatgactgcccagtgcaaccatacatgcacctgtcagcgtggcgacatcaataaccagctctggctcgaaacgctcaacataagtcagtgcatcgcacaacaccagacgaccttccgcatcagtattcgtcacttcaacggtctggccggacattgtggttaaaatatctccgggacgataggcacggccaccgggcatgttctcacacccagcgagaacgccgatgacattaatcggcaattgcagctcagccacaattcgcatagctccataaacagaagccgcaccgcccatatcgaacttcatatcttccatgccatcggctggcttgagggagataccaccggaatcgaaagtcaggcctttacccaccagtacgataggtttcgcattcgggtctttactgcctttatattcgattaccgacatcagagattcgttctgagaaccctgacctaccgccagataggcattcatgcccagctctttcatctgctcttcaccaatgactttggtaaccagattttcagcgctgtcagcaagctggcgtgcctgtgaggcaaggtacgcagcattacagatattaggcggcatattaaccagatctcttgtcgccttaatgccggcggcaatagcaagaccatgctgaatggcacgttcaccgctggtcagctcgcggcgggtcggtacattgaagaccatcttgcgcaaaggccgacgcagttcggttttgctgctcttaagctggtcgaagacatacagtgattcttttgctgtttcgactgcctgacgtaccttccaatagttgttacgtcccttgacgtgtaattcagtcaggaaacagacagcttccattgaaccggtttcattgagggtgctgatggttttctgaataatctgcttatactggcgctcatccagttcacgctcttttccgcaaccaaccagcagaatgcgctcagacagcacattaggaacatgatgcagtagcagggtctgccccactttgccttcaagttcaccgcggcgcagtaaggcactgatataaccgttacttattttgtcaagttgttctgcgataggggaaagacggcgcggttcaaatacgccgacaataatacacgcactgcgttgtttctccgggctaccgctttttacactaaactccatgcgttctcctgaatcttaaagacaaagacagatacaatcgctaaaataccacgttccgcattaaatcatcccaaataaagttctctgctatgttaagctgagtatattaattttagatacttagccaacgataagtatgctctaattgagaacaaatatatggaatgctttggtatcattttagctacggggaagccaaactgattcatataaatggtagatatacgacgaagttagcgactttcctgcaaaaagacaagttttcacaggcgtaataagcgtgatcatcattagatatctggtacgggaaaccctgaaaagtcaaatcgcaatacttttcatcttattgctgatctttttcagtcagaaattagttgaggtattgggcgcggcggtggaaggtaatattcccgcaaatttagttttatctttgttaggattaggtgtgccggagatggcgcagctaattttacccctgagcttgtttctcggggtgttaatgacattcagtaaactctatacggaaagcgaaattaccgtcatgcatgcttgtggtttaggtaaaagcgtgctggtgaaatccgccctcattctggctctgctcactgcgatgctggcagcggccaacgttatctggttcactccgtggtcatctaaatatcaggagcaagtgctggcagatgcgaaagcaaacccaagccttgccgcaataatggaagggcagttcaagccttctaatgatggcaatatggtgctgtatatcggtaacgtcaaagggaataattttgagaatgttttccttgcccagcttcgcccgacgcataatcagcggccttcaatcgtcattgctgatggcggacatatggaagcgttacccaacggcaatcaggtagcggtgcttcatacaggaactcgctacgagggaacggccttgttacgtgatttccgcattaccgattttaacgactatcgtgccgttatcggacatcaaaacccggatgtagacagcggtaaagttgaacaaaaatcaatggctgagctgtggcatagcaatgataaagatgcccgttctgaactccactggcgtctgacgctgattgcatctgtcctgattatggcattgatggttgttccgcttagtgcggtcaacccgcggcaggggcgcgtactcagtatgctgccagccatgttgctctatctgattttcttcctgctgcaaagttccctgcgctctaatggcagtaaagggaaacttgacccgatgatctggatgtggctggttaacggtgtgtattttgctctggcactggcgcttaacgtatgggataccaccccgatgcgtaaactgcgttcacgctttaaaactcaaggagctgcctgatgtttggtgtattagatagatatatcgggcggacaatcctgcaaaccatactgatgacactgttcacgctggtgtcgctatccggcattattaagttcgtcgatcagttgcgtaaagtcgggcagggcgaatataccgctctttctgccggtatttataccttgctgagtgttcccaaagatatccagattttcttcccgatggcggctttgttgggagcgcttttgggtttaggagcgctggcaacccgcagtgagctggtggttatgcaggcttctggttttacccgtcttcaggttgccggtgcggtaatgaaaacggctatcccgctggttttactgacaatggtgatcggtgagtgggttgctccacaaggggaacaaatcgcccgtaacttccgttcacagaagatgtatggtggctctttgatgtccacctccaaagggctttgggcaaaagatggtaatgatttcgtctacattcaaagtgtagggaaggatagctctctgaacggtgtcagtatctatcatgttgataacgacaaaaagctattgtcagtgaaatatgcggcatccgctgtgtatgatacgggaaatgcgcaatggaagttatctcaggtggaagagtctgatttaaatcattttggccggatcaccggttcacagtacatttctgctgactggaaaagccgactgacaccggaaaagctgggggttgtttcccttgagcctactgcgctttctattcgtggcttgtatcaatacattacttatctgaaacagagccagcaggatgccgggcgctacgaactcaatatgtggaaaaaggtttttgcgccgttatccgtggcggtcatgatgttgatggcactttcctttatcttcgggccgttgcgcagtgttcctatgggattcagggttgtggtcgggatcagctcaggctttgttttctatgttctcaatgagatattcggcccacttagtctggtttatagcatgccgccgatgttgggtgcattgctgccgagcctgctgttctttacagtgagtgtttacttacttttgaaaagaaaatagcagccacaaattgatatccagcttctatcagactgatacagcctgagttttgatgatataaactcaggctgttatttttattggcacctattttttcaccagctccatcacgggttgctctggaatctggttatgattctgtgccagtgcagtgaccagctcattcacacctttagtcacctgatgaaacttactgtgctcttttcgggtcatgacgataaagacgccaatattctgctcagggatcatcgccatataagtattgaacccgccgccaccgcctgttttttgatatatacccggaacatctttcttaccgttcatataaacccagccaagcccgataccatcggcttttcctgccacatccattcctctgattgaagccagctcagcgcgtttaaaataaatgccctgttcacggctggcagtctgttttctcaaatgattgtgggaggataaaaactgctgcatccagcgttgcatatcggcgggagtagaataaatgccgccactgcctgctgcggcgatagtattgaggcaagggctggatttgatcccttccatcaaccgggcacactgagcaggggttggtgtcagggttgtatccttcattttatagggaagagtgatttcttcatgtagaaggcggctataaggttcgccggttgctttggaaagggcatcagctaataaatcgtaggccagattagaataagaagccgttgtgccgggggccgtttctagatctgcatttttcagccagttccatcgattagactgagtcggccagataaataccggacgcccccattttcctccgggttgctcccgtggtaacccactggtgtggcttgccagatgatataaccgaataggctgatcagtaccaaaatcgggtacatgcacaccatgataagtatatttttgtaatggatcggtgattttaatacgcttttgctctgctagcttgatcatgacttcactggtcatcagtttggtgattgaagcgatgcggattaaagaattctggctgggtttgacgccgctccctggataagtttccccaaaactatggtgtatgacctgattattatcaatcactaccattgccatacctagcggattaccttcattaaagattgactgtgcatactcttcaaccagcgctgaagccattttccggtttgaaacatcgccgtcaaacacttcccattttgtaggctgtttacctgagtgcggcgttttgttctggtgcgaattgccagaagcagagcaggctgaaatcgctaatgagagagctgaaacaacacaaaatttatagagccgtttgttcattttcggattaaccaatcagggagcgtaatgcatggcgaaactcaaccgttatttattcttcttaaatatcgcaataacggcaccgataacaaaacccagcagaatacctgcaaatatccaagtgataagcgtcatactgatttacctcaacagcagtgttttatagtattttattttgaattatataaggagattatgggttgtctatcgatgataagaagttataaaaggtcgatttatgttacatagaataatgtgggcttaaatttaagcaaatttatgtgaaagttattgtgtttgctttttttttcagcacttgaacaaaattggaaggataagtgttgcgaatggtcttcgggcaagtataatggctctcgttttccgacccctttcagtgccgaagtggcgaaatcggtagacgcagttgattcaaaatcaaccgccttcgggtgtgccggttcgagtccggccttcggcaccattcgttagttttctaacgtctacccaagtctacaaactccctgaaaatcccaataagtcaacaaattacgttattttgacgtctactccagtctgttgcaatcaacatgcaccaaggggcataatttggggcacctacacttcgattgtaaatgtgccccaaaaatgaaactaaacgcccgacaaatcgagactgcgaaaccgaaagagaaatcctataaattagcggatggcgctggcttgtatctcgaaatcacgccgcgcggttctaaatactggcgcatgaagtatcatcgccccacagataaaaaagaagatcggttggcctttggtgtttatcctgccgtttcattagctgatgctcgcgctaaacgggatgaagctaaaaaattgctcgctcaagggattgatcccaaagcagagaaaaaagacgcacaagccgaatcaaagggtgcatatacttttgaacggatcgcccgtgaatggcacgccagcaataaacggtggagtgaagaccatcgagaccgaattatgcgaggtttcgagcaatacattttcccctacattggtactctcgatattcgcactttgcgatccaaagc

SEQ ID NO: 273 - DNA, 32396 bp, Xenorhabdus sp.
  CDS (26772)..(27593)
cccaacagtcccagtgcggttagttcagcgctcaaaaaggaagatattgatcggactcaggcggataatattgctgagctgctcgggcagcttcccggcgtttcgatgtccggttcaccacgtcccggtggacagacattaaatatctggggaatgggagagcaagaagatgtcaaagtgacactggatgatgctccaaaaggatttgagaaatatcgtcagggatctatttttattgaacctgagttaatcaaacgcattgatgtcgataaagggccgcacaatatattgaacggcaatggaggatttggtggctcaattaaagttgtgactaaagatgccaatgacttattgcgccctgatgaggattggggtggatttattaagcaaagcttccataccaatgacaggcaatggatcaacagcgctgcattatatggcagagattcgaatggctacgcggatggcttgctgtatttcagcaaacgagatggtcataatatcaagcgccccgatgggacacgttttgagttttcacaaaataatcaaacttcctatttattgaaaaccaatttctatcctaatgacacgcatactgtcagcttatctgctatgcgttcagagtcagatggctggcaaccgtgggctgctaaacgggataaaatgaatgtaccaactgaaagcgacatagaaaaatatggctggaatgatgcatggcgaaaacttttggtatttcgagatcaaatagatcaaaactattcagctaaatggaatatcgcaccagaagataacccttggttaaatttaaccataacctcagcctattcaaataccagacaaaatgatcgacgccctgagataaaggatgtaaaacccacatccgcatcacttatggggcaaaaaagctggattaagtatactgataccatggttgatatcagtaataaaagcgtattctctaccaatcttatagagcatgaattattagttggtgcccactggcataaaaatgatcgtgatgtcctaatgtttgataaaaataaaaagaaagatcctacatttaattatggctattatcagcccggttatatgccagccggagttcagcaaacttatagcctatttactcaggactctctgaaaatagacagcgttaccgtaacactaggagctcgttatgatcacatcaaaaacaccggagaaaaaaacaaagcatctgcttataacaatatgtcacctgaaattaatcatgactacagcagcgtaacttacgcaggttggtctccccatttaggtacaatatggcaggcacacaaaaacctatcacttttcgctgatatcagccgcacatggcgtgcacccgttattgatgaacaatatgaagtgcaggcgaccggcagtcttcctggttcaagccggaatcttgatgttgagaaaatgacgggtattcgcctcggtgcaattcttgatttcgatgatttaatgcttgaaggtgacagcctgcaaatccgtaccactttattccgcaaccgtggcaaaaacgaaattttcaaaaggcgtggaatatactgtaaagcccagttagatggtatttcgtatacaaattgtgaaaaaccactttccaattatcgaaatctgccgggttataccatagaaggattggaaatagagactttctatgatagcagggtactgttcggaaaattttccttttccaccattcgcggccaacgtgatgcttccatgcgtgatccgtggatagggcataaaacctggattactgaaattcctccaagatctgcacatgcgatgctcggcattaaagttccacagtggcacatggcaatggggtggaaaggtgaatttattcgtaaacaagaccgttcagcatctgatagtgatccaatggcaaaaagttgggatctaccaaaaaccaaaggttatgccctgcacggcctgtttgcaagctggcaaccaccttttatacaaggtcttgaagctcgtatcaccgtcgataacctgttcaatcgagattattacccatacttaggggaagctagtgcaggcattggccgcaactataaactcagcatttcacagcagttctgactgccattaaacatccaatgcaatataccctcttaatttttaagagggttatcactataatctactattgacttccatcaataaataaaaataataatcattatcaaatttattcattcaggcaatatcacatggctgtgcaaaaaagcacattcggacacaatgaaatagcccgtcagctttataacgaatatcacgaatggctgctgagctggatcaaacagaactgtgccagtctcaaccatgcagaagacctcacccatgatgtgtttatcaaattgatgcaatatccggatatggctgagatccgttatcccaaagcgtttttaattaccatcgcccgcagaactatcgctaattattaccgccggaaaaagctcgaagagaattatttggactatatcagtaccgtgccgaaaaacacctcctatccaacagaacaccagcttgtactgctggagcaattagaaaggatagatagcacgcttgataagctaccaataaaagtcagacaagcatttctgctgactcagctgcaagggatgcgctataaagaagtcgcagaagatcttgggatctccatgagttcggtaaaaagttatttacaacaagcgcataaaaggtgccacccttttaatacactataaaaaataaaacccgctgctttttctgacagcgggctatttcaaattacttcaaatcccatttctcaattgatttgaaaaacgaaaatacatcagataatgcggtttttctctaactgagcaaggcgagaagcttctcttgcttcacgctttttacgagcatcgcagggttcagggcaatcacaaactttctcaacaccgatgcttcccaaaccgccgcaacttccctgaatgcttttgcgcttaaaaatataacctaacgccattcccgcaaaggccagcaggaaaaagataaaggctgcgacaaagacttccataaccttccctcttatttcttctgttgtaaatcgtctttctgttgtaaatagtgcttaaaggccgggctataacgttcttcaaaaccatctttagttttgacaatcataaagaccggaatgttcagcttctcagccatttccatacccttttccggccccagaacatctatcccggtagaaaaaccatcagcactcatacagcttggagcaataaccgtgattgaaaccagattgtgggcgataggtcggcctgttttaggattaatcgtgtgtgaataacgcacgccgttctgttcaaagtagttacgataatcacctgatgttgctacagccatattacccggcgcaataatttcctgagcactttgcgtcattccgctatcggagggtttttcaatcgcaattctccaaggtgttccttttccattattacctgccgtgcggacttcccccccaatatcaaccatgtaattaccgatattctgagaagccagatattccgccacaacatcaacgccatagcccttagcaatggaagaaagatcaacatacaactcaggaatggatttaatcaggctattgccttcaacagatagcttatcgatgccaatccatgcgcgacgtgttgccagttcatcctctgttggtgccttcgttacgcgcccttccggcccgaaaccccatagatttactaatggcccgacagtgacatccagcgcaccatccgtcagcttattaatgcggatggcttctttaacaaccttagcggtggctgccgataccggaaaaggcgtattcacttcacggctttgattaaaacgactcaattcagaatttggtcggtaagtggacatctggtcgtttacttcctccagtaaacgatcaatctctttttgcatgttttccggagaggggactgatgaatcagcaacatatttgacggagtaataagtccccatcgtttgcccactcagattctgctgttcagggccaccacatgctgacaacagcatagccgccagtagcattacaccccagttgataatttttttattcaacataacttactctttctgaatcgtcagcgcccacaaaatgtgggcgcttatcgttaaatcaaagtgttatatatccgcacaatttactgccattgtgggggatatatatcatggcctgattcaaattatcagccaccgaaatcatccaacaggatgttttcatcttctacaccaagatctttcagcatcttaatgactgctgcgttcatcaccggaggtccacacatatagaactcacaatcttccggtgccggatggtctttcagatagttttcatacaggacattgtgaataaagccagtgtaaccatcccagttatcttccggcagcgcatcagacaatgccacgtgccatgtgaagttttcattttctgccgctaactggtcaaaatcttcggtatagaacatttcgcgcttagaacgagcaccgtaccagaaagtaatcttacgcttggagctcagtcttctcagctgatcaaagatatgcgaacgcattggtgccatacctgcaccaccaccgataaagaccatctctgcatcagtatctttcgcgaagaattcaccaaatgggccggaaattgtcactttatcacccgctttcagtgaccagatataagaagacatgatacccggtgtcacatcagggtttcttggcggtggcgtagcgatacgcacgttcagcataatgatgccgtgctcttccgggtagttcgccatagaataagcacggacagtcggctcactgacttcggatacatagcggaacaggttaaatttatcccagtcttcgcggtactcatccggtacatcaaaatcggaataacgggcaacatgtggaggacattctatctgaatgtaaccacccgcgcggaatggtacaacttctccgtcaggaattttcagtttcagttccttaatgaaagttgctttattatcgttagagataacttcacattcccactttttaacgccgaatatttcttccggcaattcaattttcaggtcttgcttaacattaacctgacatgccagacggcagccttctttcgcttcgcgcttgttaatgtgagacagctcggtaggcaggatgtcaccaccaccgtccttgatttttacacggcactgaccacaagaaccgccgccgccacaagcagaggaaacaaaaatcccctgattagccagcatacccaataatttgtcaccggcaggagcagtaaagcttttatcctcatcgccgttgacttcaactttaatatccccggtgttcaccagcttcgattttgcaaacaaaatcattgctgtcagtgccaacacaatcagggtaaacattactacgcctagaatgattatatccatgaattcttcccgcctttagagctgcacgccggagaaggacataaagcccaatgccatcagcccggtggtaataaaggtgatccccagtcctttcaaacctgccggaacatccgcatatttcattttttcacggattgcggccatcagaacaattgccagcatccagcccatacctgaaccgaaaccatatacgatggattcgctgaagttatagtcgcgctgggccatgaaagaaacaccaccaaaaatcgcacagtttaccgtaatcaacggcaggaaaatccccaatgcgttgtaaagggcgggaacgtagcggtcgaggatcatttccagtatctgtaccagtgcggcaatcacaccgataaaggtaatgaagttcaggaagcttaggtcaacgccatcaatcagggcaccatcacggagtaccagattgtaaacaaggttgttggcaggaaccgaaatccccaaaacaaccgttacggcaacgcccaaaccaaaagcggtttttacgtttttggataccgccagaaaagtacacataccgagaaagaaggataacgccatattctcgataaagacggcacggacaaacaaactaatataatgttccatgttgcctgttactccttatcaacctgctcaggcttcagagtccgcagaccccaaatcagcataccaatgatgaagaatgcacttggtgccagcaggaataagccattaggctgataccagccgccattcttgatggattccatcactgtaatgcccaacagttttcctgagccaaacagctcgcgcaaaaaacccaccagcaacagaataacaccgtagcccaagccgttaccgataccatccataaagctttccaccggtggtgctttcatggcgtaggcttctgcgcggcccattacgatacagttagtgatgataaggccaacaaacacagataactgttttgagatttcataggcatacgcctgtaaaacctggtctaccacaataaccagcgatgcgatgatcgccatctgaacgatgattcgcacactgcccggaatgtagttacgaatcaatgaaataaagaagttagagaatgctgttaccagtgttacagcaatcgtcattaccaaagcagtttccagtttggttgttacagccaatgctgaacatactcccaaaatctgcaatgctatcgggttattatcaaataacggcccaagcaggacgcgttttatctctttgctatcagccatctttcagggctccctcgcgtacttttttcaggaacggaccaaaaccgttatcacccaaccagaaatcaaacatatgctgaacaccgttggaagtcagagtcgctccggacaaaccatctacaccgtaaggattatcaccggctccaccacgaacgatcttaatcgccggagcaccttccgggttatacagttttttaccaacccattgcttacgccattgtgggttatcaacttcaccacccagacccggagtttcgccgtgagaatagtaagtaatgccgcgagatgttacgccatccacatcaatagaaataaacgcatacatcattgaccacaaacctgaaccgtagattggcaataccagctcagttgtttttccgtgatcatcttttaccagatagatttctgccatatcagcgcgacggcggatttttgccaaatcctgtttcgatgataaagcgatactggtttcatcactgcgcagagcattattcaggtcaaacttaccatcacttttttcaagtgctgccgttttcaaattaagtaattcaggctgaatacgactgtcataaacttctttaatttctgctgttgtcatatctggcttgagcaaaccggcaacatccagaatattacgctgcttatccagcagtttctgttcctgctgctgcgctttcaaacctacggctgaaccagcaacgacaatcgaacatacaaggcacagcacaaaaacaacgaaaaacgttctgccgatgctgtcattattttttggtttatcattagccacgggcttttctccgcttaatattggcctgcacgaccagataatcgaacagtggcgcgaacaggttagcgaacagaatcgccaacatcatcccttctgggtaagctgggttcacaacccggatcagaatacacatgaccccgatcagaataccgtatgcccacttacctttatccgtaaatgcagcggataccgggtctgtagccataaagatcatgccaaatgcgaaaccgcccagaaccatgtgccagtaccaaggcatagcaaacatcgggttagtatctgaaccaatggcattaaacagataggacatggcaaccataccgaccatgacaccagcaacgatgcgccatgaagcgatacgggcaaacaaaatgatgacaccaccgatgaaaatcatcagagtggaaacttcacctactgaacccggaatgttaccaaggaaagcatccatccatgttacaggctggcctgaaatggtgttcatcagagcgtgcaggcctgcattcgcccactgagacaacggagttgcaccagaaaagccatcagccgcagtccagaccagatcgcctgaaatttgcgcaggatacgcaaagaacaggaaagcacggcctgccagcgctgggttaaggaagttacgcccggttccgccaaagatttcttttgcgaccacaacaccaaacgtaatacccagtgccgcctgccataacggcagcgttggcggaacaatcagtgcgaacagaattgagctgacaaaaaagccttcgttgatttcatgtttgcggataatggcaaataaaacttcccagaagccaccaacgataaaaacaaccgcataaattggcaggaaataagttgcgcccaacagcattttgctggcccaccctgcatccggtgtcagtgatgcaccaagatactgagccagcatataatgccagtctgaagacagaacctgctgtaatgcctctccgctgtatagatgagtcagggctggtatcgcctgattcccgacgttatacattccccagaacatcgccggaaaaacagacatccataccagaatcatcatacgcttgagatcgatggcatcacggacgtgagttttcccttttgtcaccgtgcccggcgtgtaaaagacggtgctcactgcctcatagagaggataatatttttccagcttgccaccggcctcaaagtgatgttctactttttcaaaataatttttcaggcccatgaattacccttcctgctcaatcttagtcagcacttcacgcagtaccggaccatactcatatttacccgggcaaacataagtacacagtgccaaatcttcttcatctaactccagacaacccagagcctgagaaccgtcagtgtccccagccagcaaatcacgaagcaagtgagtagccatgatatccagtggcattactcgttcgtagttgccgattggcaccatggagcgatctccgccatttgtggaagttgagaaagcaaaccgcttctttttcaggaaatggccgatggtggtgcgggtaatggagaatttattcgtaccgggagctatccagccaaacaactctttctcacgaccttcagacagaacagataccagagtgtggaaacggcccagataatgatgagcttcatctgatttagcgccacacagtactgaaccggaaataatacggttttcaccctctttcagctgaccgtgagtcacttccagcaagtcagcacccagacgggaacgaaccagacgcggtgttttaacctgcggccctgccagagaaatgacgcgatcagtatacaattcaccggttgtgaatagcttaccgatagcaataacatcctgatatccgagatgccatactgctttctgagcactgaccggttcaatgaaatgaatatgtgttccaaccaacccagcaggatgcggcccggcaaactggctgtaagtaatttgagggttgttccccgatgccggaatttttcccgcgccgtggcaaacgtggatttttccttccgtcagttttgacagaacattcagaccatcaacaaaagcctcttcttgcgttgcaataacaacagacggatcagccgccagtggctgagtatcaattgccgtaacaaagattgcctttggtgtggagcctgggacaggagaacgactgaaaggacgtgtacgtaatgccgtccacattcctgatgcaagcaggtttttttctacctgttcacgagtcagccctgcaagttctgtacgctcataacgatcaaacgctattttttcgtcgccattaacctcaatcacaacagattgcagtacacggcgctctccacgtccaatggttacaactttcccacttgcgggactagtaaatactacccctggattctttttatcttcaaaaagaatttgcccttttttaacatgctcaccttccttaaccagcatagaaggacgcattccaacatattcttcgcctaataaggcgacatggcgaattgtcggaccatcttctataacttgggcaggcgctcctgctatcgggaggtcgagtccttttttaattttaatcataagatttgcacaagtttatcagttaaatcatatgctacagctcaccctgtggtatttccgcaggatgatgcagcgacttcagtaataaaaaacagcttgagcggcatatatctcaagttattcatgccgataatcgttacaatattctcttaagtttcgccggcaacgattctaacatttcccccaaacgctgtctgactaatcgagtgatttagctcaagcaaataagaataatttctctgctgaaccgttaactattcgataaagccgagcataatcatcacttttccctactacggagggctttttaaccagactgcccttttatgggtacaaaatatcgttgttatatttactcagcatattgccacgacatgataacctcaatcgcaggatgtcattaagttattaccttcttaggtggttatattatgaaaaaaaatattctttatttttcgtttagctggtttctcgttagtgtaccagtagttactcaggctcagggctggttatcaggcagtaaacaattaagtgaaaaatcaccattaaaacagcttggttctgatatcttcattcaaatattcaaagaagaaaaagtacttgaactctacaccaaaaacagcacaggccattatcaattaacccggcaatatcctatctgtaattactccggagggcttggacctaaaaccctgaaaggggacttaaaaagcccggaaggtttttaccacgtcagccttaaacagttaaaacccgacagcagctactaccgggccattaatataggctttcccaatcaattcgataaataccggggttattccggcaagaatttaatgatccatggtgcatgtaaatctattggctgctatgccatgaccaatctttatatggatgaaatataccgatatgcagaaagtgcgcttcatcgtgggcaacgagaaattaaaattgacatttaccccttcaggatgacgccatcaaatatgaagcgccatcacaataacgtcaattacccattttgggaacagttgcagccagcttatgaatatttcgttcaacatagcacacctgcaactgttaaagtcatcagaggacaatatgttttaaatcaggtagctcagccagacaaccaaactccatcagactacgcgttcaccaaggtgaaataatgcataacttcccggctcaattttatgccactcttcgttatgcgttaaaggtaaagttgcaatcacggataccacatcatcaggctgcgtatgttcctgaaaatcaatttcaatatcctgatcaagcaattttgctttaccgaaaggtgaacgacgggtaatccagtgcaattgtgtcgagcaataagccagcataaatcgcccatccgatagcagcatattgaacacacctttttcccgaagttcatctgccagtgatgcgatgaaacggaataccgctggccagttggaaggccgtttaggatatttcaccgataactgatgtagtatccagcaaaatgcccactcactgtcagtttcaccaaccggacgataatttcccgttttcaggttacgatgccctttcaattgaccgttatgggcataagtccagtatcttccccataattcacgggtaaacggatgagtattcacaagggatacattgccgcggttagcctgacgaatatgggcaataatagcctctgatttgatcggatagccctgaataaaacgggcaacaggagaatgataacagggctggtgatctttgaaggttcgatatccaagaccctcatagaaagtaattccccagccgtccctgtgagggcctgtattcccgcctcgctggataagaccgctcaaactgaaaatgatatccgttggcacattggcactcatgccaagtaattcacacattgcctacctctaacctgaacctgataccttgttaacgctgatttctgctaacactggtttctattaacacgctgcaatcaggcttttaccatctctttttcaattaactgaatcaaaatatggataactttgatatgaatttcctgaatacgatccgcgtaaccgaaatgaggcacacgaatttcaacatccgctgtcccggccattttgccgccatctttaccagtcagggtgattaccttcatccctttcgcacgggcagcttcaatcgccttaataatattaccggaattacctgaggttgaaattccgagcagaacatcaccttgctggccaacagcttcgatatagcgggaaaatacataatcatagccaaaatcattacttacgcaggacaggtggctgggatcagaaatagcgatacccgggtatcccggacggttttcacgataacggcctgtcaactcttccgcaaaatgcatggcatcacaatgtgaaccaccattgccgcaagaaagtacttttcctcccgctttgaatgaatctgccaacaaaaccgccgctttttgaatggcatcaatattggcattatcgttgagaaaattggtcagtgtctctacggcttcagataattcactgcggatcagatcttgatacatggggctcatactcctgaaaggaaatgtcttcgggattaataataacagttattgagtgtaacggattccccctcctgaaagaagatttcattacaccccgacgaaactatcacagcaaaaacagcaatcactttgtgagctggattgtaattaacatgtaaatatattgataaaagccttttcctcatctaaaaaagaagaacaacacaacaggtcagacctctgacaactcaacctgagatttacaggagttttactatgaccgtcctcagcatcatcttatttttagccttaattggcgggctttgttaccgcaaagtcagcctgactgttagcagcctgctgcttattgcctatacattcattatgggtgttaccggcttatggagctactggctactgctgccactcgctattatcctgttccctcttgttttcaccccgacccgaatctctttattctccgctcccggcctgaaagcattccgtaaagttatgccaagcatgtccagaacagagaaagaagctattgatgcaggtacaacatggtgggaaggtgatttgttccgtggcaatcctgactggaaaaaattgcacaattaccctaaaccgcaattcactgctgaagaacaggcattcattgatggccctgtggaagaagcctgccgtatggcaaatgatttccaaatcagccacgaattagctgacttgcctccggaactgtgggcttacctgaaaaaacatcgcttctttgcgatgatcatcaagaaagaatatggcggtctggaattctcagcttacgcccaatcacaagtgctacaaaaactgtctggtgtctccggtattctggcaatcactgtcggcgtacctaactcgttaggcccgggtgaattattgcagcactatggtaccgatgagcagaaaaaacattacctgcccggtcttgcccgtggcgaagaaattccctgttttgctctgaccagcccggaagccggttttgatgcaggtgcaattccggatactggtgtcgtctgtatgggcgaatggcagggtgatcaagttcttggtatgcgcctgaactggaataaacgctatatcactcttgcacctatcgcgtctgtactggggctggcatttaaattgtatgacccggatcatttactgggtgagactgaatctctgggcattacctgtgctcttatcccaaccaataccccgggggttgaaatcggtcatcgccacttcccgctgaatattccattccagaacgggccaacccgtggtcaggatattttcgttcctatcgattacattattggtgggccgaaaatggctgggcaaggctggcgtatgctggttgaatgtttgtcagttggccgtggtatcactctgccgtccaacgcaactggcgggctgaaaagtatcgctatggctatcggtgcttactcctacattcgccgtcagttcaaactgcctatcggcaaaatggaaggtattgaagaaccactggcccgtattgccggtaactcttacctgatggatgcagcagcaacgatgatcacaagcggcattatgctgggtgaaaaacctgccgttctgtcggctatcgtgaaatatcactgtacccacagaggtcagcgtgcagtcattgatgcaatggatatcgctggtggtaaaggtatctgccttggcccatctaactttttggcccgttcttatcagggagcacctatcgccatcactgtagaaggtgcgaatatcctgacccgtagcatgattatctttggtcagggcgccattcgctgccatccttatgtactggctgaaatagctgcggctgaaaaaaatgatgtcaaagcatttgataaagcgctgtttggtcacctcggacatgttgccagcaataccctgcgcagcctctggttaggcattactaatggcagaacgagcagcacaccggttaatgatgcaacccgccgttactatcagctcatcaatcgcctgagtgccaaccttgccctgatgtctgatgtctccatgggcgtattgggtggcagcctgaaacgccgtgaacgtatctcagcccgtctgggcgatattctgagtcaaatcttcctggcaagtgccactttaaaacgctatgaagatgaaggacgtcagaaagaagacttaccattggtacaatgggcggtagaagatgctctgtatcaggcagaactggctctgcatgatttactgcgtaacttccctaaccgtctggtagctggtttaatgcgaggaattgtcttccctctgggtcgttcacgcactgctccagcggataaactggatcacaaactggctcagatattacagactccttctgcaacccgtgatcggattggtcgtggtcagtatctgacaccaagcgagcataatcctcatggattactggaagaagccctgcatgacgttattgccgcagagcctattcatgcccgcctgagccgtgaagcaggcaaaaatctgggctttacacgtctggatcagttagctgaaaaagcattatctgataataagatcaccaaagaagaagctgatattctgaaacgagcggaagccagcagactgcgctcaatcaatgttgatgaatttgaagcagacgcactctctgtacctaacgcaacaaaaaaagcgaataagcaaatcaaagcggcttaatgctgatacaagtgataagtaaatagtaaacaaagcggggcacatcacagccccgttttttttacacttcttccagtgataacaattcctgtattgtctgtcgacgacgaattaaacgaggctgtccctcaacaagcaatatttccgggatcaaagggcggctattatagtttgaagacatcgatgcaccataagcaccggtatcatgaaaaatcagataatcaccgactgaaatatcaggtagcatgcgcgggatgacttcccctccttccagctgggtaaaaacatctcctgattcacataatggccctgctaccaatgtttctttcaagccagaacgactgctattttccccaatatcactgtgggttccgtcacagttctcagataaaacagaaatatggtgataactgccgtacatcgccgggcgcatcaaatcattaaaaccggcatcagccaacacataatgacggcttcccattgactttacggctctcacttctgccatcaaaatcccggcttcagcaaccaaaaaacgaccgggttcaatctccagcttaatatggtgccccaagtgctgttcaatacgctgacgggcttcatgccataaattataataatggcaagtatccacggcttcctcaccgtttttatagggaatggacaaccctccgcctgctgaaattgcctgaatatcgactccacacgatacaacctgttcgaccatcgcattacaaacattcgcaagatgctggtagtcaacgccggaaccaatatgcatatgcagaccgaccagattcaggttgtattgatgaattttctcaagagctaaaggcaaatcctgaaaccagatcccatgtttgctattttcaccgccagtatttgtcttctggctatgaccatgcccgaatccggggttaattctcagccaaaccggatgtgcaggctgacgctgaccaatctgttccagcatatcaatggaaccggcattgacaggaatatctagttcaatgacacgctccagcgtctcttcatcaataagatcggcggtgaacacaatttcagatttatcacgtccgggctgaaacccagcatgaagagcgcgttcaatttcgcccagtgataccgaatctactttaataccctgctctctcatcaagcgcaggatatgcgtattagaacaggctttctgtgcaaaacggataacatcaaactgctttagcttcccaatttgtctgctaataatatcgctgtcataaacccataatggcgttccgtaaacctcgggcaaagcaagaaggttttctggcgtaaaattattgcctgaattatcagtacctgaattaacagtcatagtgggtattgtcattggagcgttctcacaaaatcagcagatacttcattattgccagcaaaaaggcgggaaggaaaatatctattttgctaaaagctattcatttctgatattgttttgctttatttttaaacacatcgttatatggtatacactaacaggcatttttcttcgtgaaacagtctcgaagtgaaatctaaaggagaacactatgcacgcctgctcatggcgacatatagagatttttcatgccgtaatgaccacaaggaacctgactgatgctgcggttttgctgaaaacttcacaaccaacagtaagccgtgaactggcgcgtctagaacagttgttgaaatttaaattgtttgaccgaatcaaaggacgtttattcccgaccgcgcaaggactgaggttatttgaagaagtccagcgctcctattacgggctggaaaggattctcaatgcagcggacagtattcgccaatttgagtatgcgcaattatctatcgcttgtttaccggtattctcacaatctttattaccttcagtctgccgcagtttcaaccaatcctatcctgatgcacaactgaccatcattccacaggagtctccactactggaagagtggctttcggcacaacgccacgatatcggtttaaccgaacatatgcagacacctgccggaactgaacgtgaaactttactgacattgaatgaagtctgcgttctgccggagagccatccacttgcacaaaaaccacaactgacaccagaagattttcatgatcagccctttatcagtctttctattactgacagctacagaaagcttatcgatgcgatatttaacgaacatcaggtttcacgcaggatgatcatggtgacccacagtgcatcatcagtatgtgccatggttagtgaaggtatcggagtatcgattgtcaatcctctgaccgctctcgactatctgaataaaaaagcacagcataaaaacacggggttctgtatacggccattcagtatagaaattccttttatcgttagcttaattaaaccgctccatcgcccatcttccgagccggttgaaatatttattagtcatttaaaacaacaggctaagctatttcctcagaaattagcatcagcttttcagcgttaattgctgccagtgagaggatgaatcaaaccactccaccagaaaatccaataaggcccgtaaggtagcgggcatattttgacggctgacataaataccgtaaatccccatcgtctgaggctgataatcaggtaataactcaattaattgccctgattttaaatagggtgagacggaataataaggctgcatagaaatacccgctccttgtaaagccgcttccatcagaaccgttgattcattagcacttaacgtgccgctgacaggaatcgaatattgttcatcctgtttttcaaataaccataaatttttgtcaaaaaggttataagtcaggcaattatgtatcgccaaatcatcgggtttctggggaaacctttttccggctaaataagaaggagcggcacaaataactgaacggcaagtcgataacggacgggcgattaaattcagtcccagattattagtaatacgaatggctaaatcaatacgctcttcaaccaacttagtcgctttattactgatttccagactaaccccaatttgcgggtacttgcgcataaactcagggatagccacagacagtgcactaattcccaatgcctgacaacagcttactctcagctgccctttcagagttttagcttctgtcgattgttgaactggcattgcttccgccagttctatcagcttgaggcttcgctgataagcctgttctcccgctgatgtcaggctgatttggcgagttgtacgatgtaaaagacgaatttctgaccatctttccatttcagacaaataacgtgacaccattgcccgtgacatatcaagccgttctgccgctgcactcaaactaccctgttcaacaattgtgacaaaaacctgtgctgctgtgatcctgtccatctatatttctgtatccccacgctgattcgattgatttatgcaacaaacagttgccaattatgggatttttcaatcggagtatgcaatctattatatgcgccattcaagcagataagcatttaggaattcaatgatggctaacaagactacagtacataaaacaatattaaataccgcactggccacagctctttcattaggaatggggacattcgctcaggccgttgaacttaaaatggatatttacaatccgggtgaagaaagcatttttccggtctcttctgaagttatcagtggtgagcatgaagttgtgctgattgatgctcagttcagaaaaagcgatgctcaggaactggtcaaaatgatccagaagacggggaaaaaactgacaacgatctacatcagccaatctgatccagattattactttggtcttgatgtgatcactgaagccttccctgaagccaaagtgatcgcttcaccagaaacgattaaagctatcaatgagaccaaagacggtaaactggcgtactggggtggtgttctgcaagatcaggctccgaaaaaaattattgtccctgagccattgaaaggaaatactttcactgtagacggtgagaaattgattgttgaaggtttgaatggtccggcagcagatcgtactttcgtatgggttcctaaattaaaagcagttgttggcggtgttactgtatctgagaatattcatgtatggattgccgacactcagactaaatcatcccgtcagaactggatgcaaacattagaccaaattaaaaacctgaaacctgaaactgtggtaccaggtcattatgtcggtcatacagccatgacactggagtcagtgaattttactcaaaattatctggctacactggagaaagaattaccaaaagcaaaagattccgcagcattaatctcagttatgaaaaaacattatccaaatcttgcggaagaatccagccttgaattaagtgcaaaagttctgaaaggcgaaatgacgtggcctcaataaattaaaattatcaagggtgttacgaatagtagcacccttattttattcaaatagtcattccccgaaaaaaacaccataacaaaaaatgaaattatcatttccaaaacccctttaatactttatatttaaatgagaataaaacttataaccaaaatataaaaacacaaactcaccaattaaacacaaataattcctaaattaagtgacattaatcatttttttatttttataactcattaataaactgaagttgtgaccaatgagccatactgcaataaatcaacttgaataaaaaactcactttatttagatttggtttcaacggagagataagcaagccaacctaagataattagatgcttctaacgtctaggttatgtaaggtaggcagcttaaagccaactagatgcttccaacgtctagcgcaagcaggatgaacagcctaaaccagctagatgcttccaacgtctagcgtatacaggagctacccagcctactagatgcttttaacatctattgtatgcagaaagtagcccaatacattagatgcttttaacatctaccatgtaattaatgtgtactataggctctaatcctgctctctcccatatttttccaattctcgcatttaatattaaccaagttcaataaattgcccagtagacagattcttcgcattcggtagccataaccttccccatctaccactacagtgacaagcataaatatgctgtatattttcttttttaatatatcgcctgatacgcaatagtttaaagggagaagcataacgtaaatgtaagccaccaataatggcatagaccttatcgatacccgttatagatttacaaaactcaaccatatcgataacaccacgatgcccgcagccaataaaaataattaatccgtggcgggatttataaattaaagctccttcatccttgataaaatcaggagagtaactctcacctacaatcacaccataacttttactttcttcttttttaatctctcctgaataaatgaagttatcattaatgtgagtttcatcttttgaaaaaaaggtgtcgaaattatcataattaacctgtctggataacattttaaatttcagagcatgatttttcgttattaaccacccataatatcttttgtttatcacctctggatgacaaatcactttagcattagtagaaaaaaagggagcccaccacagtgatcaaaatgaccatgagaaacaataacggtggaaaccttcgataaatctatatttaatttctttgcgttatcgataaaactaccatcaggcccagtatcaaaaagaattgtattttcctgatcctgaattaataaacttaaaccttgcttattgattaagcttcctttgtagggtgcaaaaacctggttttctaataatgctgttatttttagtgtcatagtacactcttttaagctgtgatatttctatcgtttcctgactatatccaatatgctgagttatctaaacttgagctagctcgataatattaatcccagatagataaaaaaacatcaaaagtatggcagaaaaacaaagataaggcccaaaagcaataaaccctggataacttctccttttcagccagataatcgcaaaccctaacagtccggagattgaagacagaagcatcaacacagggatcatctctataccaatccatgcccctattgcagcagacagctttaaatcaccatagccaaccccctctttcttaaaaatacaccgacataaccaatataatacccacaaaaataaataccctgatatggcgccatatatcgcactcttgatcggaattaaattatcaccgctattaaacaccaatccgaaccataataaaggctgagtgaaaacatctggtaactgataagtctttatatcaataatggctaagaaaactaaagtaatgcaaaaaaacgaaattattatatcattcagattaactggattattgatccactgattttttccatccatgaaaatactcaatacagcttccataaataacatccctgtaatgatatcccttatttatttcctgacgttaatcagaacacggtgaatattaaattttcccacaggtcattagcaatgaaaaatctattaaaactgccattatgaaataaatatgcgagccagctcgcaaggtctttttgtctgatagacaacttgattaggctaccagcgctcctttatcatggcagcatatgccataccggggttatccggagaaaaaaggaaagaaaaatatgcgaattccccgcatctatcaccctgatcctctcactgtaggagctgaaattagccttagtgatgatgccgccaaccatgttggccgtgtacttagaatgagtaacggtcaacggttgcagctctttgatggaagcaatcaggtttttaatgcagaaattacagaagccagtaaaaagacggtcaaagtatatatccatacaggggagttggctgatcacgaatcaccattagatctgcatctggggcaagttatgtcccgcggtgaaaaaatggaattcaccatccaaaaatcggtggagctgggtgttaacactatcacgccactactttctgaacgctgtggtgtaaaactggatgcggaaaggctggaaaaaaaactgcaacagtggaaaaaaatagcaatttctgcctgtgaacaatgcggacgtaatcagatccctgagatccgaccggttatgtcactcgaagcgtggtgtgcagaaaccgataacagcctaaaattaaatctgcaccctcgtgccagccaaagtatcaatactctaccgttgccagtggaaaaggtacgcctgctgattggcccggaagggggattatccgccgaagaaatagaaatgacggcaaatcaccagtttactgatatcctgttaggtcctcgtgtcctgcggacagaaactacggcactcactgcaattacagcactacaagttcgttttggtgatctgggttaaggagaaagaatgatcaagctcggtatagtgatggatccaatttcatccatcaatattaagaaagacactagttttgccatgctgctggaagcacagaaacgtggatgggaagtccattacatggagatgaatgatctctatctgcatcagggggaaggccgtgcgcgcacccgtttgctgactgtggaagaaaaccctctgcagtggtatcagtttggtagtgaacaggatattgcccttgatacactgaatgttatcctgatgcgcaaagacccgccttttgatactgagttcatctacgcgacttatattctggaacgggctgaaattaaaggaagcctgatcgtcaacaagccacaaagcctgcgtgactgtaatgaaaaactgtttactgcatggttccctgaactgacgccggatacgctggtaacacgcaacgccagaacactgcgtgaattccataaaaaacatggtgatgttatttttaaaccattagatggcatgggtggcgcttctattttccgtctgaaacaggatgacccaaatattggtgtgattattgaaacgctgacagaccatggcagccgtttctgtatggcacaaaatttcctgccagctattaaggacggagataagcgagtactggttgtggacggtgaacctgtcccttattgtctcgcccgtattccggcacaaggtgagacacgaggaaacctcgcagcaggcggacgcggtgaagcccggcctctgtcagaaagtgactgggcaatagcgcgcgctgtcgcacctgtactgaaagaaaaaggattaatttttgtcgggcttgatatcattggtgaccgtctgacagaaatcaacgttactagcccaacgtgtgcacgtgaaatagaagcggccttccctgaggtctctgttacgggtatgctgatgaatgcaattgaaaaacgattgggtaaacaaacggtataataggctaaacaacttccatttcctggtagcgtttgccatttattatataggctcacatgctgtgtgggccactttattcatttatcgtaaaaatcatcatcaaaaaacatgaacttacagcaccatttccttattgctatgccttcgctcactgatccttatttcaaccgttctgtagtttatatctgcgaacatgatcaaaacggtgcgatggggttaattatcaataagccaatagctcaggtttctattcaggggatcctgaagaaattagaaatttcccccgaagacagagacgataacattaatctgaacagcccggttatggcaggtgggccgttatctgaagaacatggttttattctacatacgccactgtccggatttagttccagtatacaaatctctgatgagacgatggtaacgacctccaaagatatgctcgaagcattaggcactccacgtcagccgaaaaatattttaatgacactggggtatgccggctgggaaaaaggtcagctagaaaaagaagttatggaaaatagctggcttactgtcagtgctgaaccctcaattattttcaatacccccgttgctgatcgctggcgtgaagctgcatccttattgggaattaatatccacaatctcgcattacaagcaggacatgcctgatgaaaaaccgcacagtgattgcattcgatttcggtacccgcagtattggtgctgctataggacaagaaataaccggcacagccagagcactagattctttcaaagccaaagagggttctcctaattgggatatgattgagaaactcctcaaagaatggcagccagatttagtcattgttggcctgccactcaatatggatggcacagaacagccagtcactgcacaggccaaaaaatttgctaatcgtatacatggccgctttggtgttcaggttgaactgcacgatgaacgattaacaacggtagaagcgcgctctcatctgtttgctcatggcggatatcgtgctcttgataaaggcaaagttgattccacttctgctgtcgtcattttggaaagctggtttgagcaacattgttgataataaaaagttatttataattaaagggttattatcgtaagccaacaatacagtgaagttataatcataggtatttgttccactattttgccagctattccgccagcaatcccgataatctgcgttgttggcggctctgctcgtaggtttgcattccgcaagcggctccggtttgcattaacgttgctatctgatggtttttcccttccctgatcaaatggctgacagcctgattgacgactaaaatttcataaatagccactctccctccatccttagcaggaagcagctgctgggcaataactgcctttaaactgcctgccagctgagcgcatatccatcctttctcatctgcgggaaatacatccaccagccggtctattgcctgaattgctccacgggtgtgtaatgttgataaaaccaaatggcccgtttcagcggctgtcagtgccagccggatcgtttctttatcacgcaattcacccaacaggatgacatcaggatcctgccttagtgcccctttcagcgcggtctgataatccggcacattttccccgatttgcctttgctgtatcagacaattccggcttaggtgaacaaactctatcgggtcttccagtgtaatgatatgttttctgacatgattattcagagtgttaatcatcgctgataatgttgttgatttaccgcttccggttgcacctgttactaatatcaacccattttctgccagtccattttcctccggtaaaacaaggcgctgaataatatctggtgcatatagctgttccagggtcgggcacttgtcagcaattaaccgtaataccaatgaaaggtgctcctgctgatagaataaattccctctgagccgccttttatttggcatttccacgacaaaatcaacatgccctgcgctccttaattgccgctgttgctcttcagataatattccgttgctccatgtattgatgaagtcattatcaatctctgccagatgtgtctgtggatataacacatcattgatgcgcaaaattggtactttcccgacacaaagatgcagatcggaggcattatgctttacactaagggccactaacttttccatattcattttttaatctcctgagtttcttatgcacaatatcgaacaaaatcttcacgatgtcaggaacaacatcgcccttgcagctcagaaatgcgggcgctctccagaagaaattacgttacttgcagtcagtaaaaccaaacctgcggaagccatcgcaaaagcgatagccacaggccagagggaatttggcgagaattacgttcaggaaggagttgaaaaaattcaactgttcgttaaccacaacgatttggtgtggcactttatcggccctttacagtctaataaaagtcgtttagtggctgaacacttcgactggtgccatactattgaccgattgaaaatcgcccagcgtttaagtgaacaacgccctgaaagcatggcccctctcaatgtccttattcagattaatatcagtggggaaaacagtaaatcaggtattcttctggaagaacttgaggaactggctgcaacagttgatttactccctaatctggtattacgtggtctgatggccatccctgcgccagaagaagattatgaacggcaaaccgctatttttcgtcggatggaacaggcttttattaaactaaaggcacaatacccacggatagatacactttctatggggatgactgatgatatggaagccgctatcgcctgtggctcaaccttagttcgcataggaaccgccatttttggtgcccgcgagtatggttctacagcaagttaattaacagctcaacattaactcattaatattcgagacgatttcttcatggaaaatagaaaaatcacctttatcggcgcggggaatatggctcatgccatcatcgcgggtctgatcaacaaaggctatcctgccaaacaaatcactgcctgctcgcccaacacaattcgccgtgatgttctggcagaaaaatatggcatcaacagccagagtgacaatattcgctatgctcaggaagctgatgttattgttttggctgttaagccccaaatgatggaagaagtttgtagttccttgcgttcgcaagtcaattttgagcaaaaacttgttctttctattgctgccggtattcctctttcccgtttttactcatttttgcaggaaaatctgaatattatccgcattatgccaaatacgccctcacttatcgggcaagggatcagcggcatgttcgcacctgaacaggtcaatcaatctgatcgccagtttgctgaagtattaatgaacagcgtcggcaaagtctgctgggtaaatgatgaaaatggcatcaatgatattattgccgttgccgggagtgctcctgcttatttcttcctgtttatggaatcgatgcaacaggaagcagagcgtctgggcttcgacagccaaacggccagagaactggttctgcaaacggctatgggctcagctaaacttgctgaatcacaggcagaacttccttttgctatcctgcgtgaacaggtaacatctaaaggtggtacaactgccgaagcattacgcgttttttatgaaaaccatctgccggaagttgtatcccaagctatgcagggagcaatacgccgggcacaggaaatggaaaaattattttaaacaaccaatataatttgatcagggctgctacatgcaattcttaaactttctcttttttacagttctggatttatataccgcagttttactgcttcgagtctggatgcaatgggtacgttgtgatttttacaatccgttctcacaatttatcgttaaaatcacccaacccgtggtacgcccattacgtagggttcttcccgctattggccctattgatacagcatcggttgtttttgcttacattctcgtcatgctcaaactgatgctgccttactggttagcaacaggacaatttcttgtccagctattccctcttggaataattgaactgctgactgccgcaggtaaactggtattctggcttgtgatcgcccgcgcattattgagctggatcagtcagggacgtaaccctgtagattacgttctgctccaattaacagaaccactaatggcacctatccgtcgcattatcccttctatgggaggattggatttctcagccatgattgtgattctgatcctgtatgcgctaaatgctctccgtgccgatgttttagcgtggttaattccgagcttaattggttaataaataataagttaattggatagaaacaatgcagaaagttgttcttgccacaggaaatgctggcaaagtacgggagctggctgatttactggctgactttggtttagatatcgttgctcagactgaattgggtgtaaattccgcagatgaaaccggtttgacctttattgaaaatgccatcattaaagcccgtcatgctgcggcagtcaccggtttacctgcgattgctgacgattcagggctatcagtcaatgctctcggtggtgctcccggtatttattcggctcgttacgcgggagccgatgcctccgatcaggataatctggaaaaactactggaagccatgagcgatgttcctgatgaccaacgtcaggcacaattcaattgtgttctggtttatttacgccatgcagaagatccgactcctctagtcttccacggccgctggtctggtttcattacccgtgagccagccggtaatggcggttttggttatgatccggttttctacgcaccggaatttggctgtacagcagcagaattaagccgtgaacaaaaaagtgctgtttcacatcgtggacaagccttaaaaatgctgttggaagccatgcgtaatgcttaaattaccaccattaagtctttatattcatattccctggtgtgtgcaaaagtgcccttattgtgatttcaattcacatgcattaaagggggatgtaccacatcaggaatatgtcgaacatctgctgacagatttacgtcatgatttgccaatggttgaggggcgggaagtctccactatctttatcggtggaggtacgcccagtttgctcagtgcagaaggaatgcaacggttgcttgatggtgtcagggagctactgcccctctccccgcaggcagaaattaccatggaagcgaatccgggaacggttgaagctgaccgtttcagtgcctatcaacaggctggtattaaccggatttcaatcggtgtacaaagttttggctcagataagcttatccgcttagggcgcattcatggcccggaagaagcgaaacgcgctgcacggctggcggatagtcttagtctgcgcagtttcaaccttgatttgatgcatggcctgcctaaccagacactggatgaagctctgaacgatttacgtcaggctattgaactctcaccacctcatttgtcgtggtatcagctgacgattgaacccaataccagttttggctcacgcccgccagtcctaccagatgatgatgcgctgtgggatattttctctcaagggcataggttattgacggaagctggctatcaacagtatgaaacctcagcctatgccaaacaggattatcaatgtcagcataatctgaactactggcggtttggtgattatctgggaattggttgcggagcacacggaaaaatatcgtttgaagacgggcgtattctgcgcacagtgaaaaccaaacatccgcgcggttatatgcaagggcgttatttagataagcaacatcaagtggatcacgatgatcgcccatttgaatttttcatgaaccgttttcgtttgctggaagcaatgccacgaaaggatttcagtaattttactgggttaccggaaagcactattcgacagcaaatcgatgctgcgctggcaaaaggttatatcactgaaagtgatacacactggcagatcacgaaacacggaaaattattcctgaattcgttattagaaatgtttttgtagaacagtttttatagcgctatttttgtaaaaatagcttctgcaaaaataaggctgctccttgaatttcaagggcggccttattttatgaacacatttaatcagagtgattataaagcatcagcgattgcattcacctgacgcgtcaggctctctatcccgccaccagacaggtaccataaatccggttgcaaatagactatcttgccatttttataagcgttggttgacttcacctgaacggtttcaaactgagcttttgttaactcccctgctccaatcgctttactgcgatcaataataaagatgacatcaggatttgcctgagcaatcatttccgcagtgacaagacggctcttatcgttatctgatttcggtggtaattcagcgcgctgcgctttcaccacattgtaaacaacggtttgattattcgggtataactcgccagcattatgtaataaaaccagcaccttgttatttgaagattttgctttttcctgcgcagtcgttatcgttttttctaaatcagcctgctgtgcttttactgcatcttgtttatcgaacagttcacctaatagcttcagattattttcaacagatggcaggtaatttttattatccgtacttaaatccactgtaggtgcaatttgggataaacgatcataaaaatcaccctgacgcccggtgatcacaattaagtctggttttatttcagccagtttttctaaatccggagatttcatcccgccggcatcattcatcttttcagatacgttactactcacatattcaggcaaactttctttcggcagtgcaataacacgctcagatagccctaatttggccattgaatcgtaagtaccgaagtcaaataaaaccactctctcaggatttttcttaaccttagtttctccggaatgatgttttaccgtgagataatccccagactgagtgatgactgaatttggcgtaaatgttgtagattgctggctgaatgcggaatgactagtaacagaaaataatgaggctaaaataatcggcaggatttttttcattagggcacctgaagtaatcatgtgtataaaaagtgatttgcattctagatgcccaatgtaggatgtcaatcaaataagaatcgatttcatcatgattcttatttgatatgaaatactgtgatttagttaatggaattcaaaaagcgggtgcgcaattgttccagtttattggctttatcgcacacttctcctttaaagcgttttagctctttttcctgctttttccattctgcctcaaagccattctgcatacctcccagcccgccgagaagagacattaacatctgtttgccgtcaccattttgattgcttgttttacggctcatttcgttaatactgtcctgcaatattccacccaaactctgctgaatgagatccttcccttccgtttctatctgtttgatggcctggtaatggaaaaaaataccatcaggacgggtttccaatactttatcaatttgcttattcaggccagattccaacttagtcaaacgaacgcgaatattgctatcctttcccatcgtttcagtgacaactttatccaacgcctgacgggcgtcagtgagatggtttaaagcctcttttttcacccatggcaaatcctgccgggtaagttgctgaaactgttttgctttgctgcgttgatcggcattcagcgatagtgctttaccattacgaaagacagaaccatctggcataattttcaggctcctgtgttcaccaatcatctgaactgagtcggccgtgacaataatgtcatctttgagtgtcgtccggcactctgaaccagcctgtgcctgaacagcaaataccagtgatgccgcaaccacaatttttcgtaacataccttctcctgtttctcctcagcgttgcactcctctatcttctattcagagctactgcaattagctgctaatgtttcaagttaaaaaatggaacgtccgatgcgggcggctaatttttccaatgctgcacaaccagctagtgagttacccgcacgatccagttccggagaccatactgttacagtaaactctcccggcacaacacagacaattcccccgccaactcctgatttcccgggcattccgatcctgaaagcaaattcgcctgaaccatcatacatgccacacgtcaacattagcgcattgatctggcgggtttgccggaggcttaaaatttgctgaccggaatcgatcatccgccctttattagccaagtaaataaagcattgggataattcaacacaattcattttcagagcacaatactgaaaataagtttgcagtactgtaagcacatcattttcaaaattaccgaatgacttcatcagataagcaatggccgcattacggctagaatgttccatttctgaacgggcaacaacctcatcataaccaatatctttttgccccttaga

SEQ ID NO: 274 - DNA, 30934 bp, Xenorhabdus sp.
  CDS (28418)..(28612)
gtcgtgatactgccgatatgattcagctgatcaaagaatttgatgagaggggagtcgccatacgttttctggatgatgggatcagcacagaagggacaatgggcaagatggtggtcaccattttatctgcggttgctcaggcagaacgccaacgaatactggagcgaacaaacgaaggccgtctggaggctaaagctaaaggggttaaatttggccgtaaacccacaatagacaaagctcaagttcgccatcttcatgaacaaggtatcggagcaacaaacatatcgagacaattaaaaatagcgcgtgctacagtctataaaatcctcgctacggtgtaacggtactcagaatcgtcacttttgggggttcttcggcggaacccggtctggatttgcacgctcatggacggatgagccgttaccggtatgatcacgataaagaaaggcagcatatccgttcgttcttcaaccggttgtcgaaagagtgtggttttgccgtttcccctcaccgttttcgtcatacactggccactgagctgatgaaagcaccggatcgtaatttgcagctggtcaggtgtttgctggggcaccgcagtctggcaaccacactggaatatattgatatcgatatggagatcgcagggaaaacgctggagaatgaactggcaatctatctggatattgcggtgtaaggataaccggcagtaaaaaagacagggcaggtctcagacaggattgaggaggtggaggtgtgagtcactgccctgcatcaatagggatgatatgaaaaaagggctatttgcgatcccctgtcccgtaaagtctttcccttacttgacatcagaatcaattactgaaatcattaccttgcacgaaaaaagagtgcttgcaaatgcaggcactctgtattctttaatttacggcttttttaaacattgaacgtacaaactaagcgatcaattgtttaacatcttcttaacagccctaaattttaacttatttgttaattacctgatagtattcaacaaattagctttaaaatcgtggtgccggaggcggaatcgaaaatcattataacttgttgaataatcaaagtctataaccttgccttccttttatgccccttttaatgcccctaagtttttttgcttgctttttattctatatctgactgatttttattatttatattactaattgtgtacttttaaatcatcttaaagcaaaaaagccgtgagggttaaaaatggtcaaattgggctgccattttacgctcagggcttaagataaaaaatgttcatttttacgaagtcgatcacaaattatagcaggttattcctgtggcttagcgcgggctttcctttctaataattctccggtatgagaatcgaaataacggctggaccaaatctctgagggatggatgccaagataatctgcaatgatccattcacctttcggccacggtctgctgaatgcatttgccagtgtcgatgaactgagtcctgcctcacgagaaactgctgctaaggttgtcccgcgtttgcgcaatgcggcgatgatatcggcctgatgccagtcattcctaacgttgttattcattcctgctaccccttccattaattaatattgatggtggcgattcagacagggttcgcagtaccggtaacgtccaaccggcgagaccgaagcctcccctgcctgaatcaccattgaaagggtgatagcaagcacactggtagaaatttcctaccagtgtggacgttaattcaaggctgcgaaaccctgaccattagattgtgctaatggcgggaataatttaactgattgttttacctgacacaataactgaatcactaagtttaatgactataactcctctcaagagtgcataaactcagaggggaatacgggcggctaaatcaatctttattgtttattctcgttcgtgattgtttcgctgtccgtatttcccctgtgatttttagactacttttatgcagttagaaacattttccctgcgtgtcggttaggttcaccgttccgtggtgcgtcagataatgtgtagcagagaggcattgtgttgagtttttgcaggagttcgctacgtgcatgccaagcacggcgatggtttactccccgttcagtgcctgattcaatcaggatgaacgcctcattattcgtgacgtgtgatatctcctttctttactgcatcggcctattacaaggcggtgagtgaaaaacaaacgaaataagtgaattaaggcagaaaaatgccaatgaaaagtggtgacactgagtaatacggggttcaaatcggtcgtaaagccagaccggacatgctctggacgttggccgctcggcggcgtcacttggtaatcgctgcgctttaacgcaagtgacgccgccaagctttcagggcgtttaccgtgcgttaatcaaagcataggtaaaacattgtgattgtggcaggggctattgctctgcatgaatgataagccggtgcataacaagaccgggagactttcatcgtcaaacaaggggtttatgtttgacaatatctgcttccaaaagtgcgcagatgtaccgcaatgcttgctctctctttcaggctacgggagttttttattgtcgctaaaaagcgatttaaaccagtttagattagctgatttttttagttacggcaatgaaggttgttattttaattacagatggtcaaaattgaacctttgattcaattttgaccatctgttgttgttatggattcataccatcaaaaggcaaaataaagaaaggagcacattgttttgcttcacaaccgaagaaaatttccttattatcctttacgagagtaatcattcctccaccatttatatgatattcccatatttcattacctatttttgcttttccaactatgtcacatggagtttgatagaataaaatatatggagaagaatcatattccttgctaatatttaaaatattatttacatcatttttacttaatttccattttttgcatacattaataatatctttatcattgctatttgttatctctaatcctgttacattaattatttctactttgttttttgagtaagtataagggctaaatactattagagtaaagatcagcaccttcaccttctgttttataagatattttatcatgttcatatatatcactattacctaaactataattacattttagtaaattgatcaatttcttaattgactcattttgttgtgtagtagcttgatcccaggacttagatgtcttgttataagctgcaacaacttcaattcctacactatcagtattcataggatatctatcaggatattcttttaatttttcatgatcatgaattttttttgtattccatccccaaccacttattttttttgcttcattagtattacaattattttctgccatacacttagattttattcttcctatgtgatatgtatgttgttttaagctggctgtttgttttattgtaccatccttatctataataaaatgtgttccaataccagttgatttgaatgatgatatagctggtgacatttttgatcctccagtcctatgtaatactatagcatgcactgtactcatttcaccatgctctaaagcgctaacatgatcttgaattatatcagtgtttttaaaaaaaccatcatcattaacatatgggatctgatttaatacatgcttaataaaatcatctctcgcttctggaggtgggcatgtcgcacaggctttaccagcactccatgtgttattttcatcatgcttagataattcttttattaactcctcttttttgttaaagcagatattgtcattaagtgctaataacagcgttttttccttttcgttgataggttccatttagtcttccttttgactataaattaacagaatttaagcaataaatgctggttaaatatagttcataaactatgttcttttcttgtatgaaccaaaaagtgtatttatatgtgctttcagtcaatatttacactgcctccaccaataacaacaccgccacaatcaatagcatctcctgttctagcggcaggttttccttcaataaatacagagccagaaccccccgctattgcccgtgaatgtgatgagtgtgattctaaagtatctccctgtctggctaaatataaaccatctactttcacactgctggcaccagtaataacaggtgttgctgggcaatcaccatgctttgtgcctatatctccgattctgacggcatttcccatactgtttctctcccgaaattaatttcaatatacagatagatttattaaatattaagaataaatttcttagctctataccagccgggagtctcatcatcagaaagtctggttaaaatggatttatcaaactcatcaatatcgaaattatcttctctgaccaccttcttaagaatttcctctatagaacgcatgtctgttattttctcagaaataagataatcatagaaaaaagctaaaaatggtaatgaattattgatactgatactttttcttagatttgctaattcagatagcaaaatggagtcaagtttttgtaaatatttttctttttgcttcatttcaattaatgtgtattgctcttcattgattttgaaaattttatatttccctttggcgttagcaggaaaaggttctctgacttttacaaagttatccgtgtgttcttcttcaagataacgtgttgtgatacgcgtgattggccccaaaaaacaatgtacttcccaatcactcaatacccccagaaaatcccagatattgcggggatcataaaaacggaaaaagaccggcttttcctgttggggaagcagaacttgcaggtattttcgtaaatgctggcgcacggtcttcatgtctgctgcactgtggacgaaaattccccacggggttttgcggcattccagccagattttaacctcttccgtgacctgtaccagataaggggcgatttccaccaattctggctgaagaggctcaccataaagacaggcggaaggcgggtcataacgttccagcatcaaaaacaggtcggattccgccgcaccatcaataagggcgtagagtttttcctgactcattcgggcttctccttctctttcatggggcagtgggcgacaaacatggagccttcgcttgctgcggccagcaggatggcgggattagccggtgccagtaaatcgccggggctggcaccggagttcaggttaatcgccgtgcctttaatatcaatcccgcccgcgtgaagcacaacaaaatttccaccgacatttaatgtgattttgctaccactttgcagggtaagatcgccctgcgcatccacactgactaccccctgaattttttcagccagatcgcctttgagctgtaacgaacggtcgccgtcaatctgctcaatataatttcccgtagttttatgatcctgttgaccttctacggtcaccttgcggttattggctattaccagttcatcgtcatgaccaatgctggttgtacggtcatagttaatgcgttccccgcgtgaattacgtacctgaatggcgaggtttttctgagcatgaataaagacttcttcgcgatctttttcatcttcaaagcgtaattcgttaaatccttcacctttatgggttttagagcggatcgacatctgggtttttgccattggcaggcgatttggcgggatgttgttggcatggtaggctcgtccgacaataatcggttgatcggggtcgccgtggacaaaatccaccaaaacttcgtgcccaatacggggaatggcaatcatacccattaattgccctgcccacgcctgactgacccgtacccagcaagaactgcggtcattaaattcaccgtatctgtcccagtcaaactgaatacgaacgcgcccgtgttcatcacagaaaatttcttcgccttccggccccacaaccgtggcaatatgtggcccttccatttggggtttcgggtagggggaaggtcgataagagttttttcgtgtggtgaaggtaaagtgattagacagccacgtaccgctaccgcctgactgggtttcatcggcttgtggctgttgacctgaatgggttatctgaattaactgccattggtcgttaaaaacctctctggggtgatccatcaggttaaataactgccccggccacatggcaaaacagtccccctgaccgttacccaactgagtgtcccggcgtaggtactccaaacgatactgacttgcccgttgccccagttcgtcatctttatagcggctgggaaaatcataataatgatagctgttcagtattcgctgattatcaagattgcgcccttcataccagaattcccggttccagcgtggattcttaaacgttctgtctttggtcgtgatattggccacgcccacacgttctgaccagctaaactggcggatacaggtggtttctcccgtcacatcggtttctgggcgataggggacggtaatcacctgattaagagacagacaggagtcgtgaaacacaatgcgttgctcgtgctgttcctgatcgaaagtgaaatagtaaaaaatgccttcatcagccattaagcgctggataaaggccagatcgctttcatcgtactgaacacagaattcccgtggtgggtgtttgtaaccaagcgcaaagaaaaagtttcgtaccccattttctctgagcaggctttccacaatatccacaacagactgattttggaaaatccggctattaacccgtaaggatgcgcgccataaaggaggctgaagggtgatatggtagtggctttgatggcgcccggttgattgcagtgaaaaatgtgtcaccatgcccgtgacttgccgttcaattcgcccgttacgatgtacagcaaaagcggcgctgctgtccaaaacatcggcaaagttaatgtcagcagtctgacaagtcagtgtcgcttccagccgaaaaggggttgatagcgcttcattcagagaaaaatcgacaacagcaaaagtttgttcaggtaaattttccgtaatcagtgtaaataccaaacctgagcgatcaagtagttggctgattttatccattaccctgctcatttgtattctccataatcttttggtgtatcaatccttaattactacctaaatagtaaaaataatttaataataaagttatcattgcacgtttttggtacaatgaggagcaggatataatagaattatttatacatacaatcacgaataaaagaacatcagaaaaattgtgactaacgtctcttcttaaatgaaatcagcttattacgtcatctcaatttcacgtaatacaacgaattaaatccacactgacgcgctgcgcttgtcatctccgtgctaccgggctaatacattaacccggtagcacggagagctgaaaaacgcctgccagaaaaatatttcctcacctgcgcctcacttttctcctcactttttattttcctcacagcaaaaataggtgaggaattgataattttttatccttaaaaatcaattgtttttgtgctcctcacttttcttgtatatatgagaaaaaagtgaggaaaacggtgagcagtaaaatccctctcctcaccgctcctcactttttgactcactttttaatcttcattattctggttaacaatgctgagttcctgcccgtgtcgggtaatcagcccgtcctgctctaacttggttaaccaacgactgaaattcttcacattcacgcccatcgattttaaatcatcacgcacaagggcaatgctgcaaggttctttcagggcagtgcgtgagcggatacactgccacagtgccgtatggttatcggttttattggaaacatggctgatttcttcctcttcaacaggatcgcgtggcctgtcaatcagcgtcagtgacgtaatctcttcaccgtccttgtcggtaaaaagttccaccacacgcatatcataggctttggtgtccggttcttcggcatctttcattttggtgcaggtgataaccagcgatccgccttttttcccttccctgctgatcttgtattcaacatccaacgcggcacgaagggcgctggaacctctcgcgcctttactttcgtctttgccggagtggtgaacaacaagaatacttgcccccgttttggctttcagttcgtcacaaccccggacaaacgcacccatatcttttgaatcattttcatccgcaccgccaaagcagcgggctaacgtatccagaataatcaagcggacaggctggcctgtttcggcttcaacctgttgggcggcaatcaccagctcgtgcacttcggcaggcgaggccggaaaaacgggcgtattgatcagatacatattttcaaccgtctggttgttgacgatttcccatgctttgatgcgccgtggcacgccgatcccaccttcaccaaccacatacagtacagcaccctgagcaaccgattttccagcccatgcctgacctgtagcaatatgacagccccacgcccctgccagaaaacttttatatgaaccgctcgccccgtaaatgctgcacagggaatgcgccggaataatccccttaaccacgtagtctaactgcgcatcaaagccctcagagccgactgacagaggtaattttgttttgcgatttggataaatgctcccgacgttgtcataacgacgggtttctattgcatcgctgcttatcggttccctcacctgatataacgcccgactgaatgcctgctgtactgcctcaatgccatgctgttggcgataatcatcccagtcggctttatgcgttgtcggtggtaacgagatccagccattcaccgccagcgctgctttctctgccgagagcttgccgatatttactttgggtttgccgtgtgtatccagttcatcaggatgatgccagtcattgtctgcggcaataatgatttttacgtccggccagcgttcccgaacggctttggcgacagaaaataaattgcctgcatccagtgccgccagaacgttgcctttatagagctggttaaccgtcagtgccgtggcgtaaccttcggcaataatcactgtgtcgggaaactcttccatttctgacagagcaataaacgcgccttttttctggctgccggacaataattttttctcgtcattgggtttgatgatctgcgcaccggtgatttttttattcagtgttgtcagaggcaataaaaccaaattatcagacagtaaccgctgattaggacaatgcagcccttttgcagtcagataaggcgactgtccggcgacagtttgcttcatcagagttgccactctttcggcaatggatggtgtcggatcagtgatttccctggcgggcttggattcgagcaaaggcaatgccagtgcatccgcgacaactttggctgcttccgtaattgtgatccggttggtttttgccaccaaatccagcccgtcaccgtagttcggggcatcacactggcggcagtgccagttgccatgatggtgatcatcaataaagtgaaaacggtcagtgccaccgcagacagggcaggcaccatgtttaccttttgccgggatatcgatgccacaagcaggcagcaggttttgccacgaatacatcgcggatgttttgacggtctggataagatcaagcggttttggattgcccactgttttttgaactgtaaattcagggcgagtttgggtatgctgtatatcagccatcgtttttacctcaattaacggttgttgatgaaacgccctgtcagtgtgtgccgcacttcggggcgttgtattttatgttacgtgtcttatgtcatgttctcttctgtgttatgccgcccgcgactctgcaatgcgctgcgcaatccagttatcaatctctgcttcaataaaagccacggaacgcggaccaattttgacctgtttcgggaattctccatcgctaatcagtttgtagatccacgctttgctataacccgttctgcgctgcacttccggcaaacgaataaagtttgtctttgctgtcattgtcatattcattctcctgttaccgagtccctgagcgctcaccgtggacgttatctgatgacaggcggattatttaaaaagctggacttaatgaacagcgttaattgtttttctcccgatgaaaattaacgggttgcaaattgtactaacggttctttctgtcgcgcagcggcttggcgaagtcatacggtgtaatggatttttcccggttcgcatccagatagtccgcccaccactgcaccatcagccgccgttcgtccagatgtttggaggtgtgaatataggctgctctaacgttgttgcgttcaatatggctgagctggcgctcaatggcgtcatcgctccacaggccggattcgcccattgcaccgcgtgccattgtgcggaatccatgcccacagacttcggtctgggtgtcgtagcccattgcccgtaacgccttgttaaccgtgttttcgctcatgactttcgcggaattatgatcgctggggaacatcacttcacaattgccgctcagttcgtgcaatgcgttgataagccggacagcctgacggctcaacgggacaaggtgatccgttttcattttcatgccgcgctcagaaaagcgaacgcctttaatcggttgccttgtggcgggaattttccacaccgcattttcaaggtcgatttcctgccagcgggcaaatctcagttcactggaacggacaaacgtcagcagtgccagttctaccgctattttggtcagtagacgcccgcgataaacagacaatcggttcaggaaatcaggtaaatcttcatgaggcagggcgggatggtgacgggatttggtggtggtgagtgcgccggtcatatcattggctggattagtttccaaaatatcattctggacggcgtagcgcatgatggcggtaacacgctgacgcagccgctgggcgatatcgtgtttgccttgctcatcaatggtcttgacgggggctaaaagctggctggtgcgtaatgtggtaatatcgcgggcaccgatatgcgggaaaatgtactgctcaaggctgcgcagcacagtttgacggtggctgtcgctccagcgtttgttactggcgtgccatgcacaggcgatttcttcaaacgagctcactttggcgggcgaggcagtgcctttcttctcagctttgggatcgatgccctgtgccatcagctttttggcttcatcgcgtttagtgcgggcatcggctaatgataccgtcggataaacaccgaacgccagacggtcttctttcttatcggtcggacggtaatacttcatgcgccagtattttgaaccgcgtggcgaaacttctaaataaaggcccccgccatcggcgagtttgtaggttttttctttgggctttgcagtttcgatttgccgggcgtttagtttcattattaagggcatccttgtaatcgaacggtaagtgccccgaattatgcccttcgctgcatcttgattgcaacagacgaaactagacctagaaataagaatggatgttgattttgctggatttagcaggaatttttttactgggctggacttcactggaagttgaagtggtgcccggaggcggaatcgaaccaccgacacggggattttcaatcccatcgtaagttaattcaatgtaaaatttcctaacaaatccgatttgtacgcttaattttaatgagtgtacaaaatgataattcttccgataatttcccccaaaggtggtgaaggtaaatccacccatgccgccaatctggcaggattttttgccgatgccggttttcgtgttctcctgattgatgcggattattcgcaacccactgccagcagtatttttcctttgtactatgaagcgcccgccgggctgtatgaattactgatgcagacggtggatctgaaccagcctgagaagatcatttcccgttcgataatcaaaaatctggatattctgatttccaacgatcccgatgaactcctgccaacggcgatgctgcatgctcccgacgggcgtttacgcttgcgcaacattctgcaacatcctctcttcagtcagtacgatatcattttcattgattccaaaggtgcgacaggtgtgatgagcgagctggttgtactggcggccacacaggacgttctggggataatcaaaccgattctgcccgatgtccgcgagttcctgcgtggtaccctgcgaatgctgacccggctccggctctttgaaaactacggtatccggttgcctgctatccagatactggtcaatgggattgaagggacgaatcttgaccgggacacactgagtgaactgactgacattatcaataacagacggtatgacgcctcggcactgggtggtaggcagatttatcagctgctgaaaacccggatagatctgctggatatctacaaactgggacatgtccgtgcccagcccgtgcatcgccttgaatataaaaccacccggaaaagtccggcggccgcacacaccatacacagtctcgcctgtgagttagtgcccctatgggcggagaaattcgatgcggtactgattgaacaaccggcgggagacacgaaatgaatgttatctggcgagctgtctgcttttgttatgacaatgccgaactgccgttcacagatacgcaggatgagtggtttgtgtttatcgatgcaccggatcgtcaagcggcgcaggcaaagtttcaggcattattaccggctgtctggggtgtttcatctgacctcgttgagcatttcagtccccgtagtgaagaagaattatgtgcgcagtcactgatgccggggacaccggatgatgtggctttgctggaatgcggttgggcacaggataaaccgcagtatttaaccgccagcgaagtgctgttctgggtggcttcccctcaactgcaacagcggttaatcgcggcgctgaatactgtcagcagggaggctggtgatgcacaggcatgattttttacaagccgcgaatgaagtacaacccagcaatggttacgctgaaatggccgtgattggcgggttgatactggacaatgaccgctgggatgaccttgtccagctactcaccccggacgattttttctttccggcacaccggatactgtttcaggctatagttgaactgacagaaaaaaataccccgtatgatttgctcaccctgacggatttactgacccatcaggggcgtctggacaacgtggggggctttgcctatgtggccgaagtgtgtcaaaacacacccagtgccgccaatattgtggaatacgcccgcatggtggccgaaaaaagccagttgcgtcagttactggcactgggcaacgccctcagcacggaggtttttcagccccatgttcaggccgctgcgctggccgaacaggccgaaagtcagttgttccgtctggctgaaaaaggggcgacccgacaacagcaggaggtcaccctgttgcagggcgccgaggcactgatttctcatctggagcgcattcagggcagtaacgggatcaccggcaccccgaccgggtttcaggtgctggatgaaatgacctgtggcttacaggctggtgacctgatcctgctggccgcgcttttttcggtgggcaaaaccgcactggggctgggctggtgccttggtgccctgcgacagcgggacgaggcggtggtgcagattttcagtctggaaatgccgacggcccaactgatgctgcgcctctcttcaatggaaggcggcgtggctttaagtgccctgcgcaacgggatactggatgacgagcagtggggacgtatcagccagagtctggaacagttcagccagtgggatcagcgcctgattatcgatgattgcagccaccagacgcctgcattactgcgtgcccgcgcccgccgttatacccgtaaatacggtaaacctgccctgattatggtggattacctccagctgatgtgtgcgcccggacaggaaaaccgcacacaggaaattgccgatatctcccgcagcctgaaagcgttaggcaaagagctggattgcccggtgctggcactgtctcagcttaaccgacaagtcgaagcccgccccgagaaacgtcccaataatggggatctgcgtgattccggctcactggagcaggatgccgatttgatattgcacctttaccgcgacgaggtctatcacgagaacacaccggatgcgggtattgccgaaatcattattggcaagcagcgacagggaccgacaggcacggtgcgtgtgcggtttgaggcgcaatatacccgtttttcagatttcgatgacagcgggaggtaacggatgggacgtaatacgcagaatttaggtcatgccttgttacagcaggggcggcaggccgtggccacgctcaatgacagcccgccaatggcagaaatgccgatggtcctgacactggatcagctacgccccaatccggataacccccggaccagccgcaatccgcgttatgacgatatcaaagcgtcaatcaaagcccgtgggctggatacggtgccgaaagttacccgtgatcctgacggtgacgaggtttatatcttcagtgatggcggtaatacgcgctatcaaattttgtccgagttgtggcaggaaaccggtgatgagcgattttaccgggtgcattgcctgtttaaaccgtggccgggacggttgcagtgtgtgatcggacatctggcggaaaatgaactgcggggtgacctcagctttattgaaaaagcgctgggtatctgcaaagctagaacgatttatgaaacgcagaaacagaaaaaaatcagcctgcgtgagttgtccggactgctcagtgaaaccggttttcctgtcagtgccagccatatcagccggatggaagataccgtccagtacctgtacccgtggatgcctaatctgctggcatccgggctgggaacaccgcagatacgtcttttactggtattacgccagaatgcggagacggtctggcaacagcatgttttcagtataaacccggaacccacatggacctttgatgaggtttttgggagctgttgtcgcaagtttgatgcattggaagactggtcgccggagatgttccgggatgagctgatcggcgatttattgcaggcactgccacatccgtttttgaattatgaccgttggatattggaattagatccgaaagaaagtaatcgcagacaactctttggcgaacaggcctccgcgtttgaatatgtgccggcggtttctgctgcagccaataatgtggcgccgattcgggtgcctaaacaggaatcgaacccacggcgcgtttcccaacccgtcagcgtcagcgagacggcacaaaacccggagatggaatattccccggtggaagaaacgggctcatccgttgcgttttccagcaaaaatccggtgatcccgccttatcatccggagaacggggataactcacctgaatctccccagaatgctcctgaggccgaatgcctgcactttgcccaaaccggtctggagccggtgagttcggtctgggacatttccccgatgcaggacgatatcgagcatctgcaaagtatggtgttccggttggcatttgaactggccgaaatgatgggctgtgatcgcgatttgcttcccgtgtcggatgaaggttcagccggcttttgtctggtcaatgcgccggaagctcatgccttttcgcgtttattgctgtcgctgaccggagaaaacacagttgacgccccggtattgacgctgactgccgttctgtttggcacaccccatcgtgaggagatgcctttattggatgatacccagacggtgaaattcctgcgtttgctccgggttattcgccgtttgcgtgaacttcagcgcgcaatagcgccggagacgatagcagtgtagctataccggtacggtgcgcctgtttccaatgtgttgttcaatttgttttgactggcctgatattggaggaagtgtatgcatcatttatctcaagcaaccaacaacctgctgttgcagctggtgatggatttgaagaacggctatatccgccgttgtgaggcactggggctggcacccgatgaaatgctgatattgcagaatctgacgattgaagatctgcattatctgggcaacagtccggtgtcggtgctgaccatccagatccatcacagtaatctggcgcgcattttacatcaggcacggattgagcagcagcggttacagcgcattgaccgggcactggagttaggcggctccattgaactgatgcggtatttttttggcttgtccagtctggaaatcgccgcccgccgacgtattgcggggatgactgtaaaaccgggacgcaactcacccctgacggaagaagaaaatcaggcgttatggcaacgctggcaggcggcaaagattgccgatacggacagcgccgaagggctggatatgatgctggagatggccgcgcaccaccagatttcgctgacggccgtctggcatgcggtgaagggctggcagcacggcgaggcaccggaaccggtcaaaaaaacaagcctgaaagccattaattaaccttcaacagaacaggaaacgatgtcagcaaaattaacagaaatgatgcccggtctgcatgtgccctcgacgacacccttgtcactgcgccgtaaggcgcaacatcaggtgagcagttaccagcggggcgagcgcaattacgtccggttgaaagaaaaaggcaccgggtatctgaaaatcaacgtagggttgttctggcgtctgttaagtcgcgatgacggacaatcgtgggagctgatgctccatgaacgttacaacaatgaaattcgtaaatagtccgtattgaagtcgtgtcattctgcatcctgttcaacgtaacagggtgcagtcctgacattatttttaccgactcaatttaaaagccaaggccggagatcaaggatcatgataaacctgtcagcagacagcataattgcacacacggttgccaaaatgaaaatacgtctggaacaccgcgcagacgatgacgtttcacaacttcgcagtggtctgttgtttatgggcaatattcaggatgcctatccccgccgtctgttgctggatgatcgcctgtcgccgctggataaaacgggctggatgatgatccgattgtatgcgttgaataatgaaggtgccgtatttcccagctatgacgaattgcaggtcctgttggcgtccccctataaaggcaaggcctcacgtgaaaccgtcagtcgggtgttactgatgctgcgaataaccggctggctgagtttatgcaagcgtatccgcgatgatcatgggcgggtacggggcaatatctatgcgcaacacgatgagccgctgacctgccgtgatgctgaaatgctcgatcctcactggctggatacggtggcggaagcctgtcgcagcaaaaaccgcactatcagccagacggctctggacgtgctgactgacatcaaagaagacccgttgatgcgccatcgccacagtcatattcgcttgctggaagaaagactgaatgcggtgcaaacaccgcagcaaagggtgatgcgccagtctcttcaacaaggcaaacagcaaaccgaactcagggaaatcaggccgggttcggaaaccggactgagtcagaaagaggcgcaggctgaactgaattcggataccgaactcagcctgaaatcaaggtcttatagtggttcagctaaaccgaactgttatgtacgttctttcacacagagtgtgaataaaaaaacatacgtagaacctcaatctgcagtttttctgccggaagggttgtgccgacaactggaaccggaagatgtgacgatgctgaccagccagttgcaggcgctgcccactgaacaggcgcagaccgtgctgagttgtctggacaaagcactacgggcaggaaaaatcggcaacccggtcggctggctgctgacgatgatgaaacgggcacgggacggacaattatacgggcaggctgaaacggtggttaccccgcctgctccggctaaggcttctgttgcatccactcaacgtattgaacggcctgtttcaccctcctcacaagcccatgttcgcagtatggtgaaagatatccgtcagcgactgacgctggcgaagtatcaataaaatcagacgtgattaaaaaacgaactttgttggcagtgccaacagagaacaaaaaacagacagtgttggcagtgccaacactgcgtaaaaaataatcttttttggggtaaacatgaggtaattatcttatcacattggcgcaatcgatcagcgtcgtgtatcgatcattcaaagccgccatcgccgttctatgtactgaatctgcatcaattattgaaccatcaatatatttcagatctcgactggcgcaggcatcagtgcagacaaaattttcatagcctaactctaatgctttaatggttgttgcagtgacacacatatgactcataaaacccgccagtattaactggttacggtgagtcaatgataacaattcattcaatggtgtattgtaaaatgaatcaggtaatgatttggtgataatatattcctcactactagcctcaacaccctgaataaaatgtacattatctgtcgcaggatcaaatagggcagaccccgttttagcgtgatgtacgacatggaatactggaatatgtttttttctggcatgatctaatagcttagctgcattaacaatcgcatttttccctgctttccctaatggtagtgctccatcagaatattctttttgaagatcaatcaatacaagagcagctttattccagtcaagagtcttttctggtgcgccaacgagttccagtaacgtttttgtcgaattcattatcttagcctttatagggaaattaaacttattcaagattacgggatgccatatcaaaagtaattgagaaatattgcatatggcatgtgcaaaaaagtgtgtattcaacgcgtcatccgttaaatacaaagttattaaattcagtttgtaagtgttaggatttctgttttggttgttaacaggatacatatatggatagtgtaaactgggatgatctgaggttttttactgcacttgtagaatgtcgtactgtctctgctgcgtcaaaaagattaaatgtgaattatgcaacagtatccagacgaacagagcgtctggaacacacattaagacagcgcctttttgatcgcactcaggatgggtatattccaacgattgaaggcttgctcttatataagaagactgttcaggtgagagagaatatcgaaagcttagaagactattttactcaggagggtaaatttaaaaaaagtgttgttatctcaatggtatctttaatggcggaatatttactcattccaaaactcagtcattttgtaaaaaaatatccggaaatcagactggagattgatgcctcaaatcgcaatgtcagcattccaagtaaagaggcggatatcgcattccgcctagatttaccggaaaagggagaatatttaagtcaaaaagtcggggaacttaattataaactctgtgctattcctgaagttataaaaaagataaacgataaagaaaacgtcaacattattacattcaacagtgattttagtgagttgcctgaatctcagtatctgataaagcggtttggaaacaaatctattcgcttccagtcaaattctgttacgactcagcgcattgcagctgaaaatggatatggtgtagctctgctaccttcactgatcattaagaatagcccgttagtgtctatagaattggatgagcctgtaatacgccccatttggatgttgacatccaaacagacaatgcacatgacagcgagcagattagttgcggatgaactgcgaagcatttttgatgaaatgagataattatttatcaataacgtttaatacctaatccggtgtgactgataattagtcaccattgacattgccaacagggtttgaaaaatatacttattgagatggaaataaaaagtcaggaagttatctgatgtattggaatagcaatcggtaattcaacgtaccccagcaagcatattttaatggattgtccagcataatattcggttataacatccttttacttttgtttcacaaaactggatgtattagtgatgtacgtctgattcaatgctggagtagaccatcacggttattcctattgtgattcaaatgtgatatgaaatatatcaaaaacaaattaatggattaaaaatgaaagagttgctacaaaatcaccctaataatagagaatttcccgtcaatagttttcggatagtcaaagcgtcgatagaaagaaataaaaacatggattttcttaacccgctcaaaactgtcggtttaagaatactttggattacaacgattttagtaattgcattatctactggtataactgatataagcattgatgttgataatataccgtcagcaggttttatattgtcagtgttgttagtctgttttaccttatttggtatatttctctctatttatactttttttcatgtgaaaaatctgccgattgctgaacaaaaggattattatcagcaggcgggattatcaatattaccggaagaaaagcgtcaagcgctacgtctggatattgtgggaagttataacagtgggttctgggttgagacactggagcattacccgcttaaaagccgaattttacaacataatgacaaatatcgttttttccccttatcagaatctaaaccacatcaatcgcaactatataccgattggggaatagtagataaagaaggatatttaaaaatgttgtatgaattatgggccggaatgcactctaaacattttgcggttgactctgttttggcagatgggaagatgtttaaggagcttagcgttctcatagaagaatcaactgaatacgtacaacagtgttcacggtctattaatggaagacctccagccttactttggggatttgacctctggcgagcgattgtcttaagccggaacagttttgctgcgggttatattagtgaggaaatggcctgggataatatattgaaaactgcagattatgtgtatcaactttttgatagctttgatgaattttacactaactatcgattaggtaatgcttattggagccgggattttgatagggcaaaaaaacgtctggaaaatttccgtttttataaatcacattgtgattggcctattgctcagttgccttggccaaaaaggaaggacatatttatggaggaatatatgagcaatggtttcgctgactgggttaattcagtgctgcaggcacaaatggaaaattcgatcaacgacgaagtcgcggatgaagagcaagagcatattgtcccacatattttgcattaactctcttatgacgttagatatccgtaccctatgatgacataaattgaatgaaaattaatctttgttggcagagccaacaaagttcaaaaaacagtcactgttggcagtaccaacagtagttaaaaaaacatcttttctgacagtgaataaaactcatcattttctctttttccataactggttatccattgaatcaccgcctcctttgccttgatagtttgactgacttatcaaggcaaaacaggagtttttgtgcatgtcagattgggaagaaaaacccgcatctcagccgcgtttacgcgccggtgtcttaacctcgtcattaacgattgaattacatacccactatgccatccggctctgggcagggcgccggcgggaagatatcagcaaaacacatcaggtgacggcgatcctcggaatgccgcaggtgatcaaacgggccggtcatatcagtgtggatgccgctgccgataatccgtatgccgatgtctggctggtgaagctggaacaggcgttggaagccgcatcggccaatctcaggcagaatctggctattttgcaggataccctgaatgcggtgccaaagcagattaccctatccgccgtttcctctgtcgaaccgctgaatatcggcgtctacagtcattccccgttaggttaccgctgtgtctggctgctggttggttatgaccagctggcgatgaaaacatttcaggcttttcattacggactgatttcacgggccgagcgggatgcttttctgcataacggcagccgggccattcgccaaatttatggttttgtgcgttcttatcgttcactggcggtcacccggcaggatattgcccagaaaacccccgccgggctggatgccattaaactgttgggtgaaccgcatcccgatattctgtcgggcaggcagcgttccgcgttcgcctccccgttacgttccatcgaacacgattaacagaggggaaaagatgcagctttatttatgtgaaaagccctctcaggccagagacattgccaacgttctgggcgtgaaacagcgcggacagggatttctcttcagtacccgtatcattgtcacctgggccatcgggcatttgctggaggtggctgcacccgaacagtatggtgaacaattcggtccgccgtggcggatggaggtgctgccggtgctgcccgtgcaatggcaatggacggtaaaaaaagaggccgctgaccaatttgccgtgatccggcagttattgaaacaggttgatgaagtcattattgccaccgatgccgaccgtgaaggggaagtcattgctcgcgagttgctggaatattgtcgtttcagcggtgcggtcaggcggttgtggttgtcggcactggatgacaccagtatccggcaggctctggcggccattttaccgggagaacagacggaagcactctatcaggccgggctggggcgggcgagagccgactggctgacaggtatcaatctgacccgtttttataccctgaaagcgcaggcactgggttttggcgaggtcttatccattggccgggtacagaccccgacactggcactggtggtgagccgggataaggacattgcgaattttgtgccgaaaccctactggcaggtgatggctaatctggaaaaagacactgtccgctttcaggctaaatggctgcccgctacggaggagggcgatgaagaaaaccgctgtacccgggaggctgtggcacaggctgtgcaacagtgttgccagcaggccacacaggctacagtgatggccgtcagcaaaaaacgggagaagaccccgccgccgctctgttttgatttgggcacgttgcagcagacggcatcccgtctctgggggatgggcgccagtcaggtactgacgattgcccagtccctgtatgaaacccataaagccacgacctacccacgcacggattgcgggtatctgcctgtgtccatgcaggcggatattccggtggtattaacggcactgacgcgaaccgacccggccatgattgatactatcagtcagctggacgaacaacaggtttcccgggtctggaatgacaaaaaaatcacggcccaccatgccattatccccacccgtcacgcttttgatctcacccggttaacgaccgacgagctacaggtttatcagcttattcgtcagcattatctggcgcagtttctgcccccgcaggaaacggatgtgacggaagtgacactggatatcggcgggcaatgcttccgggcgaaagggcgggtcaatgtgaccacgggctggaaagcactgtttatggaaaacttcgcggaagatcaggaaaaatcagaagcggattcatccctcccgcgctttcatcagggcgagcgctgccggattattgcagcccgcattcagccgctgcacaccaaaccgccggccccgtttaccgaaggcacgttgattgccgcgatgaaaaatgccgccagtctggtcagtgatccgcaattaaagcaggtcctgcgtgagaatgccggactgggcacggaagcgacccgtgccggtattctggacaccttgtttaaacgccggctgattgagcggaaaaagaaagcgattcagtcaacaccactggcacgggaactgattgccgggttgccggaggtgctgaccagtccgggcatgacggcgttatgggagcagtcgctggaggatattgcgcagggcaaaacatcgctggcggtgtttatgcagaaacaggcgcagtggctgttgcatctggtggaacggggtaaagcccagccctttcatctgacattaccaaaaacgccggactgcccgaactgtggtggtcggatgcgacagcggcaggggaaaacctccccattctggggctgtgtgaactatccggtctgcaaggggatgctgaatgacaaagcggttacccagtcgcgtaaagcccggcgggcaaatcaaaaagtctgatgatctggttgttgattgacgtgttgatgagatgctttaagaatcagcctgtttcttaaatgatcggtgagcctgcaacgatcgcctttgggtggctggaaaactcccgtagcctgaaagggagtgcctcaacgcggtacatctgcccccctttgaaagcagatattgccggttcaacggcaatgaaggttcattattctttatcataacgtcagcaatgtcactgcctgacgctcggcgggaaaaaccattcccgtcagggagtcgggttttctccgtcacattgtattttgacttccatggagaacattgtatgtctgagaacaccacaaccttaaccaaaaacgactatttcaacctgaatattaaaggactgggttatctgaataatatccgccatgtcagcacggccagcgggacgtttctgagttgcgtgatcaatgcattaaatggcccgggtgataacccggtctatgtccgttttgatatcaccgtggtgggtaaggaagcgaccagtctgatcgggcgttgccagaaatcggtggatgaggataaaaaagtgttgctgggctttaccttaagtaacccgtccactgatattttcaccctgaaacgcggtgatcatgccggcgaacagcgtgtcagcctgaaagctcgtctgattaaagtggactggatcaaaatcggtcaggacaaagtctatcgggctgaacagtctgattcggctcctccccagaacggagttgcgcaaactgaatatgcagaaaattcattctgatattccttttaccccaccgactcgccctgatatttcagggcactccttttattcttaaagacaacaggaaacagagatgaatattgcctcgattggtgttctggcactgcaatattgccataagcagttaccgttaaccgtgttacaaagctgtgcggggttttatatcggcaccatggaggcgggcgttccgtgctcccgtgaatcaaccgaatattttgccagccgtgagcaggcagaactggcgctgcaacaagggcgctggacacaacgccagtcagcataacagggaggaaatcagcatgtcttcgcgcggcattaacaaagtgattttagtgggttatctgggacaagatccggaaatccgttacctgccaacaggcggcacggtgacaacgctgtcactggcgacttcagacagttggcgggataaacaaaccggtgagactcgggaaaaaaccgaatggcaccgggtagtgatcttcggaaaattagccgaaattgcggcggagtatctgcaaaaaggggctcaggtctacattgaaggccagttacaaacacgtaagtggcaggaccaacaagggcaggatcgctattcaacggaagtggtggttaatgtgaatggcaccatgcagatgctgggcaatcgtggcgatgcaaagccagtggctaagcagcagagcgcaccaaaatccgtccagaagacacaatcctctcaggacgttaaaaaggaaatcgcacccacacagatggcgcagcgctcagcgttgccggaagacaaggaagaagtggagtgggatgagatcccgttctgagtggtttaacctattgccctgttatcacagggcctattcttatttttgagtaacactatgtggtttatttacatacgagcgatcagtgtggtcagcttattcagccactgactgaagtgtgggcattgggaacgaatggtatctaagccaatatcaccgacaatcaatgggccatgtaaggttttatgataattgggaatgatggccaaaatgcgtttagatggcgctgtttgtgggctgttgttgatatcttcaggcgtatcaaatttatctttgatggcctgtagtgcggcaatcggcgcattgtcatcaagccagtcagcaaatttttcgggttggcagaacagtaaggcttcaaattcatgtaataacagattgggaataaaattagtctgcccgatatcattagcaaaagcctgctccagctgtacgacccgttcgttggccgcattatcccgttggatgtcatagtcagggaaatcggtaggcaaaccgtagtagtcgataagtgtggtgacgaatgcgccgggatcttgtcggcataagcgggtaatttggtgttttactttgccataactcgtgataccgcctttctggcgggaacttgtctgagctaatatgggggtcagatagatctgttgtgcaaaaaaataaggtgccagtacgtcccgcacgaacgtttcttccgtctgtccttctacaaaaacattaatacggatcatcgctgtggtctcccgccgagtaagtttttcttccataattcacccaggctatagtcttcaagccattcggacagggtttcattatccagtcgcttaaaagtggaagcgccttgttgtttgtcgaccacaatcaggtcatcagcatcaaactgattaaccagctcaaccgactgagtagaaataatcagttggtgttgattactggcatttttaatcagaccagccagtacgttgattgcataaggatggagtccgagctcaggttcatcaataataatggagtcgggcatgtacgcttcaggttgtagcagcactgttgttaataaaataaagcgcagcgtgccatccgataattcactggctttaaaaggaatatcctgctctttttctgtccattcaagctgaatatagtcggcattatccggcgtaggccgcaagtagaaatcaccaaaaaaaggggcaaccatctgaatggttttgataatgcgggtgtaatgctgctgatgatgtttttgcaggcgatacaaaaacgcggctaaattagccccatcttcccgcagataatcattatcattaatacggtgggtttgtttgactttggcactgtcactcgtgtcgtgaaaatgatatacccgccaacgaagtgtggtcggcaaggtttcattttcagggttcgcgtgatgctgattaacctgagattccaaatgtccggcaccaatatcatactctctcttgctgtcgccaaagagtgattcatggcggaacatcatgcggttatcattagtcggttccagctcaaattgataactattgtgaccaaaagaaagcgccgcactcatacactcggtttttttacgaccaaaatgtaataacgtatcgggtccccccattctgccaacaagcgattgtaagcgctgatcgagtaatacggagaccaggcgaaagaaactgatgaaattggattttccggcaccattagcgccaataaggacattcaggctccccatttgtaaatcacattctgcgatagatttgtagcctgttatcttaattctgcttaagtggttattattcgttattggtttcataatcttgccttttcagcatcatgtgactcaattgtgtcttattatacacttttctgacggtcgtctgatggatatcagtttggtcaagtatacctgtcacgctgagtctcttattttagagaatgtgcaataggcaggtttttttgttctttaaatctgaacagaaggtataaccctgtcattttatttacttgttaaacttacacgttcgattattgaattagataacgtaattcgttaaagtagaaatgctatcggcaaaatccgatagtcagggatttccaaccctgaaaggtcaatccactggtaggtagtttctaccagtgtgcctgttttcgccctttcaatggcggttcaggcaggggagactcacgtctcgccggatcgattgacctccggtattggaaaccctgtctgaaccaccaccaataatctacagaaggggaagcaggtatgacgatgattcacactcaacaagactggcacccagccgaaattatttgtgcattacgcaaacgtggtacgacactcgccgctttatcccgcgaatcgggactcagttcttccactctggctaataccttatcccgctcgtggccgaagggggaacttatcattgccacccgtttgggaatggaacccgctgaaatctggcccagtcgttatttcgatgactacggcaattttattgaacgaaaaatccgtctgtcggttgatgaaaatcaggtagcggctgaataacgcacggataaaaaaactaacattgacacacaataacgtttttttcggcatattaattttcagcaaacacagttgagttgttcattgaatacatcacagggttccttgcatagtcaggattattttacgactgagcaggaacctatttggcatgaaaataacggtgttaatcggcttaatcgcggtcatactgacgggatgtacgactcccgtgaaacaactgctccctcagccttcccaaaatagcttttcttccgtgacgctgacacgaaatattcaatcagtttcaccggatatttatcagcaaacacccgaagtcgtccgttatggccgctatgtgctggtcagtacagccccgacagcagcgcagcgtgatccactttcccagctgatggatattcagctccctgcgtcccagagccccacggtggctgatgcgatgcgttatgcattacgtcaatccggttacgccctctgtgtgcctgacaagaggaatgacattttatatcgccagccgctgccatccgtacacgcgcagttgggtccgattcggttacgcacagcattgcaggtgatggcaggttcagcctggcaactggaagtggatgaggtgcagcgtgtggtttgccaccatttgcggcagggttatcaactcccggctccggctaaacaacctcagtcgggagggcgctgatgaaattacaccagctcagtgtgttggtatggctgctgagtagtccggtctgggcagtcacgccgacaccgttagcttcgcagcagacacacacgacagaaagccagccgcaatccctgaaaagtcaggctgaacagtggcagttaagtgccggtgaatatcagcgttatcagcacctgatgaacgggccacggggtctccggtcaccggggcttgatccgttgaccgcattagggattgaagccgaaagcgatgtcgaacgccgccgttatgctgaacagtgggttaaggcagagtttgcccgaacggaaaaagagctgcgtttccagcgggaagtgaatactgcctggcagcggctgtttccggatgttttgccggtcaatatggaaaaatcgcgtgagaacaatggtcggctggcattgtttgtcagagccaaagattgtccgcaatgtgacacccgtttgatcgaagtgctggcggcaaagcagccggtggatatctatctggtcgacagccaacgtaatgatgacaccttacggcagtgggctaaaacgcatcatattccggttgaacaggtccgtaaccgacaaatcacgctgaatcatgatgcaggatactggttccggtttggcaaaggattgatgccggtattattacgacaaggggagcagggatggcaggtcacttcattacaatgaaacggctgagcgtatttcccattatcggtctgttatggatgactaccggtcatgccgaactgaacgtgattgccgatttaggcggcaaagatgcctcgcccttttatgaaagcattgatgcccagccggatcatcgttctgcacaatcacaccatttcttgccagaagtggtgggggaagcggctatgttacccgtcaacactcccgaactgacaccgggaacagtgacccgccgggcactgcaattacccggcattggggcgttatttctgattggggatgatcctgaatcacaccaatggttaagccagcatgctactacactggcaaaattgcatgcggtggggttggtcgtcaatgtcagggaaatggcgggcttacagacactgcgcgccttagcaccggatatcctgttatcaccggcttccggcacagagctggcccgacgcttgcaactgcaacattacccggtgttgatcaccgaaactcaactttctcagcagccatcaccatgagccgtcgttatgtggttgaagccttgctgcgtccggctgtcgagctgaataccgctgtggtttcagcggttgctgcatttatctgtatcagcgcaccgtgggcgattgcacttaccccctccgtcagctatgtgatggcagggggttttactgtattagcaataatacgcacctggcagggtattcaggttatctgctatcgccgaaatctgagtcgtttaccgcgttaccagatgagcacacaacgcattcccgtcagtcatcagcgcttgtttttgggccggggttttcgttggcagcagaagcatacccagcgtttgcaggatacgcgacgaccgga

SEQ ID NO: 275 - DNA, 30934 bp, Xenorhabdus sp.
  CDS (19412)..(20683)
tccggtcgtcgcgtatcctgcaaacgctgggtatgcttctgctgccaacgaaaaccccggcccaaaaacaagcgctgatgactgacgggaatgcgttgtgtgctcatctggtaacgcggtaaacgactcagatttcggcgatagcagataacctgaataccctgccaggtgcgtattattgctaatacagtaaaaccccctgccatcacatagctgacggagggggtaagtgcaatcgcccacggtgcgctgatacagataaatgcagcaaccgctgaaaccacagcggtattcagctcgacagccggacgcagcaaggcttcaaccacataacgacggctcatggtgatggctgctgagaaagttgagtttcggtgatcaacaccgggtaatgttgcagttgcaagcgtcgggccagctctgtgccggaagccggtgataacaggatatccggtgctaaggcgcgcagtgtctgtaagcccgccatttccctgacattgacgaccaaccccaccgcatgcaattttgccagtgtagtagcatgctggcttaaccattggtgtgattcaggatcatccccaatcagaaataacgccccaatgccgggtaattgcagtgcccggcgggtcactgttcccggtgtcagttcgggagtgttgacgggtaacatagccgcttcccccaccacttctggcaagaaatggtgtgattgtgcagaacgatgatccggctgggcatcaatgctttcataaaagggcgaggcatctttgccgcctaaatcggcaatcacgttcagttcggcatgaccggtagtcatccataacagaccgataatgggaaatacgctcagccgtttcattgtaatgaagtgacctgccatccctgctccccttgtcgtaataataccggcatcaatcctttgccaaaccggaaccagtatcctgcatcatgattcagcgtgatttgtcggttacggacctgttcaaccggaatatgatgcgttttagcccactgccgtaaggtgtcatcattacgttggctgtcgaccagatagatatccaccggctgctttgccgccagcacttcgatcaaacgggtgtcacattgcggacaatctttggctctgacaaacaatgccagccgaccattgttctcacgcgatttttccatattgaccggcaaaacatccggaaacagccgctgccaggcagtattcacttcccgctggaaacgcagctctttttccgttcgggcaaactctgccttaacccactgttcagcataacggcggcgttcgacatcgctttcggcttcaatccctaatgcggtcaacggatcaagccccggtgaccggagaccccgtggcccgttcatcaggtgctgataacgctgatattcaccggcacttaactgccactgttcagcctgacttttcagggattgcggctggctttctgtcgtgtgtgtctgctgcgaagctaacggtgtcggcgtgactgcccagaccggactactcagcagccataccaacacactgagctggtgtaatttcatcagcgccctcccgactgaggttgtttagccggagccgggagttgataaccctgccgcaaatggtggcaaaccacacgctgcacctcatccacttccagttgccaggctgaacctgccatcacctgcaatgctgtgcgtaaccgaatcggacccaactgcgcgtgtacggatggcagcggctggcgatataaaatgtcattcctcttgtcaggcacacagagggcgtaaccggattgacgtaatgcataacgcatcgcatcagccaccgtggggctctgggacgcagggagctgaatatccatcagctgggaaagtggatcacgctgcgctgctgtcggggctgtactgaccagcacatagcggccataacggacgacttcgggtgtttgctgataaatatccggtgaaactgattgaatatttcgtgtcagcgtcacggaagaaaagctattttgggaaggctgagggagcagttgtttcacgggagtcgtacatcccgtcagtatgaccgcgattaagccgattaacaccgttattttcatgccaaataggttcctgctcagtcgtaaaataatcctgactatgcaaggaaccctgtgatgtattcaatgaacaactcaactgtgtttgctgaaaattaatatgccgaaaaaaacgttattgtgtgtcaatgttagtttttttatccgtgcgttattcagccgctacctgattttcatcaaccgacagacggatttttcgttcaataaaattgccgtagtcatcgaaataacgactgggccagatttcagcgggttccattcccaaacgggtggcaatgataagttcccccttcggccacgagcgggataaggtattagccagagtggaagaactgagtcccgattcgcgggataaagcggcgagtgtcgtaccacgtttgcgtaatgcacaaataatttcggctgggtgccagtcttgttgagtgtgaatcatcgtcatacctgcttccccttctgtagattattggtggtggttcagacagggtttccaataccggaggtcaatcgatccggcgagacgtgagtctcccctgcctgaaccgccattgaaagggcgaaaacaggcacactggtagaaactacctaccagtggattgacctttcagggttggaaatccctgactatcggattttgccgatagcatttctactttaacgaattacgttatctaattcaataatcgaacgtgtaagtttaacaagtaaataaaatgacagggttataccttctgttcagatttaaagaacaaaaaaacctgcctattgcacattctctaaaataagagactcagcgtgacaggtatacttgaccaaactgatatccatcagacgaccgtcagaaaagtgtataataagacacaattgagtcacatgatgctgaaaaggcaagattatgaaaccaataacgaataataaccacttaagcagaattaagataacaggctacaaatctatcgcagaatgtgatttacaaatggggagcctgaatgtccttattggcgctaatggtgccggaaaatccaatttcatcagtttctttcgcctggtctccgtattactcgatcagcgcttacaatcgcttgttggcagaatggggggacccgatacgttattacattttggtcgtaaaaaaaccgagtgtatgagtgcggcgctttcttttggtcacaatagttatcaatttgagctggaaccgactaatgataaccgcatgatgttccgccatgaatcactctttggcgacagcaagagagagtatgatattggtgccggacatttggaatctcaggttaatcagcatcacgcgaaccctgaaaatgaaaccttgccgaccacacttcgttggcgggtatatcattttcacgacacgagtgacagtgccaaagtcaaacaaacccaccgtattaatgataatgattatctgcgggaagatggggctaatttagccgcgtttttgtatcgcctgcaaaaacatcatcagcagcattacacccgcattatcaaaaccattcagatggttgcccctttttttggtgatttctacttgcggcctacgccggataatgccgactatattcagcttgaatggacagaaaaagagcaggatattccttttaaagccagtgaattatcggatggcacgctgcgctttattttattaacaacagtgctgctacaacctgaagcgtacatgcccgactccattattattgatgaacctgagctcggactccatccttatgcaatcaacgtactggctggtctgattaaaaatgccagtaatcaacaccaactgattatttctactcagtcggttgagctggttaatcagtttgatgctgatgacctgattgtggtcgacaaacaacaaggcgcttccacttttaagcgactggataatgaaaccctgtccgaatggcttgaagactatagcctgggtgaattatggaagaaaaacttactcggcgggagaccacagcgatgatccgtattaatgtttttgtagaaggacagacggaagaaacgttcgtgcgggacgtactggcaccttatttttttgcacaacagatctatctgacccccatattagctcagacaagttcccgccagaaaggcggtatcacgagttatggcaaagtaaaacaccaaattacccgcttatgccgacaagatcccggcgcattcgtcaccacacttatcgactactacggtttgcctaccgatttccctgactatgacatccaacgggataatgcggccaacgaacgggtcgtacagctggagcaggcttttgctaatgatatcgggcagactaattttattcccaatctgttattacatgaatttgaagccttactgttctgccaacccgaaaaatttgctgactggcttgatgacaatgcgccgattgccgcactacaggccatcaaagataaatttgatacgcctgaagatatcaacaacagcccacaaacagcgccatctaaacgcattttggccatcattcccaattatcataaaaccttacatggcccattgattgtcggtgatattggcttagataccattcgttcccaatgcccacacttcagtcagtggctgaataagctgaccacactgatcgctcgtatgtaaataaaccacatagtgttactcaaaaataagaataggccctgtgataacagggcaataggttaaaccactcagaacgggatctcatcccactccacttcttccttgtcttccggcaacgctgagcgctgcgccatctgtgtgggtgcgatttcctttttaacgtcctgagaggattgtgtcttctggacggattttggtgcgctctgctgcttagccactggctttgcatcgccacgattgcccagcatctgcatggtgccattcacattaaccaccacttccgttgaatagcgatcctgcccttgttggtcctgccacttacgtgtttgtaactggccttcaatgtagacctgagcccctttttgcagatactccgccgcaatttcggctaattttccgaagatcactacccggtgccattcggttttttcccgagtctcaccggtttgtttatcccgccaactgtctgaagtcgccagtgacagcgttgtcaccgtgccgcctgttggcaggtaacggatttccggatcttgtcccagataacccactaaaatcactttgttaatgccgcgcgaagacatgctgatttcctccctgttatgctgactggcgttgtgtccagcgcccttgttgcagcgccagttctgcctgctcacggctggcaaaatattcggttgattcacgggagcacggaacgcccgcctccatggtgccgatataaaaccccgcacagctttgtaacacggttaacggtaactgcttatggcaatattgcagtgccagaacaccaatcgaggcaatattcatctctgtttcctgttgtctttaagaataaaaggagtgccctgaaatatcagggcgagtcggtggggtaaaaggaatatcagaatgaattttctgcatattcagtttgcgcaactccgttctggggaggagccgaatcagactgttcagcccgatagactttgtcctgaccgattttgatccagtccactttaatcagacgagctttcaggctgacacgctgttcgccggcatgatcaccgcgtttcagggtgaaaatatcagtggacgggttacttaaggtaaagcccagcaacacttttttatcctcatccaccgatttctggcaacgcccgatcagactggtcgcttccttacccaccacggtgatatcaaaacggacatagaccgggttatcacccgggccatttaatgcattgatcacgcaactcagaaacgtcccgctggccgtgctgacatggcggatattattcagataacccagtcctttaatattcaggttgaaatagtcgtttttggttaaggttgtggtgttctcagacatacaatgttctccatggaagtcaaaatacaatgtgacggagaaaacccgactccctgacgggaatggtttttcccgccgagcgtcaggcagtgacattgctgacgttatgataaagaataatgaaccttcattgccgttgaaccggcaatatctgctttcaaaggggggcagatgtaccgcgttgaggcactccctttcaggctacgggagttttccagccacccaaaggcgatcgttgcaggctcaccgatcatttaagaaacaggctgattcttaaagcatctcatcaacacgtcaatcaacaaccagatcatcagactttttgatttgcccgccgggctttacgcgactgggtaaccgctttgtcattcagcatccccttgcagaccggatagttcacacagccccagaatggggaggttttcccctgccgctgtcgcatccgaccaccacagttcgggcagtccggcgtttttggtaatgtcagatgaaagggctgggctttaccccgttccaccagatgcaacagccactgcgcctgtttctgcataaacaccgccagcgatgttttgccctgcgcaatatcctccagcgactgctcccataacgccgtcatgcccggactggtcagcacctccggcaacccggcaatcagttcccgtgccagtggtgttgactgaatcgctttctttttccgctcaatcagccggcgtttaaacaaggtgtccagaataccggcacgggtcgcttccgtgcccagtccggcattctcacgcaggacctgctttaattgcggatcactgaccagactggcggcatttttcatcgcggcaatcaacgtgccttcggtaaacggggccggcggtttggtgtgcagcggctgaatgcgggctgcaataatccggcagcgctcgccctgatgaaagcgcgggagggatgaatccgcttctgatttttcctgatcttccgcgaagttttccataaacagtgctttccagcccgtggtcacattgacccgccctttcgcccggaagcattgcccgccgatatccagtgtcacttccgtcacatccgtttcctgcgggggcagaaactgcgccagataatgctgacgaataagctgataaacctgtagctcgtcggtcgttaaccgggtgagatcaaaagcgtgacgggtggggataatggcatggtgggccgtgatttttttgtcattccagacccgggaaacctgttgttcgtccagctgactgatagtatcaatcatggccgggtcggttcgcgtcagtgccgttaataccaccggaatatccgcctgcatggacacaggcagatacccgcaatccgtgcgtgggtaggtcgtggctttatgggtttcatacagggactgggcaatcgtcagtacctgactggcgcccatcccccagagacgggatgccgtctgctgcaacgtgcccaaatcaaaacagagcggcggcggggtcttctcccgttttttgctgacggccatcactgtagcctgtgtggcctgctggcaacactgttgcacagcctgtgccacagcctcccgggtacagcggttttcttcatcgccctcctccgtagcgggcagccatttagcctgaaagcggacagtgtctttttccagattagccatcacctgccagtagggtttcggcacaaaattcgcaatgtccttatcccggctcaccaccagtgccagtgtcggggtctgtacccggccaatggataagacctcgccaaaacccagtgcctgcgctttcagggtataaaaacgggtcagattgatacctgtcagccagtcggctctcgcccgccccagcccggcctgatagagtgcttccgtctgttctcccggtaaaatggccgccagagcctgccggatactggtgtcatccagtgccgacaaccacaaccgcctgaccgcaccgctgaaacgacaatattccagcaactcgcgagcaatgacttccccttcacggtcggcatcggtggcaataatgacttcatcaacctgtttcaataactgccggatcacggcaaattggtcagcggcctctttttttaccgtccattgccattgcacgggcagcaccggcagcacctccatccgccacggcggaccgaattgttcaccatactgttcgggtgcagccacctccagcaaatgcccgatggcccaggtgacaatgatacgggtactgaagagaaatccctgtccgcgctgtttcacgcccagaacgttggcaatgtctctggcctgagagggcttttcacataaataaagctgcatcttttcccctctgttaatcgtgttcgatggaacgtaacggggaggcgaacgcggaacgctgcctgcccgacagaatatcgggatgcggttcacccaacagtttaatggcatccagcccggcgggggttttctgggcaatatcctgccgggtgaccgccagtgaacgataagaacgcacaaaaccataaatttggcgaatggcccggctgccgttatgcagaaaagcatcccgctcggcccgtgaaatcagtccgtaatgaaaagcctgaaatgttttcatcgccagctggtcataaccaaccagcagccagacacagcggtaacctaacggggaatgactgtagacgccgatattcagcggttcgacagaggaaacggcggatagggtaatctgctttggcaccgcattcagggtatcctgcaaaatagccagattctgcctgagattggccgatgcggcttccaacgcctgttccagcttcaccagccagacatcggcatacggattatcggcagcggcatccacactgatatgaccggcccgtttgatcacctgcggcattccgaggatcgccgtcacctgatgtgttttgctgatatcttcccgccggcgccctgcccagagccggatggcatagtgggtatgtaattcaatcgttaatgacgaggttaagacaccggcgcgtaaacgcggctgagatgcgggtttttcttcccaatctgacatgcacaaaaactcctgttttgccttgataagtcagtcaaactatcaaggcaaaggaggcggtgattcaatggataaccagttatggaaaaagagaaaatgatgagttttattcactgtcagaaaagatgtttttttaactactgttggtactgccaacagtgactgttttttgaactttgttggctctgccaacaaagattaattttcattcaatttatgtcatcatagggtacggatatctaacgtcataagagagttaatgcaaaatatgtgggacaatatgctcttgctcttcatccgcgacttcgtcgttgatcgaattttccatttgtgcctgcagcactgaattaacccagtcagcgaaaccattgctcatatattcctccataaatatgtccttcctttttggccaaggcaactgagcaataggccaatcacaatgtgatttataaaaacggaaattttccagacgtttttttgccctatcaaaatcccggctccaataagcattacctaatcgatagttagtgtaaaattcatcaaagctatcaaaaagttgatacacataatctgcagttttcaatatattatcccaggccatttcctcactaatataacccgcagcaaaactgttccggcttaagacaatcgctcgccagaggtcaaatccccaaagtaaggctggaggtcttccattaatagaccgtgaacactgttgtacgtattcagttgattcttctatgagaacgctaagctccttaaacatcttcccatctgccaaaacagagtcaaccgcaaaatgtttagagtgcattccggcccataattcatacaacatttttaaatatccttctttatctactattccccaatcggtatatagttgcgattgatgtggtttagattctgataaggggaaaaaacgatatttgtcattatgttgtaaaattcggcttttaagcgggtaatgctccagtgtctcaacccagaacccactgttataacttcccacaatatccagacgtagcgcttgacgcttttcttccggtaatattgataatcccgcctgctgataataatccttttgttcagcaatcggcagatttttcacatgaaaaaaagtataaatagagagaaatataccaaataaggtaaaacagactaacaacactgacaatataaaacctgctgacggtatattatcaacatcaatgcttatatcagttataccagtagataatgcaattactaaaatcgttgtaatccaaagtattcttaaaccgacagttttgagcgggttaagaaaatccatgtttttatttctttctatcgacgctttgactatccgaaaactattgacgggaaattctctattattagggtgattttgtagcaactctttcatttttaatccattaatttgtttttgatatatttcatatcacatttgaatcacaataggaataaccgtgatggtctactccagcattgaatcagacgtacatcactaatacatccagttttgtgaaacaaaagtaaaaggatgttataaccgaatattatgctggacaatccattaaaatatgcttgctggggtacgttgaattaccgattgctattccaatacatcagataacttcctgactttttatttccatctcaataagtatatttttcaaaccctgttggcaatgtcaatggtgactaattatcagtcacaccggattaggtattaaacgttattgataaataattatctcatttcatcaaaaatgcttcgcagttcatccgcaactaatctgctcgctgtcatgtgcattgtctgtttggatgtcaacatccaaatggggcgtattacaggctcatccaattctatagacactaacgggctattcttaatgatcagtgaaggtagcagagctacaccatatccattttcagctgcaatgcgctgagtcgtaacagaatttgactggaagcgaatagatttgtttccaaaccgctttatcagatactgagattcaggcaactcactaaaatcactgttgaatgtaataatgttgacgttttctttatcgtttatcttttttataacttcaggaatagcacagagtttataattaagttccccgactttttgacttaaatattctcccttttccggtaaatctaggcggaatgcgatatccgcctctttacttggaatgctgacattgcgatttgaggcatcaatctccagtctgatttccggatatttttttacaaaatgactgagttttggaatgagtaaatattccgccattaaagataccattgagataacaacactttttttaaatttaccctcctgagtaaaatagtcttctaagctttcgatattctctctcacctgaacagtcttcttatataagagcaagccttcaatcgttggaatatacccatcctgagtgcgatcaaaaaggcgctgtcttaatgtgtgttccagacgctctgttcgtctggatactgttgcataattcacatttaatctttttgacgcagcagagacagtacgacattctacaagtgcagtaaaaaacctcagatcatcccagtttacactatccatatatgtatcctgttaacaaccaaaacagaaatcctaacacttacaaactgaatttaataactttgtatttaacggatgacgcgttgaatacacacttttttgcacatgccatatgcaatatttctcaattacttttgatatggcatcccgtaatcttgaataagtttaatttccctataaaggctaagataatgaattcgacaaaaacgttactggaactcgttggcgcaccagaaaagactcttgactggaataaagctgctcttgtattgattgatcttcaaaaagaatattctgatggagcactaccattagggaaagcagggaaaaatgcgattgttaatgcagctaagctattagatcatgccagaaaaaaacatattccagtattccatgtcgtacatcacgctaaaacggggtctgccctatttgatcctgcgacagataatgtacattttattcagggtgttgaggctagtagtgaggaatatattatcaccaaatcattacctgattcattttacaatacaccattgaatgaattgttatcattgactcaccgtaaccagttaatactggcgggttttatgagtcatatgtgtgtcactgcaacaaccattaaagcattagagttaggctatgaaaattttgtctgcactgatgcctgcgccagtcgagatctgaaatatattgatggttcaataattgatgcagattcagtacatagaacggcgatggcggctttgaatgatcgatacacgacgctgatcgattgcgccaatgtgataagataattacctcatgtttaccccaaaaaagattattttttacgcagtgttggcactgccaacactgtctgttttttgttctctgttggcactgccaacaaagttcgttttttaatcacgtctgattttattgatacttcgccagcgtcagtcgctgacggatatctttcaccatactgcgaacatgggcttgtgaggagggtgaaacaggccgttcaatacgttgagtggatgcaacagaagccttagccggagcaggcggggtaaccaccgtttcagcctgcccgtataattgtccgtcccgtgcccgtttcatcatcgtcagcagccagccgaccgggttgccgatttttcctgcccgtagtgctttgtccagacaactcagcacggtctgcgcctgttcagtgggcagcgcctgcaactggctggtcagcatcgtcacatcttccggttccagttgtcggcacaacccttccggcagaaaaactgcagattgaggttctacgtatgtttttttattcacactctgtgtgaaagaacgtacataacagttcggtttagctgaaccactataagaccttgatttcaggctgagttcggtatccgaattcagttcagcctgcgcctctttctgactcagtccggtttccgaacccggcctgatttccctgagttcggtttgctgtttgccttgttgaagagactggcgcatcaccctttgctgcggtgtttgcaccgcattcagtctttcttccagcaagcgaatatgactgtggcgatggcgcatcaacgggtcttctttgatgtcagtcagcacgtccagagccgtctggctgatagtgcggtttttgctgcgacaggcttccgccaccgtatccagccagtgaggatcgagcatttcagcatcacggcaggtcagcggctcatcgtgttgcgcatagatattgccccgtacccgcccatgatcatcgcggatacgcttgcataaactcagccagccggttattcgcagcatcagtaacacccgactgacggtttcacgtgaggccttgcctttatagggggacgccaacaggacctgcaattcgtcatagctgggaaatacggcaccttcattattcaacgcatacaatcggatcatcatccagcccgttttatccagcggcgacaggcgatcatccagcaacagacggcggggataggcatcctgaatattgcccataaacaacagaccactgcgaagttgtgaaacgtcatcgtctgcgcggtgttccagacgtattttcattttggcaaccgtgtgtgcaattatgctgtctgctgacaggtttatcatgatccttgatctccggccttggcttttaaattgagtcggtaaaaataatgtcaggactgcaccctgttacgttgaacaggatgcagaatgacacgacttcaatacggactatttacgaatttcattgttgtaacgttcatggagcatcagctcccacgattgtccgtcatcgcgacttaacagacgccagaacaaccctacgttgattttcagatacccggtgcctttttctttcaaccggacgtaattgcgctcgccccgctggtaactgctcacctgatgttgcgccttacggcgcagtgacaagggtgtcgtcgagggcacatgcagaccgggcatcatttctgttaattttgctgacatcgtttcctgttctgttgaaggttaattaatggctttcaggcttgtttttttgaccggttccggtgcctcgccgtgctgccagcccttcaccgcatgccagacggccgtcagcgaaatctggtggtgcgcggccatctccagcatcatatccagcccttcggcgctgtccgtatcggcaatctttgccgcctgccagcgttgccataacgcctgattttcttcttccgtcaggggtgagttgcgtcccggttttacagtcatccccgcaatacgtcggcgggcggcgatttccagactggacaagccaaaaaaataccgcatcagttcaatggagccgcctaactccagtgcccggtcaatgcgctgtaaccgctgctgctcaatccgtgcctgatgtaaaatgcgcgccagattactgtgatggatctggatggtcagcaccgacaccggactgttgcccagataatgcagatcttcaatcgtcagattctgcaatatcagcatttcatcgggtgccagccccagtgcctcacaacggcggatatagccgttcttcaaatccatcaccagctgcaacagcaggttgttggttgcttgagataaatgatgcatacacttcctccaatatcaggccagtcaaaacaaattgaacaacacattggaaacaggcgcaccgtaccggtatagctacactgctatcgtctccggcgctattgcgcgctgaagttcacgcaaacggcgaataacccggagcaaacgcaggaatttcaccgtctgggtatcatccaataaaggcatctcctcacgatggggtgtgccaaacagaacggcagtcagcgtcaataccggggcgtcaactgtgttttctccggtcagcgacagcaataaacgcgaaaaggcatgagcttccggcgcattgaccagacaaaagccggctgaaccttcatccgacacgggaagcaaatcgcgatcacagcccatcatttcggccagttcaaatgccaaccggaacaccatactttgcagatgctcgatatcgtcctgcatcggggaaatgtcccagaccgaactcaccggctccagaccggtttgggcaaagtgcaggcattcggcctcaggagcattctggggagattcaggtgagttatccccgttctccggatgataaggcgggatcaccggatttttgctggaaaacgcaacggatgagcccgtttcttccaccggggaatattccatctccgggttttgtgccgtctcgctgacgctgacgggttgggaaacgcgccgtgggttcgattcctgtttaggcacccgaatcggcgccacattattggctgcagcagaaaccgccggcacatattcaaacgcggaggcctgttcgccaaagagttgtctgcgattactttctttcggatctaattccaatatccaacggtcataattcaaaaacggatgtggcagtgcctgcaataaatcgccgatcagctcatcccggaacatctccggcgaccagtcttccaatgcatcaaacttgcgacaacagctcccaaaaacctcatcaaaggtccatgtgggttccgggtttatactgaaaacatgctgttgccagaccgtctccgcattctggcgtaataccagtaaaagacgtatctgcggtgttcccagcccggatgccagcagattaggcatccacgggtacaggtactggacggtatcttccatccggctgatatggctggcactgacaggaaaaccggtttcactgagcagtccggacaactcacgcaggctgatttttttctgtttctgcgtttcataaatcgttctagctttgcagatacccagcgctttttcaataaagctgaggtcaccccgcagttcattttccgccagatgtccgatcacacactgcaaccgtcccggccacggtttaaacaggcaatgcacccggtaaaatcgctcatcaccggtttcctgccacaactcggacaaaatttgatagcgcgtattaccgccatcactgaagatataaacctcgtcaccgtcaggatcacgggtaactttcggcaccgtatccagcccacgggctttgattgacgctttgatatcgtcataacgcggattgcggctggtccgggggttatccggattggggcgtagctgatccagtgtcaggaccatcggcatttctgccattggcgggctgtcattgagcgtggccacggcctgccgcccctgctgtaacaaggcatgacctaaattctgcgtattacgtcccatccgttacctcccgctgtcatcgaaatctgaaaaacgggtatattgcgcctcaaaccgcacacgcaccgtgcctgtcggtccctgtcgctgcttgccaataatgatttcggcaatacccgcatccggtgtgttctcgtgatagacctcgtcgcggtaaaggtgcaatatcaaatcggcatcctgctccagtgagccggaatcacgcagatccccattattgggacgtttctcggggcgggcttcgacttgtcggttaagctgagacagtgccagcaccgggcaatccagctctttgcctaacgctttcaggctgcgggagatatcggcaatttcctgtgtgcggttttcctgtccgggcgcacacatcagctggaggtaatccaccataatcagggcaggtttaccgtatttacgggtataacggcgggcgcgggcacgcagtaatgcaggcgtctggtggctgcaatcatcgataatcaggcgctgatcccactggctgaactgttccagactctggctgatacgtccccactgctcgtcatccagtatcccgttgcgcagggcacttaaagccacgccgccttccattgaagagaggcgcagcatcagttgggccgtcggcatttccagactgaaaatctgcaccaccgcctcgtcccgctgtcgcagggcaccaaggcaccagcccagccccagtgcggttttgcccaccgaaaaaagcgcggccagcaggatcaggtcaccagcctgtaagccacaggtcatttcatccagcacctgaaacccggtcggggtgccggtgatcccgttactgccctgaatgcgctccagatgagaaatcagtgcctcggcgccctgcaacagggtgacctcctgctgttgtcgggtcgcccctttttcagccagacggaacaactgactttcggcctgttcggccagcgcagcggcctgaacatggggctgaaaaacctccgtgctgagggcgttgcccagtgccagtaactgacgcaactggcttttttcggccaccatgcgggcgtattccacaatattggcggcactgggtgtgttttgacacacttcggccacataggcaaagccccccacgttgtccagacgcccctgatgggtcagtaaatccgtcagggtgagcaaatcatacggggtatttttttctgtcagttcaactatagcctgaaacagtatccggtgtgccggaaagaaaaaatcgtccggggtgagtagctggacaaggtcatcccagcggtcattgtccagtatcaacccgccaatcacggccatttcagcgtaaccattgctgggttgtacttcattcgcggcttgtaaaaaatcatgcctgtgcatcaccagcctccctgctgacagtattcagcgccgcgattaaccgctgttgcagttgaggggaagccacccagaacagcacttcgctggcggttaaatactgcggtttatcctgtgcccaaccgcattccagcaaagccacatcatccggtgtccccggcatcagtgactgcgcacataattcttcttcactacggggactgaaatgctcaacgaggtcagatgaaacaccccagacagccggtaataatgcctgaaactttgcctgcgccgcttgacgatccggtgcatcgataaacacaaaccactcatcctgcgtatctgtgaacggcagttcggcattgtcataacaaaagcagacagctcgccagataacattcatttcgtgtctcccgccggttgttcaatcagtaccgcatcgaatttctccgcccataggggcactaactcacaggcgagactgtgtatggtgtgtgcggccgccggacttttccgggtggttttatattcaaggcgatgcacgggctgggcacggacatgtcccagtttgtagatatccagcagatctatccgggttttcagcagctgataaatctgcctaccacccagtgccgaggcgtcataccgtctgttattgataatgtcagtcagttcactcagtgtgtcccggtcaagattcgtcccttcaatcccattgaccagtatctggatagcaggcaaccggataccgtagttttcaaagagccggagccgggtcagcattcgcagggtaccacgcaggaactcgcggacatcgggcagaatcggtttgattatccccagaacgtcctgtgtggccgccagtacaaccagctcgctcatcacacctgtcgcacctttggaatcaatgaaaatgatatcgtactgactgaagagaggatgttgcagaatgttgcgcaagcgtaaacgcccgtcgggagcatgcagcatcgccgttggcaggagttcatcgggatcgttggaaatcagaatatccagatttttgattatcgaacgggaaatgatcttctcaggctggttcagatccaccgtctgcatcagtaattcatacagcccggcgggcgcttcatagtacaaaggaaaaatactgctggcagtgggttgcgaataatccgcatcaatcaggagaacacgaaaaccggcatcggcaaaaaatcctgccagattggcggcatgggtggatttaccttcaccacctttgggggaaattatcggaagaattatcattttgtacactcattaaaattaagcgtacaaatcggatttgttaggaaattttacattgaattaacttacgatgggattgaaaatccccgtgtcggtggttcgattccgcctccgggcaccacttcaacttccagtgaagtccagcccagtaaaaaaattcctgctaaatccagcaaaatcaacatccattcttatttctaggtctagtttcgtctgttgcaatcaagatgcagcgaagggcataattcggggcacttaccgttcgattacaaggatgcccttaataatgaaactaaacgcccggcaaatcgaaactgcaaagcccaaagaaaaaacctacaaactcgccgatggcgggggcctttatttagaagtttcgccacgcggttcaaaatactggcgcatgaagtattaccgtccgaccgataagaaagaagaccgtctggcgttcggtgtttatccgacggtatcattagccgatgcccgcactaaacgcgatgaagccaaaaagctgatggcacagggcatcgatcccaaagctgagaagaaaggcactgcctcgcccgccaaagtgagctcgtttgaagaaatcgcctgtgcatggcacgccagtaacaaacgctggagcgacagccaccgtcaaactgtgctgcgcagccttgagcagtacattttcccgcatatcggtgcccgcgatattaccacattacgcaccagccagcttttagcccccgtcaagaccattgatgagcaaggcaaacacgatatcgcccagcggctgcgtcagcgtgttaccgccatcatgcgctacgccgtccagaatgatattttggaaactaatccagccaatgatatgaccggcgcactcaccaccaccaaatcccgtcaccatcccgccctgcctcatgaagatttacctgatttcctgaaccgattgtctgtttatcgcgggcgtctactgaccaaaatagcggtagaactggcactgctgacgtttgtccgttccagtgaactgagatttgcccgctggcaggaaatcgaccttgaaaatgcggtgtggaaaattcccgccacaaggcaaccgattaaaggcgttcgcttttctgagcgcggcatgaaaatgaaaacggatcaccttgtcccgttgagccgtcaggctgtccggcttatcaacgcattgcacgaactgagcggcaattgtgaagtgatgttccccagcgatcataattccgcgaaagtcatgagcgaaaacacggttaacaaggcgttacgggcaatgggctacgacacccagaccgaagtctgtgggcatggattccgcacaatggcacgcggtgcaatgggcgaatccggcctgtggagcgatgacgccattgagcgccagctcagccatattgaacgcaacaacgttagagcagcctatattcacacctccaaacatctggacgaacggcggctgatggtgcagtggtgggcggactatctggatgcgaaccgggaaaaatccattacaccgtatgacttcgccaagccgctgcgcgacagaaagaaccgttagtacaatttgcaacccgttaattttcatcgggagaaaaacaattaacgctgttcattaagtccagctttttaaataatccgcctgtcatcagataacgtccacggtgagcgctcagggactcggtaacaggagaatgaatatgacaatgacagcaaagacaaactttattcgtttgccggaagtgcagcgcagaacgggttatagcaaagcgtggatctacaaactgattagcgatggagaattcccgaaacaggtcaaaattggtccgcgttccgtggcttttattgaagcagagattgataactggattgcgcagcgcattgcagagtcgcgggcggcataacacagaagagaacatgacataagacacgtaacataaaatacaacgccccgaagtgcggcacacactgacagggcgtttcatcaacaaccgttaattgaggtaaaaacgatggctgatatacagcatacccaaactcgccctgaatttacagttcaaaaaacagtgggcaatccaaaaccgcttgatcttatccagaccgtcaaaacatccgcgatgtattcgtggcaaaacctgctgcctgcttgtggcatcgatatcccggcaaaaggtaaacatggtgcctgccctgtctgcggtggcactgaccgttttcactttattgatgatcaccatcatggcaactggcactgccgccagtgtgatgccccgaactacggtgacgggctggatttggtggcaaaaaccaaccggatcacaattacggaagcagccaaagttgtcgcggatgcactggcattgcctttgctcgaatccaagcccgccagggaaatcactgatccgacaccatccattgccgaaagagtggcaactctgatgaagcaaactgtcgccggacagtcgccttatctgactgcaaaagggctgcattgtcctaatcagcggttactgtctgataatttggttttattgcctctgacaacactgaataaaaaaatcaccggtgcgcagatcatcaaacccaatgacgagaaaaaattattgtccggcagccagaaaaaaggcgcgtttattgctctgtcagaaatggaagagtttcccgacacagtgattattgccgaaggttacgccacggcactgacggttaaccagctctataaaggcaacgttctggcggcactggatgcaggcaatttattttctgtcgccaaagccgttcgggaacgctggccggacgtaaaaatcattattgccgcagacaatgactggcatcatcctgatgaactggatacacacggcaaacccaaagtaaatatcggcaagctctcggcagagaaagcagcgctggcggtgaatggctggatctcgttaccaccgacaacgcataaagccgactgggatgattatcgccaacagcatggcattgaggcagtacagcaggcattcagtcgggcgttatatcaggtgagggaaccgataagcagcgatgcaatagaaacccgtcgttatgacaacgtcgggagcatttatccaaatcgcaaaacaaaattacctctgtcagtcggctctgagggctttgatgcgcagttagactacgtggttaaggggattattccggcgcattccctgtgcagcatttacggggcgagcggttcatataaaagttttctggcaggggcgtggggctgtcatattgctacaggtcaggcatgggctggaaaatcggttgctcagggtgctgtactgtatgtggttggtgaaggtgggatcggcgtgccacggcgcatcaaagcatgggaaatcgtcaacaaccagacggttgaaaatatgtatctgatcaatacgcccgtttttccggcctcgcctgccgaagtgcacgagctggtgattgccgcccaacaggttgaagccgaaacaggccagcctgtccgcttgattattctggatacgttagcccgctgctttggcggtgcggatgaaaatgattcaaaagatatgggtgcgtttgtccggggttgtgacgaactgaaagccaaaacgggggcaagtattcttgttgttcaccactccggcaaagacgaaagtaaaggcgcgagaggttccagcgcccttcgtgccgcgttggatgttgaatacaagatcagcagggaagggaaaaaaggcggatcgctggttatcacctgcaccaaaatgaaagatgccgaagaaccggacaccaaagcctatgatatgcgtgtggtggaactttttaccgacaaggacggtgaagagattacgtcactgacgctgattgacaggccacgcgatcctgttgaagaggaagaaatcagccatgtttccaataaaaccgataaccatacggcactgtggcagtgtatccgctcacgcactgccctgaaagaaccttgcagcattgcccttgtgcgtgatgatttaaaatcgatgggcgtgaatgtgaagaatttcagtcgttggttaaccaagttagagcaggacgggctgattacccgacacgggcaggaactcagcattgttaaccagaataatgaagattaaaaagtgagtcaaaaagtgaggagcggtgaggagagggattttactgctcaccgttttcctcacttttttctcatatatacaagaaaagtgaggagcacaaaaacaattgatttttaaggataaaaaattatcaattcctcacctatttttgctgtgaggaaaataaaaagtgaggagaaaagtgaggcgcaggtgaggaaatatttttctggcaggcgtttttcagctctccgtgctaccgggttaatgtattagcccggtagcacggagatgacaagcgcagcgcgtcagtgtggatttaattcgttgtattacgtgaaattgagatgacgtaataagctgatttcatttaagaagagacgttagtcacaatttttctgatgttcttttattcgtgattgtatgtataaataattctattatatcctgctcctcattgtaccaaaaacgtgcaatgataactttattattaaattatttttactatttaggtagtaattaaggattgatacaccaaaagattatggagaatacaaatgagcagggtaatggataaaatcagccaactacttgatcgctcaggtttggtatttacactgattacggaaaatttacctgaacaaacttttgctgttgtcgatttttctctgaatgaagcgctatcaaccccttttcggctggaagcgacactgacttgtcagactgctgacattaactttgccgatgttttggacagcagcgccgcttttgctgtacatcgtaacgggcgaattgaacggcaagtcacgggcatggtgacacatttttcactgcaatcaaccgggcgccatcaaagccactaccatatcacccttcagcctcctttatggcgcgcatccttacgggttaatagccggattttccaaaatcagtctgttgtggatattgtggaaagcctgctcagagaaaatggggtacgaaactttttctttgcgcttggttacaaacacccaccacgggaattctgtgttcagtacgatgaaagcgatctggcctttatccagcgcttaatggctgatgaaggcattttttactatttcactttcgatcaggaacagcacgagcaacgcattgtgtttcacgactcctgtctgtctcttaatcaggtgattaccgtcccctatcgcccagaaaccgatgtgacgggagaaaccacctgtatccgccagtttagctggtcagaacgtgtgggcgtggccaatatcacgaccaaagacagaacgtttaagaatccacgctggaaccgggaattctggtatgaagggcgcaatcttgataatcagcgaatactgaacagctatcattattatgattttcccagccgctataaagatgacgaactggggcaacgggcaagtcagtatcgtttggagtacctacgccgggacactcagttgggtaacggtcagggggactgttttgccatgtggccggggcagttatttaacctgatggatcaccccagagaggtttttaacgaccaatggcagttaattcagataacccattcaggtcaacagccacaagccgatgaaacccagtcaggcggtagcggtacgtggctgtctaatcactttaccttcaccacacgaaaaaactcttatcgaccttccccctacccgaaaccccaaatggaagggccacatattgccacggttgtggggccggaaggcgaagaaattttctgtgatgaacacgggcgcgttcgtattcagtttgactgggacagatacggtgaatttaatgaccgcagttcttgctgggtacgggtcagtcaggcgtgggcagggcaattaatgggtatgattgccattccccgtattgggcacgaagttttggtggattttgtccacggcgaccccgatcaaccgattattgtcggacgagcctaccatgccaacaacatcccgccaaatcgcctgccaatggcaaaaacccagatgtcgatccgctctaaaacccataaaggtgaaggatttaacgaattacgctttgaagatgaaaaagatcgcgaagaagtctttattcatgctcagaaaaacctcgccattcaggtacgtaattcacgcggggaacgcattaactatgaccgtacaaccagcattggtcatgacgatgaactggtaatagccaataaccgcaaggtgaccgtagaaggtcaacaggatcataaaactacgggaaattatattgagcagattgacggcgaccgttcgttacagctcaaaggcgatctggctgaaaaaattcagggggtagtcagtgtggatgcgcagggcgatcttaccctgcaaagtggtagcaaaatcacattaaatgtcggtggaaattttgttgtgcttcacgcgggcgggattgatattaaaggcacggcgattaacctgaactccggtgccagccccggcgatttactggcaccggctaatcccgccatcctgctggccgcagcaagcgaaggctccatgtttgtcgcccactgccccatgaaagagaaggagaagcccgaatgagtcaggaaaaactctacgcccttattgatggtgcggcggaatccgacctgtttttgatgctggaacgttatgacccgccttccgcctgtctttatggtgagcctcttcagccagaattggtggaaatcgccccttatctggtacaggtcacggaagaggttaaaatctggctggaatgccgcaaaaccccgtggggaattttcgtccacagtgcagcagacatgaagaccgtgcgccagcatttacgaaaatacctgcaagttctgcttccccaacaggaaaagccggtctttttccgtttttatgatccccgcaatatctgggattttctgggggtattgagtgattgggaagtacattgttttttggggccaatcacgcgtatcacaacacgttatcttgaagaagaacacacggataactttgtaaaagtcagagaaccttttcctgctaacgccaaagggaaatataaaattttcaaaatcaatgaagagcaatacacattaattgaaatgaagcaaaaagaaaaatatttacaaaaacttgactccattttgctatctgaattagcaaatctaagaaaaagtatcagtatcaataattcattaccatttttagcttttttctatgattatcttatttctgagaaaataacagacatgcgttctatagaggaaattcttaagaaggtggtcagagaagataatttcgatattgatgagtttgataaatccattttaaccagactttctgatgatgagactcccggctggtatagagctaagaaatttattcttaatatttaataaatctatctgtatattgaaattaatttcgggagagaaacagtatgggaaatgccgtcagaatcggagatataggcacaaagcatggtgattgcccagcaacacctgttattactggtgccagcagtgtgaaagtagatggtttatatttagccagacagggagatactttagaatcacactcatcacattcacgggcaatagcggggggttctggctctgtatttattgaaggaaaacctgccgctagaacaggagatgctattgattgtggcggtgttgttattggtggaggcagtgtaaatattgactgaaagcacatataaatacactttttggttcatacaagaaaagaacatagtttatgaactatatttaaccagcatttattgcttaaattctgttaatttatagtcaaaaggaagactaaatggaacctatcaacgaaaaggaaaaaacgctgttattagcacttaatgacaatatctgctttaacaaaaaagaggagttaataaaagaattatctaagcatgatgaaaataacacatggagtgctggtaaagcctgtgcgacatgcccacctccagaagcgagagatgattttattaagcatgtattaaatcagatcccatatgttaatgatgatggtttttttaaaaacactgatataattcaagatcatgttagcgctttagagcatggtgaaatgagtacagtgcatgctatagtattacataggactggaggatcaaaaatgtcaccagctatatcatcattcaaatcaactggtattggaacacattttattatagataaggatggtacaataaaacaaacagccagcttaaaacaacatacatatcacataggaagaataaaatctaagtgtatggcagaaaataattgtaatactaatgaagcaaaaaaaataagtggttggggatggaatacaaaaaaaattcatgatcatgaaaaattaaaagaatatcctgatagatatcctatgaatactgatagtgtaggaattgaagttgttgcagcttataacaagacatctaagtcctgggatcaagctactacacaacaaaatgagtcaattaagaaattgatcaatttactaaaatgtaattatagtttaggtaatagtgatatatatgaacatgataaaatatcttataaaacagaaggtgaaggtgctgatctttactctaatagtatttagcccttatacttactcaaaaaacaaagtagaaataattaatgtaacaggattagagataacaaatagcaatgataaagatattattaatgtatgcaaaaaatggaaattaagtaaaaatgatgtaaataatattttaaatattagcaaggaatatgattcttctccatatattttattctatcaaactccatgtgacatagttggaaaagcaaaaataggtaatgaaatatgggaatatcatataaatggtggaggaatgattactctcgtaaaggataataaggaaattttcttcggttgtgaagcaaaacaatgtgctcctttctttattttgccttttgatggtatgaatccataacaacaacagatggtcaaaattgaatcaaaggttcaattttgaccatctgtaattaaaataacaaccttcattgccgtaactaaaaaaatcagctaatctaaactggtttaaatcgctttttagcgacaataaaaaactcccgtagcctgaaagagagagcaagcattgcggtacatctgcgcacttttggaagcagatattgtcaaacataaaccccttgtttgacgatgaaagtctcccggtcttgttatgcaccggcttatcattcatgcagagcaatagcccctgccacaatcacaatgttttacctatgctttgattaacgcacggtaaacgccctgaaagcttggcggcgtcacttgcgttaaagcgcagcgattaccaagtgacgccgccgagcggccaacgtccagagcatgtccggtctggctttacgaccgatttgaaccccgtattactcagtgtcaccacttttcattggcatttttctgccttaattcacttatttcgtttgtttttcactcaccgccttgtaataggccgatgcagtaaagaaaggagatatcacacgtcacgaataatgaggcgttcatcctgattgaatcaggcactgaacggggagtaaaccatcgccgtgcttggcatgcacgtagcgaactcctgcaaaaactcaacacaatgcctctctgctacacattatctgacgcaccacggaacggtgaacctaaccgacacgcagggaaaatgtttctaactgcataaaagtagtctaaaaatcacaggggaaatacggacagcgaaacaatcacgaacgagaataaacaataaagattgatttagccgcccgtattcccctctgagtttatgcactcttgagaggagttatagtcattaaacttagtgattcagttattgtgtcaggtaaaacaatcagttaaattattcccgccattagcacaatctaatggtcagggtttcgcagccttgaattaacgtccacactggtaggaaatttctaccagtgtgcttgctatcaccctttcaatggtgattcaggcaggggaggcttcggtctcgccggttggacgttaccggtactgcgaaccctgtctgaatcgccaccatcaatattaattaatggaaggggtagcaggaatgaataacaacgttaggaatgactggcatcaggccgatatcatcgccgcattgcgcaaacgcgggacaaccttagcagcagtttctcgtgaggcaggactcagttcatcgacactggcaaatgcattcagcagaccgtggccgaaaggtgaatggatcattgcagattatcttggcatccatccctcagagatttggtccagccgttatttcgattctcataccggagaattattagaaaggaaagcccgcgctaagccacaggaataacctgctataatttgtgatcgacttcgtaaaaatgaacattttttatcttaagccctgagcgtaaaatggcagcccaatttgaccatttttaaccctcacggcttttttgctttaagatgatttaaaagtacacaattagtaatataaataataaaaatcagtcagatatagaataaaaagcaagcaaaaaaacttaggggcattaaaaggggcataaaaggaaggcaaggttatagactttgattattcaacaagttataatgattttcgattccgcctccggcaccacgattttaaagctaatttgttgaatactatcaggtaattaacaaataagttaaaatttagggctgttaagaagatgttaaacaattgatcgcttagtttgtacgttcaatgtttaaaaaagccgtaaattaaagaatacagagtgcctgcatttgcaagcactcttttttcgtgcaaggtaatgatttcagtaattgattctgatgtcaagtaagggaaagactttacgggacaggggatcgcaaatagcccttttttcatatcatccctattgatgcagggcagtgactcacacctccacctcctcaatcctgtctgagacctgccctgtcttttttactgccggttatccttacaccgcaatatccagatagattgccagttcattctccagcgttttccctgcgatctccatatcgatatcaatatattccagtgtggttgccagactgcggtgccccagcaaacacctgaccagctgcaaattacgatccggtgctttcatcagctcagtggccagtgtatgacgaaaacggtgaggggaaacggcaaaaccacactctttcgacaaccggttgaagaacgaacggatatgctgcctttctttatcgtgatcataccggtaacggctcatccgtccatgagcgtgcaaatccagaccgggttccgccgaagaacccccaaaagtgacgattctgagtaccgttacaccgtagcgaggattttatagactgtagcacgcgctatttttaattgtctcgatatgtttgttgctccgataccttgttcatgaagatggcgaacttgagctttgtctattgtgggtttacggccaaatttaacccctttagctttagcctccagacggccttcgtttgttcgctccagtattcgttggcgttctgcctgagcaaccgcagataaaatggtgaccaccatcttgcccattgtcccttctgtgctgatcccatcatccagaaaacgtatggcgactcccctctcatcaaattctttgatcagctgaatcatatcggcagtatcacgac

SEQ ID NO: 276 - DNA, 30934 bp, Xenorhabdus sp.; identical to SEQ ID NO: 275
  CDS (21189)..(23240)

SEQ ID NO: 277 - DNA, 30934 bp, Xenorhabdus sp.; identical to SEQ ID NO: 274
  CDS (19217)..(20062)

SEQ ID NO: 278 - DNA, 20653 bp, Xenorhabdus sp.
  CDS (2)..(715)
tgccaatgatatggctggcactctcaccatagtaaaacccaaacatcaccctgcattgcctcatgaacgcctacctgaatttttaactcgtctttcctgttatcgcgggcgcttactgaccaaaattgcagtagaactgactttattaacatttgttcgttccagtgaaataagattcgcccgttgggaagaaatcgatcttgaaagggctgtctggcatataccagcgacacgaaaacccattgatggtgttaagcattctcaacgtggtatgaaaatgaaaacagaacacattgtaccgttgagccatcaggctatttcgcttatcgaaactttgcacaacctgagcggagaaagtggggtaatgtttcccggcgatcatgatccaaagaaagtaatgagtgaaaacaccgtcaataatgcgttacgtacaatgggttatgacaccaaaacagaagtttgcggacacggattccgcacaatggcacgtggtgcaatgggagagtctggcctgtggagtgatgacgcaatcgagcgccagctaagccatatagaaagaaataatgtccgggcggcgtatattcacacatccaaacatttggatgaacggcggctgatggtgcaatggtgggcggattatctggatgctaacaaggagaaatttgtaactccttatgattttgccaaaccgcttcgtgatagaaaaaaccagtagcttgaccaacgaaaaattttacttatgggataaccaattacatattgcataaaagaatgacataaaaaaacaacgccccagtgtgctgatacacatctgaggcgtctaaccaatgaccgttattaggagtaacgatgatggctgatatacagcatacccaaactcaccctaaatttacacattcagataaaacaggcggacaaaaaccgctcgacctaatccaatccgtgaaaaaatctgctatgtatcattgggaaaatcttctacctgcctgtggtgttgatattcccgcaaaaggcaaacatggcacctgtcctatttgcggcggaactgaccgttttcactttattgatgatcaccataacggcaactggcattgccgccagtgtgacgctccaaactatggcgatggactggatttagtggcaaaaaccaacaggatctcgattacggaagctgctaaagttgtggctaatgtgctggcgctgcctttgccagaatccaaaccagccaaagaaaccattcaaacaacacagccaattgccgaaaaagtagcggcactaatgacgctaactgtcgccggagaatcgccctatttgactgcaaaaggattgcattgttctaaccagcgattactgaaagatggttcgttattattgccattggtaacactggataaaaaagttacaggtgcgcagatcatcaaactggatggaacaaagaaattactgtctggtagccaaaagaaaagtgcttttattgcattatcaaagttgggagaacatccaggcacagtgatcattaccgaaggttacgccacggcattgaccgttagccaattacatcaaggcaccgttctggctgcaatagatgcaggtaatttgctctctgtcgctcaatcagtccgggaacactggcctgatacgaaaatcattattgccgcagataatgattggtatcttcccgatgagttagataagaacggtaagccgaaaaagaatattggaaaaattgcggcagaaaaaaccgccaaaacgatcaatggatgggtcacattaccaccaactgagtacaaagccgattgggacgattaccgccagcaacacggagtgggaatagcacggcaagcctttactcaggagctttatcaaccaacactaatcaagaaaaaagcagccgttcaacttaataatgataccgaaccttcaaagttgacattatgtcagatgggagccagccaacgcggagaagtattactgacgcgctatgatggagatttggcactggatggcgcttcggaagccgtttatcactatgatggtattatctggcgtccagtcagtgaccgcgatttaaaacgggaaatggtcactgcttttatggaagaggaactaccgtactcaccacatggtatcagctctgccgtggatgccctgaaattacagcttcccatgatgcaaccaccaaaacgccacttaatcggattcagtaacggcgtatttgacctgaaaactagccagttccgaccacatagtaaaaatgactggttgctgcttgccaatgacgttgaattcaattcccctgtttcgggggaaaccctgcaaaatcacgcgccacagttctggcgctggctcaatcaagcaactgccaactgtgaaaataaagcagacagagtgctggcagcgctgtttatggtgttggcgaaccgttatgactggcagctttttctggaagtcaccggtgccggaggcagtggtaaaagcatctttgctgaaatctgttcaatgttgtcaggcccaagcaatactgtttctgcaagtatggcggcactggaaaacccacgggaacgggcgctgattgtcggctattcgttgattatcctgccagatcaaactcgctatgtgggcgatggttccggcatcaaggcaattactggaggcgatgaagtcgctatcgatccgaagcacaaacaaccctattcaattcgtattccagcggtggtactggcagtaaacaataatgccatgagtttcagtgatcgcagtggtggagtatcgcgccgccgggtgattttcaacttttccgaagtcgtgccagaaaacgagcgtgatccactcctgcgggataaaattgcggcagaattgcccgtgattatccggcatttgctgcatcagttcgctgatccacaattagctaggcgtttactagcagaacaacagaaatcagcggaagcattggatattaagcgtggtaccgatccactggttgatttctgcggttatcttatagcttcccatgaaactgacggtttgttaatcggcaatgcagaaattatgccgttcaatccccgtaaatatctttatcacgcctaccttgcttatatgaaaggcaataacctgaataaacctgtttccgtgactcgtttcggcatggatatgcccggcgcactggcagagtacagccagcaatatttacgcaagaaaagcaaacagggtattcgcagcaatctgagcttgaatcttgatacggctatcgaatggatgccgaaactgacaagggatagcctgccagaagaataatttcttctgagtacaatcatttttcaaaggaatataaaaaagtgttcaccactattcacactataatttaaaccatatatatcaaaatattacagggtgaatagttattctaaaactgttcacaactattcatcactgttcaccttattttctggttcaaggtgaacggttgggtgaagagtggtgatgagtttgatttcaagtcatcaccacttaatagtatgaatttaaataaaaatatttaaaggtgaatagtgtgaacagttttattactaattctttaataagggggtagacaaaaattttttctctggcaggtatttttttcggatctctgagttagcgggttaatgtattagcccggtaactcggagaagacaagcgtagcgcgtcagtgtggttttaattttttgtattttcttttatggcgagcatggtgatttttaataaaaatatttcgatgaaattattataataaacctaatttcactcattgatggaatactgatcataattattgcttttatttctactgaatatatggataaccaaagagttatccatatatcttttatttaagcatgtagaatgacttgctgctgtaccgagggcaaacgggtctaatttatacagatgaaaatcccactgtcaggattttcatcatatagccattatcccagccagccttctggcgcttagtcttcacgcctattttaactgacttctcatttttcagtaagttaagtgctattttattcattaatgccacattttcggccgcatgaccgcttctcagacgccggctatcctcaccaaaactcacatccaattgccagtgcagtttattttcaatatgccaatggctgcgtatggcacacgcaaggaattctgccgaggcaccacgatggctggtaatatagtagcgcctttcataactctctgttttaccttgctcttcccgccatgactccacaaccgcgataccccccaacgtgtgccactgaggatgacgtttctgcagccaattcacgtcgttaattaaccacaactggcgctgttctatacgaccatgatcgccatccgtacttcggtaagtgccatggataacgcccgtaaaatcctttgccaattggttgtccaaaaagagcttaatatcgtcgtaaaactcaccctgatttcctttcaaggccaaaacataatctgccttgtccgtgacaatctggttagcaattgtgtgttggcagcccatggcatcaatagtgatagtggaccctgcaatatccagcaaggccagaagcttagggatcgccgtaatttcgtttgatttatccgatactttcatctggccaaaacaaagttgattcgccaccgcccaagcactgactaaatggatagccggagagccgttggctttgtcgagtgtgcctctcattgttttgccatccaatgcaataatgtcggtggagattttggctaacttattcacccatgcgataaaagcctccccgaattcttggggattcagccggtttatcacatcgttaaaggtatcatggctggggatcccattggggagttccagaaattgtctgaaccagtcctccttggattttccgtattcttcaatcgcattgaaactctcacaaccgcagataaccgcacaaatcgagatggtgagaatgtcgatcaacaaatgctgtttcgtacgattaagccggggatcagtgaggtgtccaaaggtattgctgagggtggttgctttcatgacggtttctacggttatcattgacagaaaacggattgtaaatcacaaacgatcatcaatgttcctacctttatgtactgaaggcacatcactgaactaactgttcaatttagacccgtttgccctactgctgtacctgtataggctgtaatgtctgatatttttgtcgtatattattatataaatctggcatttccccagcagataaagtaacaattaaaacataagggaacctctaaaaacttttcacagccacaaaattgagtaaaatgtaggcacagtacctctctgcaaggtagcgccatcatgataccgcctcgttctgctttaaaaaaagacaaacaggcatccgaatatcaccgtcgaaaaatcgatgaattaggtgatccgctgcttgttcttgataaatatgttgatttctcggcactggctgacaccctagaccgtatcgtcccacgtattatttcccccaaagggggacgcccgccattcccgacggaggtgatggttcgcatcattatcctgaaacatttccataatctttccgatgaaaaaatggaatatcaattgcttgaccgaatgagctggcaacgtttttgtcgcttgaccgatgtcattaatattccagaccgtaacacgatttggtgtttcgaaaaacggattgggcaggaaggtgccagagcgttatttgaagaggcgaagcatcagctgtcagcacagggattcattcccagaggagggcaaatcattgatgccacgttgatccccgtgcctaagcagcacaataagaaggaagaaaatgaacaaatccgtcagggcaaaaccccggataactggacagtaaacaaacgatgccagaaagacaccgaggcaacctggacgaaaaagcacggtaagcgttattttggctataaacttacccttaatgtcgatacaaaatataaagtgatccgccacatcgcgacaggaaccgcggctgtccatgatagccagttttttgaagctgttttggacaggtcaaatacccgtcgggacatttatgcggataaagggtatgccagccagaagcgtgaacgtgtgctgaaggagcagggctatcgtgtgcatattcagagaaaagcggcacgtaataagcccttatcacactgccaaaaaggccgaaataagaaaatagcgaaaactcgggcacgcgtagaacatatctttggctcactctctcagatgggtgaaaaaattattcggacgataggccagctgcgagccaattttgcgatgacgatgaaggcaacctgctatgatttgcaacgtttggtttatttcggaaaatcgggtattcatgctttttaatttcgagatgtgatgaaaaagtgatgcgtttgtttttttcccctgaacaagcaagaaaaagtcatacacaataaggtcagttattggtgagttcaaaattgatcttattttttgtattgagagtttttagaggttcccctaactataatttagtcttctctaacaaagatgctgcttagataatggataatttttccttgctaaataacaacatgaaatttagtatagttaaatatattatcatacaccttaaaaaggatagcccgtggttttcagcattccattttgtcctatataaagctagaacctctgaaaaccactagtgaagactgatcctagtaaatggtatataatttatatatgttattatttcagtgatgaaattatagtttatatcaaaatatagataaatttccctggtaatgccctgaccgggctatcttctttgtactaataccaaacagcgtaggacagaaattattacggaacggtgaatttcgcattcttctgtccacccagttaaatataagtattttttatataaatttaaacgggtgaaaaacacccttgaaattaaattcaaagaatgatatcgactaggtcaggggttattttatttccagaagaaattatttaataatttattatacatgggaatatgctttcgatatgaaattacattttataaataccccaaccaaaaaaaatgaagaatgcacaataaaaaatatcttagcgcgaaataaacgatttccttctataggtagatattcactatctatattcattgacaatacctttaataaggtaacctccaaagcttggtggtgcttcttttatattcaacatctcaggatgaatgaaaaaaatcagcagatctgtctagaaaaacagcttatattgcaaggaaaagcttctgttttagaacgttttttacgcatgccttatgcttgtattttttattctcaagataaaatttttcatgaaaaactaagttatcaaacttatagaaagttaaataattatactcatcaatatagacatttctacttagaaaaggggatctggtatatctaataatatgacatagatatgaacttatcctttaagaatgacgattcctatttgaaggggttgatagctatgatggaacatcttagtgatccttggggaatcaaagacttaaattctcgccatgtctacatgaataaggcagcttatctttatactaatacccctctaaattttaatatagaaggaaaatttgataatgaattccctgctgattgggctgaattagccgatgaccttacggagcacgataaaagaactgaagaaatacaagacagagtttctgttatagaaacacattattggtttggtagagactgtttaacaccttttattagtgagaaattccctgtatataatgacgacaaaaagtgtatttggattgtttggaatgccaagcctctcaatacattgtcaccattacaatatataaatcagagaaaacccagcattctgacaactgaagcatgtacaagccttttcactaaggctgagcttgacattatttttttcatgttacataaattttcaaataaagaaatggctaaaatctataacatcagccataagactatcgaaaatagaatatacaatatctaccaaaaagctaatgtccactccctccagcaatttgaagaattttgtaaaaatttacagctagataactacattcctgagcgcctaataacaaaaggcattcttttcatttaaattatattaaataatactaaatagttatgattaaagttgaagattacccactaagccgaataccacaacaacaacgtttatctttgctaagcgtggctatcgtccatatgggcatgttaaccgcattggatcaatttatgttaggtgctgtcctcggcaacgctatggcactgaccgatgcatttattgctatttttattggcagtctgatatttggcattatcacttttggcctcggctttgccggcatgcgtgaaggcttatccggtagtttattggcccggtggtgcggttttggacgaataggctccgtgttgatcggtcttgttattgccgtcagtttattaggctggtttggcattcagaatgctatttttgctaaatcccttaacttcgcttgcggggataaacttggctttagtctggcggcaatcatatccggtactatattgacgactcttgtggcttttggttttaaagcattacgattcactgccagaattgctgtacccatgtttatcctgttagttgtttatatttccaccattgtactgtctggtgattctggccagaattggtatgaaattatgcagttacctcattcagatgaaactttatctatcagtgcaggtatcaccatagttgtcggtggcgcaattgttgccagtttgatgactcctgatctgactcgttataccaaatcagggcaacatgtttttgggatcacgctgttgacgattcttgccggtgagtttgttattaatgggctggctattttaatcgcgaaagcactaaatacagccgatgtagtcactattatgtcccaggccacagggggagcgggtttgttcgttgtagtgttttcaacattaagagtgaatgacctgaatctgtactcttcatcattgggcgttatcaatgcggtcgaaggagtcacagggaaaaaactacgttaccccccaacaacaatagtaattgggatattgggaaccctattttctattttgggtattctggatcgatttgtggatttccttactgtactcggtgttgtcttcccaccgattttgggagtcatgctggttgattactatattttgcgttcttatcgaaaggtattggatgaaagtagacaaaaaggacaacttccgcctgaaacaccggttataggctgggctgctattatcgccagcctcgttggcagtattattgggttaactgttgaatggggaataccagcacttaattcattattaatagcaagtggagtttactggttcactaaatctgctcttaaacgcttaccatgattctccccagatattgctccctactgagggagcaatttacttttcgtctttccatttattctttaaccatcaagtattagctttaagctcattgtgcacgtaataaaaaactcttagttcttactgtgcttttcagcgtatctgtcactattaacccattgatgatctgcttcccatgtaaacagccacttacgcgtaggcccagccattacgttcaggtaataactatcatatccggcaattgttgcgacagggtgataccctctcggaaccatcacaacatctttgttatacactgccattgtttcatctaataagcgatcatcagtgtaaacacgctgtaaacaaaagccctgcggtgggttcagacgatgataataagtctcctccaaataggtttcctgaggttcattatcagtgtcatgtttatggctgggataagaactggtacaaccttcatcagtataaacttccactaccaataaactatcagctggctggtgatcaggaagaatgttatgaacataacgacgattatgcccatttccccgctgttcagccccaatatcctgcggtgtaattaagcgggttggataatttcctttcccttttgcctgacaaatcgccagttcaaggtgggtttcagcaataatctctatcacctcatgtggcgcgatataaacagcataaggttttttacgctcaaacgggctcatacgatcaccaatctgttcaaatcgctgttgtgcagtgttcactgttgcttttcctgcaactaaaaccagacaggtttcattttcagaagcagctaatgttattgactcccccgtatccagctcgtaaacatcaaaatgaacatatccccagtttgcgatttctggcgagatatgttgtgtccgcttgtttttatcgggtttatgatattttgatagcagcttagacataaaatctacctcaaggtcactttttaatgtccgtgttcacatcagctctgcatctttagcaagccgatgtaaatttttataccctaatgtggcgtaagtcagcggatgtgcaactgcagggtcctgctctgcttcaacaactagccagccgtgatagtcgttatctctcaatacattgaaaatatctgaataatttacacagccatcacccggcacagtaaaaacaccacttaacactgcatccagaaaactggttttccggtttttgacatcttccagtacctccggccgtgtatctttgcaatgcacgtggttaattcgtttaccccagcgttttgcgacagtcagcggatcatctccagcaaaggttaaatgccctgtatccagcaacagcccaacctcttcacccgtgttttccatcagacgattaatgtctttggcactttcaatcactgttcccatatgatggtgataagcaatctgaaccccatgagactgagtataacgggcaaactctgttaatttttctccatactcctgccagcgctctgccggaaagagagggcgtaaatgcacaggcttagtctggtcaccgtgtatacagtctgtcacttcggcaaagaccatcaccgtcgctcccagttcacgcagcagcgttaaatgtggctgaacagctgcaatttcttcttcgacactgcgtgtcaacaattgcccggaataccagccagatactaatttcagataatgggaagccagaataggccctaatatttgcgattggcgggggaatttattacccaattcaaaacccgcaaaccctgcttgacgcccttctgataaacaggtttccagcgatgtttctgctcccagagaaggcagatcatcattagtccatgtcagagggttgatgccaagttgcacagtcatgacggttctcctgtatattgaggattcagttcttcttttgcatttttttcatcacgctgacgccagtcattaatcagattgtgatagttcttttttacttggagaacgagtgtctcatcatcaatttcgccagccagccatttctgtgatgctttaccgaataatgtgcgaccaacggcaaaccctttgacaatggatttacctgctgccgcattgaaacctgccttgagtgtttttgcgggtgcatccagccccagaatcacaactccgcgacaatcagggtcccgttgcataatcaaatcttcaatttgatcccacgttgtagattgcatggggggcaatttccaccagtcaggcttgataccaagattgtagaaccgcttgagtgcacgtagataaaattcatctgaacgagtcatgccagatggtaagatcacttctaagagtagctcatggcctgactggcaacaggctgcataaatttccttcactatttcttcctgctccagacgcagagtgctgttatcttcaggatggaagaacaccagacatttcacgatatgttccaatggccaactaaccagctgggaaccaatatttccatgttctaaacagagtggacgggagccgggtaattcaatcggacgccctatccataacccctgcccggtcgcagcatcaagaacgtcctgtccaaaagtactgtcacataatatgcctgagtgaccttttagattagcttctgtactcacctcctgactggcttggaataacaattttttcagaggtggaatgagatcaagactggcattcacttcacgtgccatttcaacaaattgaatccggtgatcaaacgccatcacacacaattcctgccactgcttatgacggctactcacgcgatgaagatgattcaggtggatatctaaatcagggcgataacctgttgctgttgacgcaagtttttttgctcgcacgatatagttatccagttctgttttatccggcattgcaggcgcacagccatgtcgtgaaacgaccaaagcaccacaggcatttgcgtaagcacaactttgttcccaactttcgttattcaggtaccctcgcaatagaccagacataaacgcatcacccgctcccaacacgttcagtatttctactttaacgccttgaatagtaatcccttcatcaagagtctcaggaatattcccggtaaatacagaacaccctagagcccctcgtttacagaccagagtggcagaactcagtttcctgacgctgcgtaaggcatctaaggtatttttagagccaccagcgatatgaaattcttcttctgtaccgactatcagatcaaattgagagagtacttcctgtaattgagcagtcacctgctttgaggcgatataacgggtttcaccgtcacccagtgaagtcagcccccacaaaacagggcgatagtcgatatcaataactgtttttaccccattacggcgggcatattgtaatgcggtcagcacggcagctctggttttcgggtgagaaagatgggttccggtaatcgccaaacaacgggcagaagcaatatattcctcactgaaatcatcgcgggtaatcgccatatcagcacaattgtcacggtagaaaaccagcgggaaagtttctttgtcttttataccgagtaacaccaaagccgtaagacgctctttatcagtaattaaatggctggtatcacatcctaccctctccagctcttcacgtagaaaacgccccatatgctcatcaccgactctggccagcatggacgattttaatccctgacgcgctgtaccataagctacgttgccagaagagcctcccagatatttagagaaactggtcatgtcctccaaacgtgcacctatctgctgaccatataaatcgaccgcaatacgtcccatacagataacatcaaactttttatgttgctccatcgctccacctcttacccaatgtgcgttttgctaacttatgttgctaacccatgtatgttgctaactgcgagatttaattaatttcagtgacgttaacccagcgtttttgttcatgagagcagacaatcgcatccagaatgcgagagactttccagccctcagtaaaatcaggccagatatcctgatccaacgcgataccatcaactaaatctttcacttccacggttttctggtcattgaagccaataccatgcccggcgccgtgacagaaaggggcataatccggatgttccggcccgaccaaaatggttttaaaaccctgacgattgaccggttcatcgtgccggtagagtttcagttccgccattcgttcctgagtaaaactcagagtgcctttagtccctgtgacgacataagtcagccccattttgcggccacaggctatgcgggaagtttcaatcacgcctatagccccgctatcaaagcgtaccattgcatgggcctgatcttcgttttcaacggggatcaatacagaagaacccgatatttcagggcgtactttcacaattgttttcatatcaccacaaacagttgtgatatctcccaccagatactgcgccatattaataatatgcgcaccaagatcgcccaatgcgcccaaaccagcctcattcttaaagcagtgccaatgaatgggactcaggggatcagccatataatcttcattatgtgtgccgtaaaaatgcacaacttcgccaatctcaccattcgatataatctctttagccagctgagcagtcgggtttttcatataattaaaccccaccagcgtcttcactccggcgatagtggctgctgccaccatctgttttgcatcatgtgaattcagggccagtggtttttcgcaataaatatgtttaccgtgcttaatggcttctaatgccatttctttgtgcaaataatttggtgtacatatatcaactacatcaatatcaggatcagcaaccagttctcgccaatcgcccgttgggcgtagaaaaccgagttcttttgcctgagtctgagcaagctctggtgtgatcccggcaatcattgcacgtactaattttccttttaatggaaataccgtcgatgcttgcgcataggctatagcatgggtacgcccgatgtagcccgcaccaatcaggccaatacgaatctctttcatattatttggattccccatcactcagatcttctaggcactttcacgatgaatggaacgcttagacaatactttactgatttgataagcgacatatcccagaattccggctgcaaacagatagtaaagtgtcattacataattcggcacattctgagccagaaaaacgtacattgagacagcagccagtgtaattagccatcccataggtttcaccattgaccacggggtaatatccacctgttttgtatacacttcttcataactttcagcagggaagaaataaccgactgtcagcataaaaatgacattcagcacaaataagatgccgaccagatggaagaaatggatatcaatatgcaaaataaagttacaaacaatatatgctgacataccaaataacagccccagttttgccgcaatcgggggaactcgttttgtcatcagcccgaccagcacaacactgagaataggagcattaaaaatcccctgtaattgctggatcaggtaaaacaaaccatcgggtgcatttgcaacgagcggagcgatcagcatggttaccaacgccagagcaatacccaaatattttcctacagctacacttcgagcttcactggcattcgggttaattctctgtttgtaaatattgacagtaaataaagtaacggaggagttcaggccaccactgaatgtagagaatacagccccaacaactaccgcagcaaaaaagccaaccagaattttaggcaaaactaattgtactaatgcggggtaggcattatccgggttatctatttgcccattaaaaatatggaatgcaataacacccggtaaaataatgatggaaggaataagcaattttaatacagcgcataacatgacccctttttgcccttccgccagattcttcgcacccaatgatttttgtacaatagattggttggtgcaccagaagaacatattggaaataattaatccggtaaacagggttgaaaatggaacaagtgaatcttcactaccaatagagttaaatttatcagggtgcgcctgataaacatcagttagcccttgccagacactgccatccccgacatacagtaaggcgaaaatcgtaacgatgcctccgccgataattaacccgataccattgatggtatcagctacagcaatcgctttaatcccgccaaaaatagcgtaaatggcacccagcccgccgaccccccagaccataatccataatgcagtggttttatcgacattgaatacctgagaaacctgaaataaactttccagtgcaatagctccggtatataacacgataggcaataacgaaataacatacatagccagaaataaaacagaggtaatcagtaaagtatttttgtcaaatcgccgttctaaatattctggaattgttgatattcccaattttaaatatttaggcaggaagtaaatggcaaacagtacaatagttaaggctgctataacttcccatgccataacaataaatcccgttctgaatgccagtccatttaaaccaaccagatgttctgtagacaaattcattaataacattgagctgccgatataaactccggtcagagagcgcccacctagaaaataaccttcagtggaatcaattaaatgtttattccttgttttataataagcaatccctgccaccagcagggtaaaaccaataaaagaaagaaaagctgacatgtaatgttcccctgtttttctatgatctataatttgatttctttaccggacaacagggattccagcgccttatcagcaaggtataatgcctgttcaccatcaaaaccggttgtttctggagtagctctgccagccataacatcgacaaaatgatcccattccgcgatatatgcttcacgataacgttgcaggaaaaaatgttcgggtttagcggaaagacacccgttatctccccataactccacactattttccttaatattaccggctgtcagtaaacctttttcaccatgcagttcaagacgctggtcatagccataccccgaacggcggctgttagcgatgctcaccatagcgccggaaggaaatttcatcacaataaacgcagtatcaatatcacccgctgagccaatggcaggatcaaccagattgctgccttgtgcataaatagcacatggctcttctccgataataaaacgggccatgtcaaaatcatgaatcgtcatatcccgaaacataccaccggaaacccggatatattcagcgggtggcggggcaggatcacgggatgtgatcatcagggattctgccttaccgatttttcctgcatgaaacagatttttcatctgacggaactgagggtcatagcgacgattaaagccgacaaacagaggaacctggcactcttttaccacagcaaggcattgctgcacccgttcaagctcaaggtggaccggcttctcacagaaaatcattttattattgcgggcagcctgttcgattaaatcagcatgcgtatctgttgctgaagcaataagtacaccatgaacctccggatcagacattgcttcttcagttgtttgtattttgacctgatatttctgtgccagtgtttcagcatttacctgataaggatcaacgacagagtagaggcaggtttctttatgactggcaatgctaaccgcatgcaccagaccaattctgccagcaccaaataatgcaatattaaacatgaatgctccttgatacctctgtatccccgtcgtctttcagattacttcgtttatgagacatcttctgaaatccatcgggtatatttgctttgggtttgaataaaaatatatcaaccaaaatatttatttcaatttaacaaacattggaaattttattttttagaggcggttagcattttgagatgaaaatgatgtaattagtgttatatctatcacgaaaaataagctatcagatctgaatgaattaataaaaatccattaaaatcatgcaataataaaagtaaagcactcaactacagaaaagttgaacgcattgaaattacaattgtagtgaagagataaagaaggagtttggcatgaaataaatattccacgccttatataaaaagagcaatttcacggccagatgaaagacatgaaacagtatataagaatactagtactgccgagtatatttctccacataccgcctgatattttcagctgcagtggtaatcgccgggttatctgcaacctgagctgttcctgttctccaccatgattcataatcgtgggtcatagttttcggcagcactttaatatcaatcagagtggcacatggttgtttacgggcgtcctgcaaagcagtaatcaattgttgttcattatgcacccgataacttttgcagccgtaactttctgcatttttggcaaaatccaccggaaccagtgcgccatccaaccgaccgctttgttgattgcgataacgattttctgtcacaaaactacccatgccttgactcatctgtaagttattgatgcagccaaaccccgcattatcaaataacaacacgataattttgatgttttcctgaatcgccgtttgtagctcactgtgtaacatcatataagacccatcccccaccattgcgtaaactggctggttagggcaggcaatttttgcccccagtgctgcggcaatttcatatcccatacaggaatagccatattcaaggtgataggtatccggctctttgggttgccacaggcgttgtaaatcccccggcaaagaaccggctgcaccaacaataatggcgttatcttccagatactgatccatcagcccgagtacacgcgtctgtgccagagtagtctgcaatgtgtcactgtattcatttaatttctcatccagatgatctgcaatttctggcctgtctccggcctgatactggatagaaaatagccgtgacagttcctcctgccagactgatttagcctgagcaacctcctgttgccaaccggaatgccatcccgtttttgctaatgcctgaattatcgcagataacccttctcttgcatcagcaatcactgcgacagcatccagtttgtaggcatcaaattctgccacgttaatggtaagaaattcagcttgtggattttggaacagagatttggatgctgtcgtaaaatcagtaaaacgcgtaccgataccaatgattaagtccgcatccttagccagcaaattagccgccagacaccccgttgtaccgattccaccgcaattcaacggatgtgccgcaacaatggcgctttttcctgcctgtgtttctgcaaatgggatattaaaagtttctgcaaactggcggaaagcttcatgtgcgccggagtaacgtactcctcccccgcaaatcagtaatggctttttcttacgttttatcagctctaccgcatcctgaatacgggataaggaggcaagccggcgttcaagatgatgtacccgtttctggaagaagtaatcagggtaatcccagacttctccctgtacatcctgtggcaagcagatagtcactgcaccagtatccgccggatcagtcagtacccgcatggcctgaatcatcgctgccattaattgttcaggtctggaaatgcgatcccagtagcgagaaacaggccggaaacaatcgttggtactgatagtgccatcccaatactgttcaacctgctgtaaaaccggatctggctggcggcatgcaaaggtatctcccggtaataacagcagtgggatacggttagccgtcgctgtagctgcggctgtaaccatattggcagcgcccggcccgacagaggaagtaacagcaaaaatctgtcgccgttttttctgccgggaaaagccggtggctatatgtgccattccctgttcattgcacccctgatagatctgaagatgccccggctcctgttccagagcttgccccaaccccacaacattaccgtgaccaaatatggtgaaaacaccacagacaaagggtaattcctctccatcaacgttgatatactgctgattgagaaacctgaccaaagcctgagccatagtcattttttgagggtgctttgcctgagaagatgttgccgatgctttcatggatctgatatttacagaaccagtatttatgggcttggtattcataggattactccatcgttggcataacaaagctactgctatggtgttccagacgaacgctggcaggccaacggctcgtgactgttttcatacgggtataaaaacgtacaccatcattgccatgtacattcagcggaccgaaaatagaacgtttccagcccccaaaactatggaatgccataggaacaggaatagggatattgatgccaaccataccagcctgtacatcttcactgaactgacgggcagtttcaccatcacgggtaaaaatagcagcgccattaccgtattcatgatggttaatcaatttcagtgcggtgtgataatcaggtacgcgcacaatggacagtacaggcccaaagatctcttctttataaattttcatctctggggtgacataatcaaacaaagttggccccacgaaataacccttctcatggcctgtgacctgataccctcgcccatccaccagcagctttgctccctgctccacaccactgttaatgtaatcacagatttttgacctgtgttgttcagaaatgaccggccccatatcgttttcccgcccctcgctgatccctgcaccaacaaccattctgtcaatttgctgccgaagttttgttaccagctcatccgctatttcatcccctacggccagaacaacagacagtgccatacagcgttctcctgcggcaccaaaggcggcccctataatggcatttaccgccatatccaaatcagcatccggcataagaatgctgtggttcttagcgccacccagcgcctgacaacgcttaccatgtgatgatgccgttgcataaacatactcggcaaccggtgttgaacccacaaaactgacagcctgaacatgcggatcagtcagcaagacatcaacggcttccttatccccttgtacgacgttgaatacacca

SEQ ID NO: 279 - DNA, 20653 bp, Xenorhabdus sp.; identical to SEQ ID NO: 278
  CDS (955)..(3294)

SEQ ID NO: 280 - DNA, 33001 bp, Xenorhabdus sp.; identical to SEQ ID NO: 116
  CDS (8315)..(10111)

SEQ ID NO: 281 - DNA, 33001 bp, Xenorhabdus sp.; identical to SEQ ID NO: 116
  CDS (10216)..(11139)

SEQ ID NO: 282 - DNA, 33001 bp, Xenorhabdus sp.
  CDS (30826)..(31119)
aattcccaccccaatgcattcactattgataaaaacaaagcgcattacctgaagggcgcaataattttaactttttcttcggtcattgcccggcgggttttttatttcgcttgatttcatttggttttcattcaggccttatttatcatttcctctcctgattatttttcatgcattaaacgaaatagtccggtctgtgcgtcttttcagattatttccggtgcccgatataaaaacagccgatggatgttttcatcttcccgtttgtcacagacaacgccggacgaatttcaatgttgtgcccggacgtgatagccgacaattatcacgtaatccatcatcatctcagggagacacctatgtcagtgaaaaagcacatcgcaaaacttcagcagggaaagaccctgtttgagcaggggcaacaagccacccggctggctcagcagacaaccgggagcttcgttgggcacgaaccggggctggcaaagaaagccgccgggggtcacagcgccgccaccaaagccctgcaaaaagccagtcagtttctcagtgatggtgcccccagcggtctgcaatttaccctgacggcgggcggtctggcaccagaaacctttgtcgtcactgattttaccctgaatgagcatttttcccagccgttccagctggaggtcggactggcgagtgctgaccctgccatcgactttcctgcggtactcgaccgcgctgccacgctgacaatcacactggatggggttgaaagccggagtatcaccggtatcgttgccagctttgaacagggcaataccgggttgcaccagaccacctaccagatgagtattcgcccggacctgtggcgcaccacgctgcgtcagaattcgcgtattttccagcaactgaacattgcggccattatcaccaatattctgaaagagcacggtatccgcgatatggtcttcagcctgcgccatgcccacccggaacgggaattttgtgtgcaatatcaggaatctgaaataaatataatcaattgaatataaagggtatattatctatatttgattttatgccccttttaatgccccaatatttttttcttacttttattttactatcttactgatttttattatttatatcattaattgtgtgcttttcaattattttaaagaaaaaaagccttgagggttaaaaatggtcagattttactaccattttacgctcagggcttaagataaaaaatgttcatttttacgacattgatcacaaattgaagtgggttattcctgtggctgagagcgggctttcctttctaataattctccagtatgagaatcgaaataacggctgggccagatctctgagggatgtatgccaaggtaatttgcgataatccattcacctttcggccacggtctgctgaatgcgtttgccagtgttgatgaaccgagtcccgcttcacgagaaaccgccgctaaggttgtaccccgtttacgtaatgcagcaataatgtcggcctgatgccagtcattttgaagattgttgttattcattcctgctaccccttccattcattaatattgatggtggtgattcaaagcagggttagcagaccggggattaccatccggcgaggccgaagcctcccctgcctgaaccaccattgaaagggtgagcgcagacgcactggtagaaatacttactaccaatgggtaatccttacaaggctgctaaaccttgaccactagagtttgctaatggcgggaatactttaactgattgttttaacttactcaataactgaacggctaagttgaacgactataaacccgttcaacgtaacgcccgcgaccatcaccgtgccccaaatccattgataccagtgcccgtgcttcctgacggctaaaacccttctgttggtaaaaattaagcgcctcctgtgcccacgcatagcgcagactatgaggagaatagcggcctgttaaacccatctttgtggtatgtgtccgccagtaattcatggcctgtctgagatccggtttatcaatcaaccttccgccgcgttgctctgcaatagccatcgcctgttctaccgcctcttttactgctgcaatacccagtacgcgggtttgtcttggccggccgccttttgtaccgaagacaatatgcagtttcggctctggctgttctaattgttttagccagctttttaacgaagcactgcattgcaccgcttcctgagaacgtaatcccaacaatcgggcaagtttcaaggtgacggcaaatccaacatcgcgttcaagtgctttttgataaacggcctgaaacgtagtatcagggatcgcctgtttcgttccggcacggctggtgccgcttaatcccaatgcctgattacttaaacgtggtgaagtttccagcttttcccggcctgccatgcggaagatattacgcagcgcagccatttcattttgtactgttcgtttggcaatcccctgagataaacgggcatcaacgtactgctctacatgtttggttttcaaattattgagacttttcacctgaatattcaggcttaacaacaacgcgcccaaacgtcctgcaatccgaatacgatcatgacaggtcttatggctgccaccactctgacgcgcaaaaaactttaattctttaatcaatcggctcattgtcttccccttgctgatacctgacaacctacaatctctggcgctcgaccgttctggcaaaacagaaaatacctgctttgcccttgatcgatatctgtgcgccagagtgaacgcaggttgaggtattgcggggtatcggttgagtacacggtactgccgcctgcgtgtgcaggtcatccccaccggcaaaaagccagcctcgatatcgtcaagttctcctttttcaatctaaaaatgcagtgtcagattcactgagtggtgaaacaggcgtgagcctgtcaaggttgtgatgttatttggctgcggcgtcactttcagcggtgaaccggcaaaaagtgacgccttaaattcagcaaacggtcagctaaagtcgtgtggacattgaaatgcgcacaggtacggcaaaacgccgcgacgccgcgaggttcggtgtcaaacaggagcaatgcgttaattgtttaggggtaaaaagtggtccgttgaatatgtcaaacaaggatagtgcgaaagatgaacgggatgtctggacgtacaaaacccatcctgttgtccattaaagataaaggcaaatacgatttatgttgctttgaaaagtcagtgtatgaatccacgttcaatacactttggtggcaatataaaacaccttttgggcgtacttttagtttaagagaccttcattgccagacgaggggttaggtgtcctgacaatatctgcttccaaaagtgcgcagatgtaccgcaatgcttgctctccctttcaggctacgggagttttatttcgccacccgaaggcgatcctgacaggcgatggatcgtttttgtaggaaaagatattagcggttttgcgggataggggcaaagggttatttagtctgttttaaaaaaatgttgtcctgtcagacataagtcaaaatttattaatttaattaacgtaatattccctataatagccgatttaatcctgatttctttatcatttataaacattttcaattaaatgccgatagatgattcatttgagtctccgtgcaaggaaaaagcaacgtgaaaaatcagaaggagtctttgtaccaacaagagttgacctacctgcgcgaaaagatgaagttagccgccgccgaaaacccgcagttagccgagtttctggaacatcccaatgatcctgatatccagcgtctgctggaaggttttgcactgttgtcttcaaacttacgcagtaccgttgaggacagcatcccacaaatcacccatgaaatgctggggcgtatctggcctcacaccttacgccccgtgcccccgaccacgatcatccaatttaccccccatcagggcgttcatcagggaattgccgatatcccgcaaaattcaccggtgactgctgtggtcggggaacaacatttcccgttttaacacctgccgtgatttgcatattgaacctgtggtggtgcagggtaagcagatccaaaagacccgcgaatacagtgatattgtgctgacgttgcatcagacgggcaaccctgtgtcgggctggtcaggcggaaagctgtctttctttatgggcactgataccaaccgcgccgcccagttaagcctgtggctggatatgcacattgatgagatctattggcgcacggcagagggtgaaacaaggctcaggcacagtgactttctgggctggtcggaaaatttacagcaccccctgttgcccactgacgacctgcctgtttcacgattacaacagatgaccgaatactactgcctgcctcatgcatttagttttatgaccttaaatatcaatgagtcacgcgagttgccgttaaacccggatggcaccggtgagctggttatccgcctgttcggggagctgcccatcgaggcgctgggcgatgccttccagttggggtgtgtcccggcggtgcatctggtgccgatggtcactcagtcgatttcattgttaccgggggcatcgtgttatccgcagccattggctgaaacagagcgacttttccgtgtggacagtatccagacggcgaaacaacccggcgagaaagtcactcagagcagcgctccacgtggcaagccctgccatttcgtgccaattgaccagtttcacgccaaaagtgactggctgctggaggccggtgaacccggtaacgtctattttcaggcgctgataaccgatgatttgctggggcgccttcacaaccggctacatttttacgggatggacgggaacgcagcggataacctcgccctccagactgtctgtgcacacgttatcggctaccatgagcaggccatgcaactgattgtcggtgatatcacgctcacacagggatccgtgcccgcccatttacacgcccgcaatatcacgccggtttcccctgattttccgccgatggtgatgggaaaatcagactggtcgctgattaacctcttaaactgtccgccgttcttgttgttccatgccgatgccctgaaagattttctccggttgtatgattgttatgccgggcatgatcgcatcctcagtcgccggatgcagcagcatatcaacggcattatccgggttgatgcccagtcaggcgagcgtcttgacttcacccggcaaggcctccccgtcaatggcaacacactgcatattagccttgatacagcgtgttatgaaaatgacggtgtgatgtaccagttctgccggatgattgaccacctgctgacgtgctttgtcgtgcggaataatttcatcatgttaaaaatttaccggcagggtgagcaggccgtgctatgggaattccggcagcggattggtttgcgcagtgaaatgtaacgcgattaacggaaacagaaaaatcaggagaagtcatgcaaaaaagtggattacgttttttttgccaaataggaagtttacccgaaaatacctttgccgtagcggattttaccctgcgggaagggctttctgacctttttaccctgaacctgacgctggttcagtccctgcccgacaatcctttcaaaccgaagacagaaatcgatttaaccgcgctattgatgcaggaagcggtattacaagtcttccacggtgaaacggagcaacgcaaaatcaccggcatcatttcccatgccgactggtgtggcaccgatggcaacaaaacccggtataccttcacggtacgcccgtccctctggcgtttgacgctcaatcaggacagccatatttatcatcgccagcgtgtaccggatattatggatttgttgctgaaaaaacaccatgttcaggctgattcccaactggaagatccgcaccagagccgggaatacactacccagaaacgggaatccgattatgcgtttttttgtcggctggccgcagaagaagggatcagtttctggtttgaggacgaaacgctgtttttcagcgacagtcatttgggcatgacggccaacctgcctctgcaataccaaccacaaccggatacggcgcacgggcaggatgtgatttatcaggttcgtcttggtgtcggcatggcgccgaagcgcagtattcaccgcgattataatccggacaggccgctttctcaggtgtaccaactggaaagcagcccggaatatcaggcaatgggcacactgacaccgtataccatttacgagagctatggccgctttcagcaggaagccgaaggtaaaccgtttgtgaaataccggcacgaaatgctgaaaaaccagacccaaagtgggagtggcaacagtaactgtatcaaactgatgccgggaaaaatcttcgaaattgaaaatcatccccacgcgccgctcaatacccgctggcagattgtcggcatcagtcatcatggccgctgtccacaggcactgggagacaatggcggtgaaggcacgacgctgagcaacgacttcagctttatcgatggttatgccgactggcggcccccattccattacaaaccacaggcagacggggatgaaagtgcaactgtggtcgggccggaaggggaagaaatcttcgtcaacaaagacggtgcgataaaagtgcattttcactggaaccgttacgataaagccgatgacagcgcctcctgctgggtgcgtgtcgcgcagggctggaacggtaacggttttggttttatggcgataccccgtatcgggcaggaagtgattgtgtcttatctcaatggtgatattgaccgcccgatagtcaccggctgcgtttacaacggcctgaaccgcccaccgctggatttaccggcccaaaaaacccgcaccacgtttaaaaccaaaacccataaaggggagggctttaatgaactgcgctttgaggatgcggagggcagtgaggaagtgtttattcatgcacaaaaagatatgaacacgcacattctgaatgacgaaaccagcaatattagccataaccggacacaccatattaaaaatgacgcgcatttacgtatcgataatgaataccgcgtacaggcaaacaatgatatttcgctatccaccgggcaaaagctccatatcaaggccgaagatgcgctattaacccaaagtggcaatgaaattcacctgagtgccggcgctaaagttgtgattgatgcgggggctgaactaactattcaggccgccgggcattttctgaaaatcgactcaggcgggatcaccagcagcgctgtcgttaactttggtagtggcgcaccgggcaatggctcaggctggggcggtaagctaccggataggctggataagctgtcacctattaatatggctcaggtagaaaaaatggttaccccaccaccggaaaaaatttgcctgtcctgcttaatggaagcggcatcaacggggtcagtgatggtcatgaggggagaataatgacagccacattaaaagaaaaatgggaaaaataccgggaaacttacccggaaatgaaattatatgcactggtagacggcttacagtatgagcggtgctttgacgataaattgacttatcttgaaggtgcgaataatccgttgttccgacaattcccggatgcggaaattgcgtttgccgggccatggttgttcgatatgaaccagtctcaggcatgggaagaaaaattcttacggctggagaacgccgctccagccgtttcctggctgtactcaacacgatcattggacaaactgacccgccatcttgaatcacagttaaatatccggttaaaaacaggcaaaactgcattattgcgtttttacgatccccgtgttctgcaccaaattccgcatatttttacgctggaacaattgattgagttcacaaaagatattgaagagtggagttatcagcttgataacaatcatcacgttgtgaaaggaaaataatgactatggacaaaaacagtattgcttccgtcttctcagatttgaaaaacaaagcctccaaaggtattgagcagcaacaaaaaagtaaagttacacatccaaccagtgtgcccaattgtgcgggaaaagtgggtgatccgggagtgaaatgcaatcaaaaattcagtcatcagctaaaattattaccgattgagaatcaggttaacgtcagtaacgtgccgtatgcttttatttccattcccgccagaggatttggtaaaacgaatggcaaaggcgaaaccgaccgtatcatgacccgccagcccgaagaagtgaccgtactggttggtaaactggctaaaagttacgaaagaaggcgtggcagttttggttcattaaaggaactcgaagaaagaaaaatcagcctgctcacaaatacgggtgagccaaccaccgaaaaaccgtatatcagtgggtatgattatattactgtggtgggtgcgagaacagcaccttgggaagtaagtttgggttcaactaagagaacagttcaattcgagtcattttttaaagagtcaccgggaaatcagtaccgttttattaattctggattacatcagttgcagctttttcctaaatcaagtcaagatcatgctgtgcaacgtattatggtggtgtttcaacagggatatacgcaaaaggatattgataggattaatgactatactaataaattaggtgggcgtattatttatgtaaaaaataaacaaggacttatcgattttctaaatcagaggaaagaaaagaaaagacttattaaggagatggtgatattcagtcatggcattattaattatgccacttttcattatcaaggagaggatgttgaggaagggctttttggatcagacgaaattaaaaaggtatatgaatcgatatttgatttcgatgctaaaataactacttatgcttgtcgggcgggtatttcagttgataatggatatccaggcgattttacagggataccggatgctggacaggataaaagcccagctcaacaaatggcgaatacctgggatgttgaagtcaaagcgtttgagaaacgctctacatatgtaggcgtttatggtgctgaagaggaaaaaaaatataattcaataatcgataagtatgaggctgataatagagcgtataaatatgaactggctaaagggaataaaaataccaaaccacctgaaaaacctaataattatgatatgatgaaaaagcgagttgagggtgttaagacaagagaatataacgaagatcatggtggtggtcctattgaaccaaatggttcttggcgattgccggggacaggaaatacaccagaaggattaaaaaatgatctacaagattataaaccaatagagtggactttatgagtttactaaaaaagaaaatcatcacaagaatatctattataatagttttaatttcattgtctttagggggttatcatatgtatatgcaaaaatatcagatgtatgtcagggttacttcatatgatgaaaattcgtctgaatttcctagcaaaaaaatttggttcgacgccagtgaatggctaaatttatcacagtatattaaagtccatgacacctatctaattaataaaaaattcacacctattgaaaatttagatacattgaaaaccttgagcataacaatgacattacaggatgaaattgataattcaaggaagtttcctgaactgtacgaattgcaaaatatggaaactataaaattcttgcatttaatgcaaaataaaattagctatgaatatatatatacaaaatttgataaagagtcattaaaaccaatattggatttctttttggtaaaattttcttataaagataaaaaatatgagctattagtgatgagaagaaaatatgaagatgaatatgtatacgatcgctacgattctatttatagggaaaacgagtggcataagaaaaataaagatactctgacatacagagattaccttgcaggaaagattgattcatataaacgataattttttctaacaactatagctgctgggttttttaattcgatgaagatatatttttccatcagctatggtgttggcgattatgataaaaacaaatgtattagataggttgaaaaattaaaatactttgatttaaaaacatgaaaatatctaacataaaacttttcttcataatgctttttttgatagcactagttttctttgggagctactatatgcaaaaataccaaatggccgtgctagtaccatcatatgatgaaaattcatcagaataccctaataaaaaagtttggtttgatgcaagtgagtggttgaaaacacctcaatatattaaagttagtgactttttcattattaataaaaagttcactcctattgataatctagacacattgaaaatgttgagcataacaacagtattacaggatgaaatcgataactcaaaagagtttagtgatctttctgaattgaaaaaaataggtatgatggattttttaaatttaatgaaagataaaataaattatgaatatatatatagtgaatttaatgaagagtcactaaaaccacttcaagattttttcttggttaaatttattcataaagaaaaaagtatgagttatttataaggagaagtaactctgatggagaatatgtatacgatcactttaattctatttacagagaaaatgaatggcataagaaaaataaagatattatgacatacagagattaccttgaagggaaggttgattcatataaataataaatttaaaaaaactatagttgctgggatttcaatacgatgaaaaatatattttaccggcagctatagtggtaactattatgatcggagatatcataaatatggcaatagaacttaatgaagaccaatggaatatgctaaaaaaatactcattcaatgcttatattgatgaattggtagtccattgtaatgaatcctatccctatcttgatgtaaatttaggtaaaaatgacttaagatcagcgctggaaaatgccgtagaagcagccaaaaacgaaggttttgatcaacgaggggctgttcagttttatattgatatgcttattttgtttggtacaggatttcagactgacccgcaatatgcatggataaaaacaagccttgataatcatgcccatcttggacaattagaaaaaacaagtctgctttatcatgagatcactcgatatttgaatgaagtgcatggtgagaaagatgaacatctgaaagccagtatatttaaatttcaagatatcaatattgaacgtttaaatgttcaatggaatacctatgaaattaacattaatgatatattaaaatacttatttccacaaaaatacaaatatattaaacaggatgatatcaaaaagctcatacaacttggtgttgaaaaatccaatcagtatggaatagaaaatgccaatcaatctgcattcttaacgctgagcatgtttttattagggcatgaattcgatcaggatattttcttgcctcatttaaatgaaaaattgttcaagcaatattattctgatgctgacgcgttaattatggtaatggaaaaacagacaaaagaatacctaaaagtatttattcaatagtataaaaatattttatcctattatggagggagtcaatatgccaaataaagctgttatccgattaaacgataaaaccgatcatggtggcaaagttatcactgccattgatggttatgtttatcaaggtgttcctgtcgcaggcaagggtgatttagttatttgcccaaaatgtgaagataaatttccgatagtagaaggaagtgaaactttaaaatatcagggtaagcagattgctctggaaggtatgagcactgcttgtggtgccaaattgattgccagccagaaaacattccttgcttagacactgacgcgctgcgcttgtcttctccgggttaccgggctaatacattaacccggtaacccggagaactgaaaaaataaccgttactatcgattatctttatataactgcaccaattttcacgggataacggggtaaatggcatatttattatatatttcattgagttactctatcccatgttatcccagcctatcccgtaacataacctcacagttttaaattactttaaattcaaagaattaatgcctgccagagcaaaatctttttcgggataactgctattgccacgatatcactttatttgtaatcacctgatgttacgggatagtgcgggataatacgggataagtgaaatatctataactaactgatatatcttaaaataaatctgtcttatcccaatatcccgttatcccaacgttttttctcttacgtggggttaatcctcatccctgaaaatcagcaccacaaaccgtccctgagtaccatttactgagatggttttgctgataaagcgatctttttccgctttaaccagcattccggcctcttctaaggcttcaaagccagattttttctgtaacccctgcaatatctctgcttcaaatacactggggataatgtggtattccgcctgtccatcatgacggcggttatgcaccagatacccggcaagatcactaattctcatggcgtgtgaagtatcaatatccccgttcctgagccatcagacagaatgattgggtaatatcgaagaactgatagcagatagcgttcagcttaccacgcatccagttatacaattcccgataggtgaatttacgctgtaacaattccagctgttcgcaggtatgctggtgctgagtttgcaacgagttgaccagcatcacggccacctgccgacggatgctcatgcccgcaagccgtgcagcaatctggttgatttctctctgtgcactgtcacgttggatttcccattcctgacgacggcggtacatctccgaccggatgactttgtcacccgccagatttatggctgacaaattcagtgatatcttggcggcggagtcatggctctctctcccccaacgactaaccaaatgcgttctaaaatcgaagcaaacgactacaaaaattatatcttaggcttcatttttcataattttttgtctgataagcaaattcagttcttaatccaaaacgaatttgatgagcaatcgctcaaagatttgaatgaaggcgatagcgacaccctcaaatacattcaaaacgaattaggtcacttcatcgattatgacaatttgttcttaacttggatcagtaatggtaaagatttcgacattgcttatgtacgtgatgcgttacctgcctttacactccaccagcaatgtatgaatttgctggtggagatgcaatattagcgacggcattgggcagatacagatttacccagttgctaaacactgcgctctggagactttttcaccaactccagttctatcataactgcggtaaggcgttacaatactgaattcgtcagaatagattaaaacgactctaacgtctctgtacactcagctggttttatcctgagttcaccttcctctgataccagcgcgaaacagctgacatcagagtttaattccatcaagttggccattcttcttagtaagttaattatcttcattctcttcagcgtgatttcaaacctcatatcgcgctgcgccgcctgttcaatattgacaatacatatactggtgtcttctgctgcctgatgaagcagcacgagatcttggtcactgcgctgccgtgacaggttggctatgccggtatcagaaaaccggatgattgaatcctgaccccgatcatctatcgtgatatgttggtaatgagccaacacttcggggttagaaaaccagtaatacaatttttctgaacgtccggtaatagccagcctatcgatgtccgctagctgcggcaggtggattgttgttcccggaggaacttgccctacctgcaataccagcctctccggtgttcggttaacaaaacggtaattccccactactcgggcggagccggattctccttcactgatttgccacaaatctccggtagtctggtcatggacataactggcctcctgcccggcgacctgccccagataatgcagaacatgatccgagttaagtataccggcggaacgaagcgttttcttttctttcggcagataccacgcaggataaccatgctcagaaaacagtctaacggcttgcgataattcagccccattactgagtgcctcaatggcagaggcaatttgactgtccgagcgatcctgcacatgccaggcaatcagcaccggacggtctgtcatcttggcatcagctgacagcagtaagaccgctccatccggggtttccagccggagtgtattgccctgacgaaccacactagagtattgatggctggtccggagccagggtttcgccgcggcaggttccccagaaagcacccgcttttcactcaacttaaggtcagtctccgtcgacagaggctggcgatataactgatggttgtcagtgtcaaaaatccatgcctgcctgccatcttccgcttccgctaaaccaagatagaccagagtgtgttctgtattgagcccaactctgccctgcaccaccaaatctgccttactgtcataccaggcactgacgggttttccgtctctgtcctgcaaccccagtagcagtaaggtactgaacttatctggagtatcccgtgccagctgtctcagtgcggccgtcagacccggctggtgaggttgcagcagccagtctaccgtcaccccgatcagacggatactgccctgatcgtctgccagccacaacttcccactgctggagagtgcaaccaactgcttgttcacgatggatactctgatatcatcaactgacaccttgctggccggggtgttggataggccattatcctgctgaaaataaagactatgtctctgatggctgtaaaaataataacccggtttatcaccggccgtggtgaaaacgcgggtgaaatcctccgttagggtcagcaagtccggatttttctttttcagctcagctaagatgtcggcatcctcctgatccggatttatccgattcattctgaccacattttgcagctgttttccatcagtctgtaaccagtaatgtctgtccacacccgcgactttcccagaaaggctgatcacctccgccgggctgctttttacctgacgctccggcacgcagagctcgacggttaacctctgagtcgctgcctgtggtgccagcagaccattaaactcaccgtcattggaaccgagaagaacaggcaacgagatttttttactgacttcatccagagtcgccagcatggttgtattcccgtcaactgccaccagtttcagtgcttcttcttccacctgataagtatacgagataaggttttcatcccgctgctgttccactacaaaccaaagctggtcattgctttgcatcacgtgactgctgattttcccctgatcactttccggaaacattataggcagatactgccgcagaacttcgccactaacaatatccacttgccagagcgtggtatcccggtaaaaccacgccttatcgcccttaacgctcgccagctctacattgttgagaaaatctgctgcgtcagggacgttagtgtaaatcatacgatcacgaccggtttcatagaatgcacggccgacaggacggctttcctgtggtgagtgtcggtagttttccaccactacatatggcctgttgtgatgatcagaattgcttaactgcctgagatgatcatgcaaagcctgaaggctgttaaatcgctcagcattcgtttcaatctcttttatctgccactgctgattcttttcgtcctgcttgacagaaaatacccctgcattatttatcagggaaatattaaccgacgtttcaggcagggttatctttatattaccaatatgcagttgtctgttatcttctttgttgaaactggggttatcatcagaatggatatgacgggcatccagtacccaatgggtagcggtgtcattcccctgtaaggacagagagacaccctcctgcaagctgatacggtatttgccctttccgccagtcaaccagtaggacaagatcccgtgaatatctttcggtaactgcgggatgacaatatcccggtcttcatcgtccagaataatgtcaaccggtgtttcaacaaattctggctttatacggcgtaccacgcgttctgagggaaaagcataaaaatcaaagtcgaatcgtccgtcttcttccagtcgtcgcagaacgtcaaatccccggtcgttgcgagcagtgacgaagggcaggatcatatattcgtaattaatgtaggacttcatggtaacgggcaagatcaatatgtctcggcttctgggagagaaatggaagtcgatctgcgcctgtttgtagccgatgccttcacggatattaattgcctgttttttatcagtattagctggcctgccgggccaccagccaaagtaattactccggcctgaaccccatgagtaagttgggtcgttgcgatagagatactggctgtcaaaagtcagattaccatggcgcaaatcgagctgacggattactgcgccggggattggttccatcaccgtataacgactgccatcttgtgccactttttccgcctgccggtatccaccccgctgataagcggcttccagatcggcaaaataattgcctaccgcccgtgcatcagtggctaccctgccgaacgcttcggccagagccgtaaaaccgatacccaaaccagccagtggcacagccaacgaagaggcaaaaccagcaacaatcggagcacctaagatcccagcgccaatacccacaccagttgtcaccaggccagcactgtcaaacgccagctgagtaccataaacagccttctggggttcattctgtgcatgcgccagttctaggctgtccagtatcacactggcgatatttaaccccactccgatacccgtgctggcatgggacagcgatgaaaacaggctgctggtcactccccggccttcactggccaccgctctgtacaaactggcgagtttagcgccgtcctccagcgcaccatgagccatctgcgccaagttaacataagtatgcacctgtagtgcggtctctaacgtattaggcaccttatcactggacacggtggtgcgatttctatcagcaaaccatgggatcagagtcttaaccataaaggcggtattcagtccgtgaacagcatctgcttcgaggatacctgtgcgctgggttagtttccctttggtatactcgtgcgtttttctgacagtctcgagctctttatcataagaatgaataaaatccataatacgttggtcatccgtcgcgaatatccggggaggaagctcagaccgtacccgattagtaaaccataaagaataacttccgggccgggactcatcctccctgaggctgcccagtactggcagccattcttctgcggacagtgcatttttgctgtacagctgctccatcgcctgctgaaaatcttctgcacgattaagcatcgccagcagcctgatatcaatctgcgcattgtctggattattttccagtggtggattaaccatatcccttttaggaactgatttacctggtgttactgttcttaccttctccgatatactattctccggatcaaaatagcggccaaaatgtggtaaatggaacttctcagactctggtaagcccttattgataagatctatcactccaacatacagttcatcctgtaacgttttttctttgcctatatcgcggtacttgtcgaacatctgtaacatgtccttgccgatactgcccttcccttccggttcgtaacgtgcagcgacgtagaaggtttcaaagaacgagtgatagccgttatggatcatgaaggcggcattggccatctggaagttccagtattcctttacactcaacgtaccatcaaacaattccggtaagacattgctgacagtctgggtagttcctgaaattccgcctataaacggggtgtccagatcattcatgtagcgcgtggctttattttcaggatcaggtcggaattggttgtagctacggtacttatcgtccttgattaggtacgaaccatcatgatatacccgctcttcagggcgggtattgaggagcagatacgggtctggctgattcagccgattattgattatgaccttgttttcaccgttttccggcatcagctcagcatggggatttatcgggactgcacgcttggaatagctatcggctaccgggcgtaagacatggaacaaggcctgtttgcgcagacttctgcccttattgctcaacagcgcctctcgcgacttttcagccgtcagatcctgttgtacctcgttgctctcaaggctctcaaggctctcaaggctctcaggaccagctaacaacaaggcgagtagctttttgttcaccgaacgctcaacctcggtatgattgaaatcctgttttttcgggttgtttggatgctgttggttgatccgctgggtttcttcttcgatggcctgaatgcgccattgttcgtactgctgtgccagtaactccttagattgggcgatgtcactttgcacatagttattttctaggatcttgtccaccatcttggaggagaacacgagagtattcagtttattcgccaatttgaacaatagtgggtcattttcgatgttttcccagaccgaagtggcaaattccttttcccacaacatcttgttcaggttattacccttgatatcgcgcgttttggcattgaagttcttcgactccaacaccgctgcgggggtgatgtggttgcgttcgagcaaacgcaccagttgctgctcgaacacgttgcgttctctgctgtcttcaaacaaatggctggcttccgcaccatagtctcgcaatagatccagcttctcgaaaaatgcggcgttgtattgatacaattcggcagtctgcgtctgagtcaagtgcttactgtcgatcttgtcgccttcaacgcttatcttcaaaaagggcgttgcggacaggtaggtttcgccctgtggcatttccagcaagtactggcgatcggcaaaaccaaccgagcgttccagctcatggatatgagtgaaaagcccatcacgatccgggtcataactgttattgcgaaaatcctccaagctggtagtccggaagctggtgatatcagcattctggttgattaagtcactcaaggtgctagccaatggaaacttatcggatctgctcgacaccttaattcctatttggttcggtaccttgcggtcaacgttgctcaataatattttgcgatcgttatccagaaaatgctccttgaggccttcgcgctcggagttttccgaaaccagatagttagcgaaaaacttctcgacgaatttgattttgaccagtactgagcgaattggtgcataggtcggggagcgcaaggatggctcatacttgagccggtattgttgttgccaagccagggaacgggccggagtaccaaaggaaaaattgaataccctgccctccggcacgaccagcctgccgtccctcatgaagaagtccttgaagcgtccatcggggctggtatcaaccagagcgacactcatgcggatgtatccaggacgttcctccatcattaacagtgaaacatttaccggcagattatcggaggtttggggtattttggtcagcttgttgagggcctcaacttcttccgtaggggttgccttgagaaattcgttgtagcgagttttgacatacttgtaggcctgcagattggaaaagtgtttcacgtattttgagcttaacttttctaaaatgcgcttcacgtcttttgagtttaactcggggtcagccttctcctgtatagtgagttgctgttccagaagcggtttcagaaactcttcctgagacatgatctcggtatctaactgagcctgcttgtctgctgcgttctttctcagagtctccgcatccaaggggagagcatcactgagaatattcaaggcctttttcctagcgttgtcaaagtgtgttatggccgactgctgcgttctgtatatccggatatcgcgctccagttgcagcttgtaggcctctctcgccggcgtgttaggtcgtttgtccaactcctgccggcttctctctagtgtctgcaaatgatcctcgatagaaacaggattttcctgcatctgaaaatgctgtgcggccaatacactcagggtactctgctgcatttcttgcaaccgttcatttacctgcttgatatagtcggcacgcgcgtcggcatccatgtcaaaccattcagtctgacgacccgccgccttgatctgttgatcgataagagtattgagcaattcttcgaagtctttggacatataaatcattccagtaatcccttggctgtttttgagcaaaaattagtcataatatctaaagatatccacctaaactgaattgataattattatcattaccaataagtaattacaagcataaattaattttttataaaataattatatatataaatcagttagttgatttatagcgatgaagtctattatctttttgtttttatttgatttattgtctgattatgacgctaaaggctttataacaaccttagccagttctgaaaagtagtgggataaatccccgccatatgtctgtcagttcaccaataaacatcacgatattagcgatatcggttttgggcagttttttgaagaaagcatcatcaagtttttcaacccagtcatagagtaggctccagtattgttggcctgctttagtttcccggagactaaaaccgggattattatcattatctatagcagaatcatattaatgcttgggtgtcacgcagcctgctatccattacgccttgaaacggctgaaaatgactgtcaaaaaaacactaaggcatctgctcaaggataaaccgccgcacgttgaaagaacaaaaaacatcctgagtagattaagcaaaaatttgggtttaaatattgatgttaaagacattttgcgtaatccaaaagggcattataaggggttattagcagaaatatctggaagcattgaggaagtcacataattaactatttcttaatgaaattaatacaaataataattatattagttttcatctgttcatatatacagtatggcaaatgtaatataacgaatggtagggaaatgatgtctgacgatttggaacgattggtttttttagaacgtgttgagttactttctcggatgggtggtttggataatttgaatgataaagacaggcaagtggcgctgaactggatatgggaactggtcgaacaagccaaaaatgaaatgataataatagaaaagccactaaatagtggctcaaaactgaacttatgcggcgctggtttgcagcaaatctaacgccatttggcgctgttgcggattgaggttattaatcacagtctgcaacaggatatcgcctgttttggcactggggctgatagtgtgtgaaaacgtcaaattcataacaaaagtgtgcccacattccacatctgaacacgaacaataaatatcagcgatctggcgatgcatccggttggttttacggataaccgacttagcgccgcactcagggcagattatttttaatacacgcatgtttcttttccctaatgtgtctattttcctcgattttaccattttcctgctcattctgcactcgaactgtcgttatctttcttgaaatgaacgaataatgtttcgggaatatcactactattgatggcgttcataaacatattctgcacggggatcacttcatccttgcgataagcatcacgggctttttccgggtcgcccagtccgccgacattggtcgggataatgcctgccagccccgccgggaatcggtgggcggtcagcacatcctgtgaactgatgcttttcacattggcaaattcatcattggcggaaatatccccgaccggaataaatttaatgccgtccgggtcaccattaggaatactcacaaacatggtttcaaagttgccgatgcctttgctttgggccagcttgttctcaatttctttttcggcttcatcggagatattcgggtcattgatgtaaatcatgccgcctgtatgcccgccgttgtggtagtagcggcggcggaaaatggtcgcttcggagttgagcagggccgcatgaatgccgccgatataatcgggcaggccgtaaacctgttgctggggatcatactgcttgataaaaatcacttcttccggggtgtaaaccaaaggctcaccctcctgcaatatcacaaaatccccgtctttacggcggcgcagatacagggacggcaagacttccagtctgacaatatcgccccagaagttacgcactttcagcagggccacatcgccgaaaattaggaaattcatcatggccgaccggaattgttcatgggtcagaccgccaccgagataatccgaggcaatcatattgtgccgggcatagagaacgccgccatgctgcccgttcatgttggtcagttgcgccagcgccagacggtcaatcggcaaggtgtagtgatcataatcattgtcataccagattttctggtaatcggtcatggaagtgagtatcggctcgggtttacccagtgtgataatgctcattttccgctgtgaatgcgggacgtgtgatgctttggcgttcttcctgaactttcttttgctcattgtgtggcctttgaaaatgaatatttagaggtgcgtttcttctcgtggttaagcggttcattcatcagggcatgggcaatagcccagaacacgtcagcgtgtccggtttcctgcgaacggtcagccacaaaggtcattgcgccccctttggcggtggtggtatgctggatagctaagaatgaagccagaatttctttttgttccccgtcccactcaaggcgttcttcgctgaccacatcgatcatcttcatgaccagttggtttttactttgctgactgtagtggatggcctgcgtttgccgtggggcgaagtcctgcaccatctcataaaccccgtgaccaatccctgtggtatcaatgccgatatgggtaaaacggtaacgtttgaacagcgcttcaatcagtttggcctgatgtttccagttcatgccctgccagtagaacgtggctaatacccgaaagcgttcacccgccatcagcggtggggcgacaatgacaaaggtggaggtatcgccggagcgggccgggtcaaaaccgccccagacttcacgctcaccaaacgggcgcgaggcatccgggttgtgatcttcccagagattgatatcgacgccgcatttttccagttgatgatatttgaagacggatgcaccactgtccacaaactggcacatatagagcatgttaaaggtgtctgcattgtacttgttgcgcaggcgatcgatattggcaaggttatacccacctttgatggcatcctccatcgtgatgacataacgccactggctatccgggcaatcgcgcccaccattgcggtattcattaaaagtaggaaaatccacattcttacgtttagcatcattgccgcgccatgcatcacctgtccagaaggggtatgcggaatgcgttttcgcactgggggttgaaaaataagtggtacgccatttatcaatagtcgccattgcggaagcgacttcattcaggtgcttaaaatcaggtatccagaagtattcatcgcaatagagatggccgttataagattgggcggtgttcttattggtggataagaaacgcagctcagccccattacttaagcgtattgggttacccgtcagtgtcaccccgaaaaattgttcggcaaaattgacaatataagagcggaagacttctgcctgtggtttggaggcggacataaatatttgcgggttacccgttagtaccgcatcttccaaagcctcgaacgcaaaataccacgttgccccgatttggcgcgattttaagatattgcgtattggcttatgtttgttgttgcgcaggtgtttctgatagccaaacagattgccatcaacaaaggtctggaaatcttcttctgtcagcgctgaaatatcatttttacggtagcgtttctttttcttcggttcgccgtctccggtcgcaacgtaatccccctcattgcccgattgtgcccgcgctttaatgtcagccagtttttctttgtgcttattctcttgtgctatcagtttcacatgatgggcaacaagacgatcatattcgtccaattccagcgtggttttattattgcgctcactgagcagcaccagtcggcggtcaatcgcctcaatcacactttcatgactgagcatatccgcccagtgccatttttccgcccagtaatacacaatccgtcgattgggcagattgagttcagcggcaatttcagccggagtatagcggcgcaggtacagcgactttgccactttaattaattcatctgaatatttggccattcttccttttcctgactatcctttatttctcagtcctcattatgcagggctaattttccccttacgcccaaccaacttcggttcaattcggttatacgccatatccgaattcaatcgcattgcgcctgtcgcagcatttttttggatccgcaatactgtgagggaagcaaacgaaaggaatgcgatatgtctcagttaatgacgaactggatatgcattgccatggagggcgacaccgttgatggtcgggcaatcgaaccacaatggatcttggaagccgccgaactctacgaccctcaactgtataccgcccgaatctggccggaacacgaacgctggttcggggcgatgggggaagtgctcgcggtcaaggccgaacacggggaagacggagctttgcgtctctatgcgcaactgcgacccaatcaccgcttgttagaggccaaccgggacggccaactgttgtttacctccgtggaatttacccttaacggtaattttcgcgggacaggcaaaacctatctggaagggttggcagtcactgattcgccagccagtgtgggcaccacccgcctacagtttagtaaaaacaaaaaacctcatcgattcggtgcctataagccactggtaattgatgaagtcagggaatttaaacaaaagggaataaagatggcgaagggtactaaaggcaataaaaaaacatggcgcagtctcttcaatattgaagagcaggaagagacgccaattgagaatcccacagacgacgatccgttacaagtcatcgctgaaacgttagccaaaatggaagaccgactggcagcgctggaagcggcacaggcatctactgagcaagaagtggaagaagtacaggacgatatcgaaaccgtcaaagaagtggtggataccgaagaattcgcccgtttgcgtgacaatctgcccaatatcctgaagaagttcggcaagctggatgggattgttacccgtctgccctcacgtaatccaaaaggcgacaaaaacaaaaactttaattatctgtaacgcttgatagagcaaagggaagcgctatgcaattaaatcaacgggcacgggcatttttgcagaactactctgtgggattagctgaagcctacggggttgcggatacctcacgttatttcgccctgagtgacccaaaagaaaccgctctgcgcagtgcactgctggagtcggtcgaatttctgaacatgattacctgtgccgatgtggatcacctctccgggcaggtggtgtcggtcggtaatccgggactgtttaccgggcgtaaaaaagatggccgcttcatccgagctacgggtgtggatggcaatgaatacaaattggtggaaaccgattctggggcagccctgaaatgggatttgttatccatctgggcgaactccggcagtgaacaggagtttgcacagcgtatgcaggcgtttaccaatgaatcgtttgcgctggatatgctgcgtattggctttaacggtcagcgagccgctgataccactgacccggatgagaacccgaacggcgaggatgttaacgaaggctggcatcagattgccaaaaagtggaacggtggctctcaggtcattaccacgccagtaaaactggatgagcacggcgattttaaatcactggatgcaatggcctctgacctgattaacacctgcattccgcagcagtttcgtcatgatccacgtttaacggtgttggttggcgcggatttggttgccgctgaacagtaccggctttatcaggccgccgacagaccaacggaaaaaatcgcggcacagatgctgggcagctcgattgctggccgtccggcgatggtgccgccctttatgccgggtaaacggatggtggtgacgatgttgccgaacctgcaaattctgacccagcgcaatacccgtcagcgtaaggcggagtttgtcgatgaccgtaagcagttcgaaaacaaatacctgcgcaacgaaaggttatgcactggaaacgccagagttgtacgcggcttatgatgaagaggctgtgacaattggcacggtggcggaaccggctgaaaaactgggtacagactaatgctgtcacctgctcaacgccaccgggcagcggtagaactccgccagaagctggcacggcaacaagcggttgccattgccgatggcgctagtatgcacctgcaagcccgtgccattgagcaggatgtgaagcggttacgccagctcacgctgacagcagaaaaggtcgaaatgaagcggcgggaactgctgcccaattatctgccgacagcacagcgctatctggatgagggcgaagtataccgcaatccgattttcgcctactgcgtgatttggttatttgatatcggggaattcagtcagggactggactgggcggatatcgccattgagcagggacagctcacccccgataattttcgcagcggttttccggcgttcgtggccgacaccgtgttgctttgggcacaacgggaagccgaagccgggaactccgtggaaccctatttttcacggacatttcacaatgtcaccgagaaatggaaagttcacgagaaaatcaaagcgaaatactacaaattcgcggcgttaagcctgttaaaaggggataacgccgacattaaggcaagtagcgtggacagtccggaggtgctggcgcaggccgatagctggctggcaaaggcccatcaatgcaatccggcatcgggggtgaaaacctatcggcaacgcattgctgcccgcttgcgggcactgacaaacgaaacgcttaaccttaatcaataacgactaccgcaagccggagtgggcgcggtggaggcatagcaattaattgcttatggctgtggaaaccggacagcccactttttcttcagggaggaacgtcgatgtttaatggcaataccgtggattaccgggacgcaccgctgaccaatgacggcttctggccggatttgaacctgcgggagtttcaggtcaatcgcaaactgccagccgatttggataacgacatgctcgctaatgcactgttggcgactgtggcagaaatcaaccttgatttagccaacctgaaatcacgcttgcaggccaaaggttatcagtctgctgcggttgtgccgggtatctcgatgaacggtagcaacgtactggtcagccagtataaaagagccgtgtatgccagagcaaaggccgatttactgggggaatacacctcactggtcagccgtgcccccaatccggggcaggaaagccccgacgtacaaaaacgcctgttggctgaatcagcggtgacactacgcagtatgaaagggaagagccgaacaacggtacgtttgatatgagcaaattacagcaattaaccgcatttttgcgggaaaacctgccaaaacggatttgtgaaaccgaatttaccagcgaaatggacgaaatccgctttattccggcacaacgggatttagggctgggacaataccagatgtttatccagcaatatgaggcggtgattgcatgggggcgtttcccttacggagagtgcgacccacgcaatatcccgctgctgattgatagttggctgaccggacagggcgacagtgtgaatgaggccaatgttgagcaggaacggccctcactgacggtggaggtggacggtgctacggcggtggtcattgtcacattgtctttagccgagcctgtggtgatacgggaagaccccaacggcatgatcccgtttgatggtaaacgctggtcactggcgagcaccgaagtctggttcgcggaacaaggggcggtgcatagcgtggatgaaaccggcgcgcacatcgggaaacggtcatgatccacggccagttaaaccggaaccagcttaagcagttgcaggatgcattaagcagccttgatctaccagaaaagaagcggcaacgtctgttatggcgtatcgcaaaatatgcgctgattgatgcggcaaaacgcaatgtgcgcaaccagcgttcaccagcacggggaaagctgggctgccagaaaaagtccgtggcgcaagaaaatgctcaggaatatgccgaagttattacatatccgggaaatgccagaaattgatgcggtacgggtttatctgcaaggtggacattaccgcaatggccctcagcaagtccctgccggagttgtcggatacgcccagcaaaatgggatgagtgttcggattagtcggcgacaggtgaaaaagaccgttgaccgtgagcggatggcgaccattaagcaggctaaaaagctgcgtgatttgggttatcaggtcaggaagggtaagcgctggcgtaaaccgccggtaaaagaaatcaccgccaatatgaaatttattcaggcagggacaatgatccgcatattaagtggcgaagagatcaaaagtcagtgggaaatcactatccctgcccgtgcattcttaggcatgaatgatgacgagttcagcaaagcgctggctcgtcagctacaagggattggatatggcgcagggtaagcgcctcaataaaggatgacattatgtggccacatgttcaggttaatcaggttaaccaactgcaaggcgaaaccaaggagattgaacgggtattgctgttcgtgggaacaggcaaaaccaacgtcggcaagaccattgccgtcaatacccaaaccgattttgatgcggtattggggacgactgataccgccctcaagcgtcaggtacgggcagcaatggccaacgccgggcagaactggtcagggtacgtgcatattctgccggaactggccgacgaacgggcgtttgtggacgcgattattgcggcgcagaccatcgccagtgttgaaggttatgtgctgaccagcggtgcgaccaaagacgtgattaaggccgcccaaactctgcgcgccaatactatcgctaaatttggtcgctggcagtgggcgatcctgtcggtcgatggcccccagtctaaagagccgtgggccgattacgtcacccgtctggcggaactgcaaaagggtgaggccgtgtcctccgtgcagttggtgccgtgtctgtggggcaatgaggcaggcgtactggccgggcgtttatgcaatcgcgctgtcaccgtggccgacagcccggcacgggtgcaaaccgggcctttgctggatttgggcgcgtctgattttccgaaagatggcaccggcaaatcgattgatttagccaccttgcaggcactggaaaaactgcgtttcagcgtgccgatgtggtatcccgactatgacggcctatattggtcggatggccggacgctggatgtggaaggcggcgattatcagagcatcgaaaatctgcgtgtggtcgataaagtggctcgccgtgtgcgtttgcaggcgattgccaaaattgccgaccgcagtctgaacagtacaccgggcagcaccgccacccatcaggcttatttcgcccgcaccttacgtgaaatgtcgcgcagtaccgaaattaacggcgtgacgtttccgggggaagtgaaatcgccgaaagacggtgatgttgtgatcacatggcgcaataaaaacacggtggaaatttatatcactatccgcacttacgaatgtccgaaaggcatttctgtgagcctgttgctggatagcagtctggagaaaagcgcatgagccaacgtatttcaggccagtcggttgattttaatatggacggggatctggtgcatgccgaaaaggtcaatctgtccattaccgataacaccgccgccgcccagacgcagggcgtaccggatggctatatcgccggggatgtggcggcagagggtgagattgaactcagtaccaaatatctggaaatcgtcaccgcgaaagcgcgcagcgccgggtcatggcggggcattcagcctgttgacctgatgtggtacgccaaagccgggaacgaagaaatcaaggtggaggcctacggctgcaagctgattgtcagcgacattctggacgttgacccgaaaggcggcagcgtcatgacccacaaagtgaagtttgtggtgaccagcccggattttgtgcgcatcaatggtattccctatctggaagccgagttgacacaaagcctgatagggtaaggacagaactcatggaagagcatgaaaaaacgtttgtgacgctcgtgctattgggggcactgattgcgttaggcaaaatgctgaccggcaatgaaccgatcaccttacggctgtttatcggccgtattattctcggttcggcggtgtcagtgatggcaggcgcattgctgatttggtggccgggcatcagcccgattgcggtcacggggattggcagcgcattagggattgccggatatcagttaattgaggtctggttacgtaagcgcgggagcgcattgctgacagggaagctaaagaaatgacactcagtgaaaaacagcagctattcgctgttaaggtggcccagttgattttatgggccgatgagcgcggttatcgcgtcacgttcggggaagcctaccgcaccccggagcaggcaaaacgcaatgcacagcaagggacaggcattgccaacagtctgcatacccagcgtctggcggtggatctcaatctgtttatccggggggaataccagacccgcagtgaggtgtatttacctctgggggaatattgggaatccctcggcggcacatggggtgggcgtttttcccgtcccgatggcaatcatttttcattcgaacataacggggtgaaatgatgcttaacgcccggatgctttatgttgttgtcgtggcgttagcgttcggtgcgggctggcgtgtcaatcactattaccgtgacagcctcgagctgaatatcacacgggcagcagccaacgcaaaagaggccatgcgacaggagttgcaagctatttcccgcgcctccgcccggcaactggaagataaactggaggggatagccaatgccgccccacgagaaatccgtactgaagtggtcaagcctgtttttactgctgtgtgcgttagccctgagtttgtccggctgtacaacgacacggtcgacagcatcgggcgaaccttatcaggaaaacctgctgaaaaaatgtcagacacgattaccgacattaaccggcacgaccggaaataatatagccaatcttttaatggattatccggcgttatatggcaattgcgccgcccggcataatcaattagtggacgaaattaataagagaaaggaattcactcatgagtcaagaaaataaagtcattacgttaattatcgcggaaaaagaaattaactttgaaccgaatattattgcttataacagcatgattaatgacatgacgctggacaataaaattgtcccgattgtcacttacctgcgccgcattgtgcagccagcctcgaaagccgcactggatgaactcctgcaaatccccggcgcggcgatgcagattgtagaaagagtcaatgcggaatatgcgccgaaactggatatcgaaataaaaaactaaatgcacgggttaaggcaattgagaatagtttatttgaacaggccttaatattacgccgtcattatttaccgcatgaaaaagataatacggaaaatttagcccgtgccatctggttagataatcgttattgggaaaatacgcgcattgccacggcaaatggtattgcgctggcgttcaggggtgaaccatgagtcaggaattaaattttaccttaagcctgattgataaaatcacacaaccgctggctggtgcgaaagcggcggtgtccgggtttgcccagtcttcgcaggatgcgttcggcaaactggcgattggcggcgcagggttggccgcctcgttctggtcgattaagagctttcttgacccggccattgaaatggacgaagcgctgaaatcggcttcattgcagggcattgacagcagcgtcatgaataaagtggccaaagatgccatgacattcagttcccagtatggcaaatcgtccattgagtttgtgcagtccgcttcggaaatcagcaaggcggtcaacgggctgtcacacagtgacttgccccagatgaccacgattgccaacacgaccgccgccgccctgaaaagcagtgccagcgacaccgccggttacatggggaaaatgtttacccagtttgccagccacgctaacgccgtcggtcatctccagtttgccgaagagctggcaggcaaggcggtgatgatgtcgaaaactttggtacgtcgatgtcagaaatcactgactgatggaaggggcgcgagcagcgggaacgcattt

SEQ ID NO: 283 - DNA, 33001 bp, Xenorhabdus sp.; identical to SEQ ID NO: 282
  CDS (30359)..(30814)

SEQ ID NO: 284 - DNA, 33001 bp, Xenorhabdus sp.; identical to SEQ ID NO: 282
  CDS (29241)..(30362)

SEQ ID NO: 285 - DNA, 46407 bp, Xenorhabdus sp.
  CDS (39118)..(41025)
tgctgatgagcacggacaatactgccatcaataaacaaccattcagtatcagaattcttagctaattcgttgaataatgaattaaaaacacctttttttgaccagacattaaaacgcttaaagaccgtattccatttcccatattcagcaggtagttcccgccagggtatcccggttctcattcgaaaaagaataccttccatgatgaggcgatgcgtttttttatgataggtaagccgattttgttgcatgaagacaaatagcttatcccacacaggatctgataacataggtcgtggcatgatagttcgggtaacgagttttttggcgaaaataagagaccaaattatcatgccacccaattcccttcgagcaaacgtcaacacgccctaataatcaggctgactttcaacaggctgttgatcttttgataaaagatgctcctattgcacctgtttattacgctgtgactgcggtattagtaaaaccttatattggagggtattatgccaatatatccggatttacagccacgaaagatctttttgtcattaagcattaataaactcaacataaataatgaggaagatagccctatgcagaaagtcacaattatcacgggcggttcccgtggtattggcaaagcaacagcgcttgatctggccaagaaagggcatcatgtttgcattagttatcgttctcgtagagagcgcgcacaggaagttgtggacatgatccaaagcctggggcaatcggcactggctgttcagatggatgtaaccgatgaacagcaggttaccgctctgtttcagaaggcggaaaaggaactggggtatattaccgggctggtgaataatgcgggcattttaaaggctcagactaccattgagcagctaaccgctgagcgtttgaatgagatgtttgccaccaatatcacgggctattttctgtgtgccagagaggcagtcaaaagaatggctttccggcatggggggcagggtggggcgattattaatgtttcatcagcagcggcaaggttgggggctccctatgaatatatcgattatgccgcttcaaaaggggctgtagatacattgaccacggggttatctctggaagttgcggcgcagggaataagggtaaatgcagttcgccccggcttaatttataccgagatgcatgctgatggcggtgaacctgacagggttgacagaattaaagattccctgccgatgaaaagaggcgggcagcctgaagaggtcgcagcagcaattgcatggctgttatctgatgatgcatcgtatgtaacgggtaattttatggatttggcgggaggaaaatagactttcgcttttttgaactaagaattcaaccggagagaatggcgtatttttccggttgagttatctggcaggttgcgacaaaaaatttgacattattgcttaggtttaagaattattttcccgaacgttatttcaatattaatgggttgctctatcaattgactgtcagttagccagtcgccggcaagatagagttctccattttcacgaatattatctattccctgttctggcttgttttcaatttcgtggatcagattagtaagatccgtctcgggggcaagcagagaaagaatgatcccatctgagtgctgggatatatgaaagagcgaatcagaaataaacccggcatcactgagtttgctgccactgagggttaactcggggagatcagtgtggcgaaataaaacatgaagactcatttgacgttccttgtgtcatttggagatttcatcatactttagcagtactttaaggggtgagaaaattatgttgtgagaagtgttaatcttattcaggaaataaaaaccctgccgatattatcaggcagggttttatacgcttcgtctttcaagttgcctctttgttggctgcgctcgctcaccccggtcacatagttatctatgctctcggggatgaactcccttgccgccgcgatgcattttgaaatccattgtgtatacattaactcacttaattaaagcgaattaggctgcgttaatgccatactgagcacaaacagatgccagaccacccgcatagccctgaccaactgcacggaatttccactcactattgtggcggtacagttcaccgaacagcatcgcagtttcagtcgaagcatcttcagtcaggtcataacgggcaacttcagcttgtgtgtcatcgttaaccagacgaatgaacgcacctgaaacctgtccgaagctctgacgacgagcctgagcatcatgaatggtgacaacaaaaacgactttatcgatatcagcagggatttgatccagtttgattttcagtgattcatcatcaccatccccttcaccggtgcggttatcgccagtgtgcataatagaaccatcagaagatttcaggttgttgtagaaaatgaaatcagcatcaccgcgtactttgccatttgctgccagcaggaacgctgaagcatcaaggtcaaagtcctgtccgtcagtcgcgcgggcatcccagccgagaccgatcagaacatttttcattgttggcgcttctttggtcagagaaacgttaccgcctttagaaagagatacacccattattttttcctcatttatttatggatttagcttgttttttctttttcgggaaacatcaggctggcaataataccggcagccagtaccccgagtacgacaaacaggctggttgtcgccgaaatagagtaaccgtggtggaacatatgttcagatgcgttaagccccaatttgatagcaataaagaacagcaggacaataacggctttttccagatgaacgagatactttttcagtgcctccagtacaaagtagagtgtacgcagacctaaaatggcgaacatcatggcactgtaaacgatcaatggctcacggctgacagcaataaccgcaggaacagagtcaaaagcaaacatgacgtcagaaagttcaaccacagccagacacagcatcagtggcgtggcataaagagctgctttaccgacacgccctgctttttcactattagttttattactgctggttctacgaccaatagttacatcagcattttctggttttgccagttctgcatcgacttctttctgggtaagcatgaaatcatgaccgtgcagttttggccagattgggaagaaacgcttcaccaaacggtaggccaggtgttgtgagtaatcttcgatttcatcatcattgtcaccacttttcagcatcatcactgctgtccagccgacgataacggcaaaaaccatttcaacccacggccccagtgtcagtaggcttgccccgatagcaacaaaaataccacggaagacaatggcaccgattatgccccagtaaagaacgcggtggcgataacgatccgggacagcgaaccaggaaaagattgccataatgacaaacaggttatcgacggaaagcaccttctccagtgcataaccggtgataaacaggcttgcgacttcggcaccgtgatggacaaacaggaatcccgcgaaaacaaaagcaacagcaacccagaagacagaccaaagagcggcactgcgcagcgaaatcggcttatcatgacgatgcataaagaggtcgataaagagcgcaccaaccgacagaataataaatacagcaacggtttccatcggaaaaccaatgtgcgtggataccatgaagtaagcctcttaattatccgcgattacagatcgaaatctgccggtacaaagcctaaggctgtgcatatttctctggcagcatttttttcatcgttatcaaagtcgccatcacttttggcaacagcaatcccgacacgtaaagcgagctgtgctgcttccggctgctgcttcagcgccataatgtatttcatcgcttcgcctttgccgatatcagcatcaaattcatagctgctgaccagcttgttgaagaagtcgataatttcagtcgtatcgaatactttcagttcaggggaacttttgatgaatcccaccattttctgtttttcttcagaactgacaccgttacttgccattgcgacatgcgcgcacacagcaacagttccttccatgaattttttgtttttgaaacggccaacctgattggtaagctcttcgcggcctgcactgaatgccgatttgattttgtttaaaaaggacataagtccctccgttagtttgtataacgtgtatgtattaaacgtattatttactgcctgatgtccagcgaaagccccagccaaaagcctgatccatctctttatgaccactaaaatactggttgatacgttctacctgaatggcaccgttgtcattaacaagacgggcaatcgcacacatatttttgcggttatgcccttctgtcagacgggtttcaatcggaggctggccattgacgtaaatcgtgacaataccatccgtattgttccagctcggtacaccttcgtagataaaggcatagatcagaacttcacggatatttttccattcaagaccgttgatatggagccattcaccatcagtaacactgcctgtgcgatcatccccctgtaactggacataaggctcgctatgataagcaccgaaaccgttccctaatgcctgtataacgtcacgggtgccatcgcggagccggacgaaggcaccgagatccagatctacccctttactggtattaaacagattctggaacatgccacggctggcaggcgctgctccctgattccagttaagattgacgcggatctcaccgaagttgtcacgtttactcaggctgatagcgggtttttctttcgtcagagaaaccttgctcaggttgacacttttcggttcaggagccggagttggtggcgacgctggcgcatcatcgacaatatcgacaccaaaatgttctgccagaggcttaaggccaccattaaaaccctgagcaataaaacgaaacttccattcaccattacggcgataaagttcaccgaggatcaacgcggcttctgtacgcccctgaacttcaacgtgcccctgtaaaatcacacccccattcagttcgacctgaatagaaaggctgtgaaggctggagatagtctggctaccgtcgcaggtcgcggtgaatgcaactttttggacgtcttgccgaagagccggcagattaacggaaaacgcggtattggtattaccgccggacaggcgaatggtgttatcgtcattatccggctgcccataaaagaccatatccggatcgccctgcaccttaccatcagcatacagacggaaagcggagacatcgactgctgaacctgaaagtaccctgatggtcagcatttgattggagacgggggcatttccccccggagtcagattcatcagcgcaccaccgtttcaacgacttgtggatacatatcatcaatggtacgcccacggcagggaaccccatgtgcggtgaaatcccacataccgttattacggcgcagggaagagataataatgccggtatgagcaccctgttcgtttaactggtagcgcgccagctctttgccgttttgatcaacaacacggcagaaggcattttcaacatcgttgaaggtttgaccgcggaaactattaacggtaaaagcaaggtattcaacattggcaggcagtttaaccaaatcgacgctgatgacttcatcatccccgtcgccttctcctgtcagattgtcgccactgtgccttatcgaaccacattctgatttaagctgaccgaaccagacaatgtcaatggaattgccggatgcatcgagcagaatgcagctggcatccagatcaatttcattactgtctccgccgaacaaacgcgacaggaagccttttttttgtgctactggatcccatcccagaccaaaatcaattttagccagcgaagtactctgcttggtcagcgaaacggactgatttttactcaatgaaaccattaataacacctcttatttatcggtgaattgttttataagtgatttgttatttatcgtgaatcgctatcagtgaattgcgataatttcacttatgtagaaaatcataatatgaccagatatatggctgaaatcctgtcatattatgatcctcacaaattgcaactatctgttaaatgtatgatagagagcaatctggcttcgtgttttataatttcttttccatggagaaaagtcaaacaaattcttatttaaaaaatcatattatgattgacattaagtgtagctaagctctagacttcgatgcatatttcaccgaatttgaactggaaaatggacgtaacaaatttggctaatgtctatttagcaataggcgttgtctggataaaaaaatttggtttatgaaagggaaatttgttttatgaaagaatcaccactgcttttgcctcacttcctgaaattgctgaaattcttttaaaaggcttctatatgacagcatgtaatcatcttcagcgtcactcattcccggctgataaaaagcaaagttaccaaaaacaaagctatcaaaaacagttaaacagcggaaccttaactgtgacggctgagtgtggtgaaacgtctctggaagcgttgtttgatattgctgaacgacgtaatccgaaaagggcatttttatttgtcagcaaagtgctcgggcgtcatattccggtcagtccgtctattatgcgtacagtttatcagcagctgtcagataaattcccagttgatcttcccgggccggtgctctatatcgggatggcagaaacggcggttggtctggcggcgggggtttttcaggaaacccggcataaagttacttctccgatatttctgacatcaacacgccacccggttgaaggtgagttgttgtgtgagtttaaggaaaatcatagtcatgcaacagaccatctgatctactggccgaaagaagaacatttgcgccagcgggtaagccatgcccgtacactggttctgattgatgatgaagcaacgactggcaatacttttctcaatctgtttgaagcattgcatcgtgccgggctggaacatattgaacatatcattacagtgactctgacggactggagtgggcaaagcatcataaagcgctgtccgcttcccgtctcggttatttccctgatagaaggtgagtggcaatgggatgcggatagttcagcttctgtgccggttatgcctgcggtgaatatcacggcacggggaaaagtcgatattattggtacgcagaactggggacgcttggggctggacgatattcaatatgatctgggggctgagatcccggctaacgttggtgaaaaggtcctggtgctgggctccagcgaatttgtctggcaaccatttttgctggcagaacgccttgaacgagaaggggctgccgtgaaatttggttcgacaacccgttctcctatctcctgcgggcacgctattcagtctgtgatggcatttacggataattatggtctggggatccccaattttctttataacgtagcgcatcagcagtttgatcgcgtcctactctgccttgaaacacctaaagccgcagttgatccgcatctgatggagcaattatctctggttgcaccagtgatagagattgtgacttatgattaagcctgtattttttactgatcttgacgatacgttatttcaaacccgccggaaaataaatgatccgccggatattacctcgcttagcgtagctactgtagacaggcagcaggctcctcatggttatatgaccgaacagcaggctatgctggttgactggttgctggcaaatgcggaagtgatccctgtgacagccagaaatacagagcagcttagccgggtacagcttccgttcacttcatggcgtattgccactcacggtgcggtacttctgacaccggaagggcatgcggatcaggtgtggcaatcgcatatgctggctgaacttcagccttaccgggataaattgctggaattggaatgtcaggggaatcgactgatagcatccggcggtttttctgtatggtcacgcattaactatgaatatggtgatattcctgtttatatttcgtttaagtgtaataagcataatcaggcagaagagcttaagacgctgcttacagcagtgactcaggtaatgagtgatatttttgatgccgacgatttttattttcactacaacaataataatctcgcttttctacctaaatgtgtcgataaggggttggcaactcatcatcttctgcaaaggcttcacgatgagagaggtgtttttcctgttattggcatgggggatagcttaagtgatcatcggtttatgaaatggtgtgactggcttgcgatccctcaacgcagtcaatttgctgacacattaacggcctctttattcggaatgcggaatcctaaataaatgaatagtttttctcctttttctggctcttacgccagcggtgatgttcatttcttactaaagcctgttcagattgaaatgacaccggttgagattaaagaacacttaattcagtctggtgcccgtcattattctgagatgttgagtcaggagccagaaccgacttcttaccaccttgaactgtttgataaagcgctagaaataggagcaaccagactggcaactgaagttgtgatgcttgccaaggctctgatatcacgctttggcgacacacctattgtgctggtgagcttagtcagggcgggagttcctctgggtgtgatgttacatcaggttttacgggatatggggcaaagttcgtatcactatgggatcagtattatacgggatcgtggcattgatgatacggcgctctcgtatatagaacagcagcatgggacggctggtctggtatttgtggatggctggacaggtaaaggtgcgattacagcagaattatcccgttcattagcgggacggccgggttattcaggtattccccgtttggtcgtactggccgatccgtgtggatgttcatggctggcggccagtgatgatgattggttaattccctttgggatcatgggagcaccggtatcagggttaatatcgcgttcaatctggagtgaaaatggattgcatggatgtgtgaaatgtgatcatctgagtgagtttgaatgtagtggaatgctggtcgataccgttgctgaatgccgggatcatctggatttgacggccatacctgcggctgactggcaacctcaggaaaaaatggttttgctgcaattaagtaagaaagttatttccactcttgctgatttatatgaggtcaatagcattaatcgtatcaaaccgggaattgcggaagcaacgcgcgctgtgctgaggcgtgttcctgaacaggtacttgtccgttctaaaaatgatcctgatgttgctttgctggtttatctggcacagcagaaaaatgttgccattacagaagtaggtgatttgattggccaatatcgggcagtcacgattatcaaaaaagtagcataaaaaaggtggtccgatgaaacagaaccctttcgcaaaccagcttggcgcgacactttatataccagcgacccgcccagatattccggaaataatcctgtgtaataaagttgtaggattacgttctttggtgatttgtctggaggactcagtcgtagaagaggatattcccgtcgctatcgaaaacctcgtatctgtattacagatactggctgcggctaagggttcagccgctaatactgatcattatccattgatttttatccgcccacggaatgaatccatgggacgatatctggtcaatactgttgatcttagccttgtcacgggtctggtattgcctaaattcacgcaatcattattacctgaatggtgggatattattgcttcaacgcatcttggcgttatgccgacactggaaactgaagatgtttttgatgtgcagcaaatgaattatttggccgataagctaaaatctcaccctttctgcgagcgggtcatcgcgctacgtgttggtggtaatgatctgatgaatcttatttcgatccgtcgttcgcgtgaactcacgctatatgatggcccaatgggatatgtgataaaaatgctggtggctgtttttggttcacgtggtttttatttaacagcgcccgtttgtgagcatattgataatctggagttacttgagaaagagcttgtattggatattgctcatgggtttgtcgggaaaacagctattcatccacgacaaatagaatacatccataaggcattgatggtgaacaaccatgattatgctgatgccttaaaaatcctgaatacaaagcaggcggtatttaagtttcagggtgcaatgtgtgaaccggctacacactggcgctgggctgtaaatattctggaacgggcgaaatataatggtgtctgttcaggaagtgaaactgaaaattatggagtttttaactagctttaatattgatttaccggcatgagaagctatgctggatgttgtgttatatattaggaagttatcgtattcctgacttggtaattgaaaacgatgttacttagccccaaacaactcagaaattttaaattaactttgctgctttcccatgaaagacctgtcagcaaggtaaaagtgatcgaggcacttagttgttctggtccaacattgactcgtactttaagggaactaagagatcactatcgtgctgatatccggtttagcaaaattggaaatacttaccaactagtagataaggggttattgaccagaaaagaggtgcgcaggattgaagagctgctcactcagcataataactttgaattaaaggaagctaccagccacgttttccttgataaggaaaagaagaaaccggtttccctgtcattgcggatgtctgtcatccgaaaaatagatgggctatccaatcggcttggaacgagcagaagtgagatagttgaaatgttcgtagataggtttatcgacgaattacagaaagaaaccgttaatggtaactcacgaaaaagaacggagtcccttaatgccagcaagtaatattgagctggcattagggcgggtaagatttctttctaatgatgatggcgtgtgagtttatccagatatcccatcacaaatgctgataccacaaaagtgaggtggataatcacataccacattaatttactgtccggcacattccgggcatccataaagacacgcaacagatgaatggatgaaatggcaacaatggaagccgcaactttatttttaagcgaagtggcgtccatttttcctaaccagtttaatttctctttgtgttcttcgatatctaatgttgaaacaaagttctcataaccggagaacatgaccatcactaacaacccgccaaccagagccatatcaatcagagaaagcaaagtcaggatcagctctgattcagcgatagaaaaaatatgtggcaggacgtgaatgatttcctgaaagaattttatagccagtgcaaataaagccagtgataaaccaaaataaacaggtgcaagtagccaacgggaggcatacattgtgttttcaataaatctttccatgttgttctgaatatgttgcaaaaggagctgcattatagatcaagatcgtgtgtgagctaatacatatcaacgaaccctgaattccgactctagtttactgacccctaacccattcatcttttccactttgatctgcacagggatacgctctttcatggcttcaacatggctgataacaccgatagttttcccggttgcattaaggtgatcgagtgcatccagtgcgatatcgagagtttcagaatccagcgtgccaaacccttcatcaagaaacagggattctatctgggttttgttgcttaccagatcagatagtgctaatgccagtgccagactgacaagaaagctttcgccgccggaaagcgttttggtatctcgaatagcgtcggcttgccacatatcaaccacttgtaactcaaggccgacatcatctttattttgtcgtttgcgttgcaggtagtaacggccatgtaatttttctagccgactatttgccagatgcaccaaatgatccagtgtcagaccctgagcaaaacgccggaatttagcaccatccgccgagccgagcaggttattgagatagctccagtcatcataattctgttgtgagagagctatttgatccaacagttcctgctgatgatgtctactgttggcatcactggtgagccggtttttgacttcaccctgctgctggttattttgttttaattcattggcggtattacttaacaactcagctaattgtgatggttcaaactgttccaacagtaacggtgttttttccctgtggtgctgtaacaggatttcagattcgtggcaccgtgttttagcttgcagattctgtttggcaagctgttcctgtagctgttgaaggctttcccgttgttccggtgccagtaaagcctgttcaaaagagggctgatcaggaaacccttgttgttgcagaccttgctggaaggtgtcggatgcctgtttgtatgcggcttcggcaatatggtagcttcgtgttatttcacccgcagcacccgttaattgatttacctgattctgtaactgttgtagatcagcagtggcttgtttacaggcgttatccagttcgctcgctttttgctgcaattcctgacgtacagtgctgacggattgttcgccaaataattgataacgttcctgctgggtttgctgcaatacctgattctgctgttgtagctgttcagccagtatttgttgtttattgattattctgcttttttgtttttccagttcattcagtttgctttgcagggcggcctgttcctgctgcaattgctgccatttttcgcgggatctgtgatagtttttcaattcagtttcacgttgttgtaaccaatttcctacttcctgcggctctggcagtgtaaacggcgtatcgtgcaatgtatcgattaattgccctgttgttgtggcatattctgtttctgcctgatggagttcagccgtattttccttcaattgcctctgatatgactcttgcctgactttttccaatgccgatttttgttcatctaatttgtactgttcacgatgagccgagagtgttttttctgcaatgtggtactgtttttcagcttgagtcagtatttcatattgtttctgagattgggtataggctgactgacgcagggtaataaagtgcctgaccggttcagcttccattggtaattcgggtgcttgtagttgttggcaatggtgctgccattgtgtagtgatttctgtcagctgagatgtgaaacgttctgtggattgctgcaattgttcactctgttgttgctggaattgctgcttttgctgtaaagcagaacgttctccctgtagctgttctattttttggctaagagttttcagccgctcttctgattttggcagggtgatattctgatattcactaatcaaagggtggtaattcgatccacaaagcgggcaggcttctccctcttttagctgattacgctcctgctccagactgataatgcgttgttccagacgaattctggcggttaaatcctgatggtgttgttgtgtttctgtcagttgtatctcaagggtatttaactgctcaggtaaaggtttcaggaatgattggatttgtgcaaattgcgcctgattggttgagatagttgtctgtatttgctcgatctgaggcagaaaaatttccagctggttttgtgaattaagctgtgattggtaatctgataactgtttttgtagttgatcggatgaatattgggtttgtaagctcaacagttttttttctgcaagttcaagtgaatcctgtaatggctggcattgtgctgcctgtttttccagaactgtatttaaactattcagattttcagttgtacgggcaagctcagtagccatttgttgttgtttttgtctgagcttggttatctgctcctgtttttcattctggcgggaaaagagttgctgccatttcggtaactgcctgtcgagagtgcggaaatgcggatgttcttcatcgtatgtctccaacactttctgttctttattcagcgagatgtgctggttttcagccagttgatactgggatgatatttcagctagttcctgattctgcacagtggcttctttttccagcgtgagcagatctttagactgaatatcaatcttatgatcgagtggcgtaacctgctctgagatcaatttctcctgctgtatatgatgctgttgatattcttttttagcctgttccaaattaatctgtttttgttgagcgggttgcagtaaagcaacctgtcgttgcagctcgaattggatttttctgctttgctcatcaaggcgctgttgttcggttaaagcccgattgtatgcatcccacaatggtcggattttttcagccggttcactggcagtcaattgttgtaactggggggaagcatcctgtatcgcctgttcagtctgttgcagtgataacttatggttcattagtgactgttccagctcatgctgccgtacaatccattgctcagtaatttgtaaatcttttagctgctgaccaagctgaatctctgcggcaatcagctgttgctgttgattgcgatactcttccagttgttctgctgttaataattcaattgaagatgcttttgcctgctgaatattcaattcggactgggcttctttatggcgctgataaatctcctgtgacagaattccataaatttctgtaccggtaagttcctccaataaatcagcccgatctttatcatcggcatttaaaaatgcggcaaaatccccctgtgacaggagtatagatttagtaaaccgtttaaaatcaagtccggttatttcagcaatcttttcttttttatcaggaattttgtcagccagaattttgcctgtttttttatctgctaactctcctttcggttgctggagtcttccatcagcctgattacgggcacgccgctggctccagaatgcccgataagcaaccccttttacttcaaattcgacttctgacagacattctgcggtatggcgagtcattaattcgttctgattgtctgaaatagttttcagccggggagtcctgtgatataaggcaaggcagatagcatccagcagcgtagtttttcccgctccggttgggccggtaatggcgaataatccattgctggcaaaaggctctgctgtgaagtcaattttccattcaccctgtagagaattaatatttttcaaccgtaagctaagaattttcattactgcatcctggccgttatttctgattgttatttttgtgtacgttgctgagtaatatcatccagtgtttgcctgaacagagtcgtcaggcgctgtttttgtggctgatcatcaatttccgccattgccagccgtcgttcgaaaacttcggatacgcttaattcagtcagcgtctctttatttttctctgataatgagatttgacgtgcggttttgctgcggcgtaacagaataatttctacaggcaaatccgtagccatagtttggatacgtttctggatgtcatgcagataatcctgcgttgctacttcaatatccagccagacagggcgctctccctgataatcactgaaagtttgtaattgtgcttctatttgttgcagattaccccgaatgagttgcattggctgataattcggaataggtaacagggtaaggcgattgaatttaccttccttaaaatctgccagacagacacttttctcttgcccaacttcatcaaaacttaacggaataggagaaccgctataacggatatgttcagttttattgaccgattgtgggcggtgaatatgtcccagagcaatatagtcagcaggggggaatgcttgtgccgggaaagcatccaatgtgccaatataaatatcccgcacggagtcagttgtagaggctccaactgtggttaaatgcccggttgcgataattggcagagattggccaagttgctcccgtaagctacaagcctgttggtagagctggtggtagtgttcagcgatggcatcctgtaaagcctgttgtttctgtatggctgactggcctgctttactgaatataatatctcgcgggcgtagataaggaatggcgcacagaatggctccagcctgaccatttctgttattcaatactttaatttgctgttgagtatcagtttcagcacaggcaataacagtggtattcagataagagaacagggtttttgattcattgagtgttgcgacggagtcgtggtttcccccaagaatgacaagctggcaaccagtgggttgtaggtccaccacaaatctgttgtacaactcccgggcatagctgggcggagaacctgtatcgaaaacatctccggcaataatcagggcatcaacctgatgttcatttatttgcctgataagccactgtaagaagtgctgatgctctgccgcacggtttttagtaaagaaatattgcccaagatgccagtctgacgtatgaataatccgcatatttttgctctgcttatcttgcctgtgttgctgctctgcgctgtccctgcgcccagcctgccctgttcagatgttaattataatgagtgttctgcggatgtcgtgggtaattataatttcatttacagattttcgagcggcctcgcaacagcaatgaaatagaataattgattgataaattcctcgtaatgttggttacagttttatgattaagatgaaatctatttcataaaactgtaataaaattgactcacaatagttcactgtgaattttgctgacttcaatcatactgacaggattaaccatggttagacgtattttggttgttgaagatgaagccccaattcgtgaaatggtctgttttgttctggagcagaacggatatgagcctgttgaagcagaagattatgacactgccgtagggtgtttatctgagccttatcctgatttagtcctgttggactggatgttacccggtggttcaggaatacaaattatcaaacaaatgaagcgtaataacaccaccaaagatattcctgtcatgatggtaaccgcacggggggaagaggaagatcgagtgcgtgggtttgatgttggtgccgatgattatattaccaaaccattttcccccagagagttaattgcccgcgttaaagctgtattgcgtcgtatctcccctatggcagcagaagatattatcaatatagaaggactgatgctggattctatatcccatcgtgtttccagtccgggacaaagtgttgatatgggaccaaccgaattcaaacttcttcattttttcatgacgcacccggagcgtgtttatagtcgcgagcagttgcttaactatgtgtggggagcgaatgtttatgtagaggatcgcacggtagatgtacatattcgccgcttgcgtaaggcgctggaaatgggtggacacgataaaatggtacagactgttcgtggcacaggcaatcgcttttccactcgttattagtctttctggccgatttttgggacgacctgcataaattcagtttgggaagccaataatgaagcaaattgaaaaacaacaaacctgtactggagagagttaagtgcttgagaaattatcctggaaaaagctggtactggggttatttattttctgtctgcccgcagttattttgtctttctttgtcggccaactggcgtggttgctggttattgcattacttctggcattagtatggcatggctataacttactgaagttatctgactggctctggcttgatcgcagtatgttgcccccggcaggcaggggaggatgggagccggttttctatggtatttatcagttacagcaacgtaatcgcaagcggcgcagggaactggcattattaatcaaacggttccgcagtggtgccgaatcattgccggatgccttggtaatgatgacagtggaagggaatattttttggtgtaaccgtctggctcaacatttattagggtttcgctggccagaagataatcgacagtctattttcaatcttcttcgctaccctgatttcagccgttatatgatagcgggtgattttacttctcccctctctcttgaattaaataatggtcatatcgtggaatttcagttgatgccttactcggaaagccaattactgatgattgcccgtgacatcacgcaaaaaagacggctggaaaactcccgccgtgattttttcgcaaatgccagccatgaactgaaaacgccgttaacagtgctacaaggttatctggaaatgatgcaggatcaggagctcagcgggaaagcaagtcagaaagtagtgagtactatgcaggagcaggtacggaggatggattctctggtcagtcagttactacatctttccagaattgagagtggctcaaaggtagatgtgcacaatatggtcgatgttccggctatgctggctttattagagcaggaagtacagacattggcagataaacagcatgatattgtatttaatgtcgataacactctacatatgcacggaagtgaagagcagctcagaagcgcaatgtcgaatcttatccataacgctattaaccataccgaacaaggaacccgaatagaggttagttggttgagaacagttcatggagcgctgtttaaagttgaggataatggccccgggatcagccctgagcatttaccgcgcctgacagagcgtttctatcgcgttgatcgttcacgttcaagaagtgcgggtggaagcgggttggggctggcgatcgtgaaacatgccttacaccactacaatactcatcttgatattacaagtacggtcgggaaaggttctgtattcagctttttattacctctgcagtttattgcttctgatacaaaaaatgattaaaaaatcataatattaatattactcaacaaccaccgactaaagtcggtgggttagtgattaacggactgaaagtccggatacgcatcggctaaacgatgcgtcaattatccagcctgaagtgatcattcgggttcggttcaaaatgatgcgccagataggcctttatcatctcttccgttaactgacctaccgtcgcacaaaaatagcctctgccccaaaaatgctgaccccagtaacgctttttcaagtgagcaaactcttcaaacaacttacttgctgtccttccctttattcgcctcatgatttctgagggcgctaagctcggaggacaactcaccagtatatgcacatggtctttgctcacgaccccttctactatcctgatttcaaacgcttcacaggtctgacgaactagctctctcacccgtaagccaacttcacctgtgagcactttgtgtctgtattttgttacccacacaaaatgatactcaatctgaaataccgtgtggctgccatatctgtaatccatattgcacctctcgtgcaacacagtatcgcagctaaagctgaccgactaaagtcggtggttttaacctttcatatggaaaaataaattgaatcattaaccttattatttacagcaccggggttttttatttatatccaattgatggaagagaaaataataaagagagatgcaaaatgaaagcatttatgtcgtggttatctgattcgtttgcaccagcgatgcaaaatttcactaaacgaccatgggttgctgctatttctggttccatgcagaaaaacatcccgtttattttagccggttcactgatatttttttataatgtatttcgttcttatcttccctttttacccaatcttggtcgaatagctgaatattcttttggcatgctcggcttaattacagcgtttatgattgccaatcagatgatggaaaaacttcatcattttcggtataccctgattgctggcctgacatctatttgtgtttatatgatgttcattaagccggagttttctgacggtaatatgattgtcagttttgaacgattcggccctgcgggaattttactggggattgtcaccggcctgtttgtttcctatcttttccacttatatacaaaaataggttttctgaaagacagcactctacctgattttgtcactggctggatacacgccattattccgattctgctttctatcggaatcggaacattattagtattcacctttgaaattgatattttctcccgcctgctttacctcttttcacctattgctgcattcggtcagacactgccgggctttatattgatggcattaattccggctattgcattctcaatggggatttccgtctggacatttactggcctgcaaatgcctatttttatgcttggtatcagcaccaatattactttggtggcggcaggtcaggccccgaccaatattgtgacttatgaaaccatgtatacagcggcgttgatcacaatgggtggaaccggtgccactctcgcactgaatcttttaatgctgttttcaaaatccagagatcttaaggcaacaggttatatctgtatcgggccttcgttcttcaatatcaatgagccactggtgtttggtacaccaattgtgctcaatccactgctcatgctgccgatgtggattaatgcgatcaccagcccgatcattatctgggtgtttatgcgctccgactggctgaatatccctgccaaaatgattcaggtcggtcaaatacccgctccgttttccagcgtcatgattactgaagactggcgggcgatcatctgttatttggtactaatggccgtgttcctcgttacctggtatcccttctttaaagtgtatgagaaaaaacgtattgaagaagaaaacctcaatgcagcataagcgactctactacaaggaaaaaaatcatgaatagtgaggaaaatatcttaatcgctatttctatggagattattctcgatgcaggtaatgccagagaaaaaagtgaaaaagcaatgaaattcgctcgtaatggcgattttgaaaatgctcgcatatatatggaaaaagcacgaaagatgatgttgtcagctcatcaaacacaaactgatgttattcagaaagagactcagggctctgatattaatttgagtctgctatttattcatgctcaggatacgttaatgacgatacgcagcgagttactcctgagagaggaaataattgatttatataaacacattaaaaatgtgaacgataataaaggaaaaaatcatcatgacgaaaaataatacgctatttcctgaaacttttctttggggtgcagcaaccagtgcttatcaggttgaaggtgcggcagaaaaatatggtaaaaaattatcccagcaagatattctcaataataaaccagggttagctgattcccatattaccagtgatcattatcatcgctacaaagaagatgttgcattaatgaaagaactgggattaaaagcctatcgtttttctatcgcatggtcgcgtatttttcctgatggcatcgggaaaccgaatgatgaaggcgtacagttttaccataatcttatcgatgaattattagaaaatggtattacaccaattccaacactttatcattatgatatgccaatggctttggtggaaaaatatcatggctggattgacaggcaaagtgtcaatgattttgcctactacgctgaatttgttatcagagaatatggcaagaaagccaaatactggctgacgattaatgaacaaagcattatcgtacaattctggacgaaaaaatgttttatccctgaacagtatctcgataatgaacagattaaatatcagataaatcatcacatgaatctggctcatgccatcgcctgcaaattagtccatcaatgggtgccggaaggtcaggttggtgcagcattgggatattcagccatttatccgctgaccagcaaaccagaagataatctggcggcccagaatgccaatgatctgcgtaattactatttcaccgatatttatttgaaaggggaatataatcaatccgctttgatttacctgaaaaatcaggggctggcacctaatatcgaagacggtgatatggcgttaatcaaagaaggatattctgattttctggctctcaattactattgcagccatgcagcaaccgcagcaccagaaggtgctcagaggcgcatggatggctttaatcctacaggtatcaaagggcaaatggacggttatgagatccagcctgattactatcagatccacaaaaacccacagcttgatactactgattgggattggacgattgatccgcatgggcttgaatatctgctacgcgatttatatacccgttatcaaaagccattaatgatcactgaaaatggctttggtgctgatgatgttctggaatctgatggcactattcatgatagttatcgcattgattatttaaagcagcacctacaggcgattaaacgggcaatggattccggcgttgtcgtactttcctataacccgtggagttttattgatcttctttccaccagcaatggttacaaaaagcggtatggttttgtgtacgtaaaccgcactgatgacgatctcaaagatctcgctcgttataagaaagattcgttttattggtatcagaacgttatccagacacgtggtggttcattaactgaatgacgaagggatagataaagtcatgatcgaatattccgtaatagtaacagccccttcggggctacatacccggccttcggcacaactttgtaatttagctaagacttatagtggcacagtagaaattatcagaggggataaagtcgctaatttaaaaagcatgttcaaaattatgtcgatgggaattaaaaatggcatggaaattattgttcgggtagaaggagaaaacgaagaggaaatggcgaaatctgttgttgaccttattcgtagtattaaagagtaaacttcattttttatttattggaaataaattatggtctcttttgatgaaatggaaagtattgcacaccagcttatttctccgacgcaattaaataaatatattaaatatggtcacgtcgctgcggccattcagtgtgaatccggccatatttataccggagtgagtattgatacttcatgctctatgggattttgtgcagaacatggtgccattgccgatatgataaaacatggagaaaatcggataattaaagttatcgcggttaataaatctggcgatatcattcctccctgtggtcgctgtcgggaatttatcagccagataaatcgggataatatacacaccgaagtgaaagttaataaagaggtggttttaacattggataaattattgccatttgattggaaaaataagtaaaaaaattttatttttaattgatttcagatagaaaaaacctgcccgaatttattattcgggcaggttttattattcatacagaattaattttgtagcgtttatttcgcttctaccgcttccattccgaccagtcccactttgaggtaacccgctttacgcagagagtccatgacactcatcagagtttcataatccacgcttttatccgcctggaagaaaatcgtggtctctttattggactgagttgtctgatccaacactgaagagagcgaatcacgatcaacttgttgatcaccaacaaataactggctgtctgctttaactgtcagaaagaccggtttctccggtcgtggctgtggtttggctgtggatgccggtaaatcaaccttgatatcaacggttgccagtggtgctgccaccataaagatgatcagcagcactaacatgacatcaataaagggtgtgacgttaatctcgtgtaattcaccgctatcgtccaaatcttcattaagacgtattgccataattaattaccttgcttctgctttatcagtttttctgtcagccaaatcaagatcacgaccaagcaacaaaattgcctgtgccgcagtatcaccaacctgcccacggtatgatgaaataacacgggcaaaaatgttatagataacgaccgcaggaattgcagcgaccagacccagcgcggttgccagcagtgcttctgcaatacccggtgcaacaacggcaaggttggtggtttgtgaatgggcaataccaatgaagctgttcatgatcccccagacggttccgaacaggccaacaaacggtgaaattgcaccgatagttgccagataaccgtttccacgccccatgtgacggctgattgcagcaactgcacgctccatacggaatgaggtgcgctcttttgtgccgtctttatcggtactttcggcagataagctgcgctcagtctgtgcttcgctcagtagcagacggctaatgctgttcttagcaaaatccgaggaaatttttactgcctcatccagactggcaacatcagctaaagccagttgttctttacgtaagcggcgacgcgctattaacagttcagatcctttagagaaaaagagtgcccatgtaataatagaggcaatcaccagaccaatcatgacgctttttacgactgcatcagcattctgatacataccaaaaacggaaagatccgtcgcaaaaccgctagacagattttctgtttctgccgccgccgtggtttctactgcaccagcttctgttatttcagtaacttctgtagtaactgttggctgttctgccgtcgctgcctcgtccgttttctgcgcttcaccttgctgcgtctctgttttcacttcactagcctgtggagccacggaagataccggtgttgccggagctgctacctgagtggcagcctgattttctggcgcggtaaccgctgtagttggtgcagtattagctggtgcggtattagctggtgtagtatcagcccatgctgaacctgttaacccgaatgccaatagaatagaagctgtcaaattacgcatcagttagccttactctcttttttatagattctgttacttagcagtgaatcgctactcatcttgctaatcctgatatatctgtcgtctttcaagccgcctttttgttggctgaaactcgaaatcgattaggtatatgttttatcattttttgcccagtttcatgtttttcatcacataagggaaaaagtccgttccaaatgatatcagacattgcgcgatttgatagtaattatcattactatttaataaaaaaagtggtaataaaaaggggttatcccatccgttttttctttttcaccgttctcactcaccttgaatttttgtcaagttgtcagaatccctttgtaaaaaacctgactattcttttaacttgctaatgattatttaaacaatcgcgacaggtcagggggaaagtgatatgtcagaaaaaaaattggaaaccagactggtggaagtcgggagaaagcgtaaatacacacagggagcggttaatcctattatccagcgcacttcatccgtcattttcaagacggttgatgctatgaggcatgcgataaaaaaccgggctaacggtgaactgttttacgggcgccgtggcactctgacgcattttgcttttcaggaagcaatggctgaactggagggtggagtgggctgtgctttgtatccttcgggtactgccgctattaccaacagcattctggcatttgtagaaacaggtgaccatgttctgctaaccggttcagcttatgaaccgactcaggaattttgcaaaaatatccttaaaaagatgcaaatctctactgattattttgatccccggctcggtgaagagattgccttactcattcagccaaacacaaaagtcatctttcttgaatcccccggctctcttactatggaggttcaggatattcccgctattgtacaggcggcccggcgggttaatcccgatatcgttattatgatcgataatacctgggctgcgggtgttcttttcagggcactggattttggtatcgatatttctattcagtccgcgacaaaatatattatcggccattcagatggcatgctcggtacggcggttgccaatcaacgctgttgggatcaattacgggaaagctcttatttgatggggcagattgctgatcctgatactgtttattctgcaaatcgaggattacatactctggctgtccgcttaaagcaacatgaagaaagcagccttatcattgctaaatggctctcccaacgccccgaagtcgctgaggtttatcaccctgcgctaccttcctgtcccggtcataactatttccaacgcgattttaccggttcctgcgggctgttttcttttatgttgaatgtcagcctgactcccggacagctctctgactatctggataatatgcaatattttaaaatggcattttcctggggaggatttgaatcactcattctgggcatttcccctgagtcactggcagtcctacgtaattataattttccccaaaaaacgggaacgttaattcgtgtgcatatcggactggaagaccctcaggatttaatagatgatctgaatgctggcttctcccgcattgcgttgagttaactgtatttatttttatactcttcattttacaggtgcctctttgctggcagctcccccgccgccacaacgcatcctgtaatccatgatgtgtatatgctgaatcaaatcaactatcctgctgtcgttttgcggtacactggaacacatggacttgtatgattaattcgattgtatgacactggttgtacaaaaattgtcataaagatattgtaccgaaattacaggataaatatggaaacgttaagcgggatcgtgcaagcgctttggcagcatgactttaccctactcgccaatcccgatgtcatctggattatttatggtgttatcttcgtcacactggtattggaaaacggtttattgcctgccgcatttctgcccggtgatactcttctgatcctcaccggagctttaattgccaaaggtgtcatggggtttgttccgactgtcatattattgacgattgctgccagtctcgggtgctggctggggtatttacaggggcgctggctgggacatacccgaatgatcaaaaactggctagcccagcttccggcagagcagcgccaacgggcgaatgtcttatttgccaaacacggtttaacggcattgctaattggccgtttcctcgcttttatccgtacacttctacccaccttcgcaggtatttccggtctgaacagcaaacgctttcaattttttaattggttaagcggcttcttatgggtcatcataattgtgagttttggctatgccctgaatcagataccttttgttaaagcgcatcaggatttggtcatgaatattttgatgatcttacctgttattctgttaatcagcggactaggtgcttcgctattgatgtactggcgtcataaaaaagcatcatcacacaaaaacaaatgagcatatcggttattgaccgctgttcccaaaatcacactattttttctagctattaacttatcaacaaaaaaattaaacaatccgagtccactcagacaagcatcatacagccaataatccggcattcagatacatgatcctgcatagagtggactccatcactgcaataaaccaacataactcaataaccgaatgttaagacatggaaaaagtttttgttattcagttagtaaggattgttgttatgcaaaacttcacactacacaccccaaccaaagtcattttcggtaaacaggcccttaacgggctcgtcggtgcaggtgttccacaggactgggcaacccacatgctggcacatcagttgacagcttttcacaatttagatcacgctcagacactggcgattattttgccgcatctcttacaggaaaagcgggatactaaacacgcaaaacttctgcaatatgctgaacgtatctggcatttcacggaaggaactgaagaacagcgcattaatcaggcaatccatgtcactcgtgaattttttgaaagtctcggtgtaaaaactcatttttctgattatcagcttgatggcagttctataccgggaatgatccaaaaactagaacagcagggtttggttgctttaggtgaacaccagaatattacgcttgaagttagcaagcggatttacgaggcgtccatctgatattccaaatctggaggaggtaagaatgggtcagcagacaattattaaactcgttgacggaaatctcatgccgcaattaggaattggagtctggcaggcgagtaatgaacaggttgttaaagccatcgataccgcgctgaatgtgggttatcgctctattgatacagccgcgatttatcacaatgaaacaggcgtcggaaaagcattgcgggaaagttgtatcccacgcgaggaagtttttatcacaactaagctgtggaatgatcgccatcaagatgccaaaaccgcactgcaagagagtctggatagattacagctggaatatattgatctctttctaattcactggccggttccccagcaggataagtatgttgaaacatggaaacaatttattgagttaaaagaatcggggctcgcccgcagtatcggggtatgtaactttcatattgaacatttgcagaaactattttcagaaacaggcattgtgcctgctatcaatcaaatcgaactgcatcccctgatgcaacagaggcaactgcattcatggaatgccacacaccacattattactgaatcctggagtccgttatcccgcggtggtaaaggtgtttttgatcatccattagttgaaagtctggcaattaaatatgataaaacacctgctcagattgttatccgctggcacctcgacagtggcatgattgctattcctaaatcagtaacgccttcccgcattaaagaaaactttgatgtttttgatttcaggctggagaaagaggatctgacaattatggccggattggatattggtaaacgccttggccccaatcccgatacttataatctgacagtcctcaatttaggatgatactcatataaaactaccaaatgatctgccttaatataccaattcaacttcaagatgcgtgttatatctccccgcaacgcggggagatataaggactcacctcatataactagttgtaacttgaagtttatcgagtataaacgacgaaatcgttcctccaatcaggcctgaattctgttttatacagagttcaggctgtttaaatatgctcatatctgatgttaaattatactttggttaatggacacgaatatttcctacggtttgattaaggagtacttatgtggaacatatctccgcaaagaggatatatgcagtatctggcaacgtttatgtcgccgatagaagcgcatattattcggggcagaatgctatcagaaggtatctatgcccaaatactagatgaaggagtggtatggaatacttatatgtgctcccatgcctttggtggtgtgaagctgctggttcattattctgagcatcaacgtgctgaaaaaatactttcgggtatttatgataatcaatatttattagacgaaaaaaatgtagaaattaaagacccggctctaacccaatcaattcctccctcatatgaattaataaacgcggcattagttatattattatttctgatatttggtgttgcattacccttaaaatttaatcactgaatactaatattagataaaaaagcagaatattcctatattctcgcagtgagagtaataattaaaaaactcattaacattataggaaatataaataataaatatatttagtatctatatataaagtgaggtctatctttaccccatcactttagataaagcaaaaatagattgcacagcagaaaaggaaaacaagagtaataaaaggagaaacgtttatttatagtgatactcagaaaacattttcatggtgaaattttataataccggagtaaatgataatgacttacataataatttctttattcatgcttatcccttttttctttttaataaagtaccttttattatcacatcatatttatcacaatgtttcaggaattatactgacaattctggctatttcttttcatatgtatgtttttcgttttgatcacattccgctgctcagttcagccctaccacatcacaccatcattttttacggttcaatagcggcagcactgttacattgtgtaatttattccatttgcgtcaagttgtatcacgataaatagcggtaaggaacagcgctgtttttggcctcattttggtcagcagaccattttggtcgatacagcaccgtttcttttctacccgaaaaactatttttcaaagcactttttatttaaatagtctttatacacaatggatttcaagatgcatcgcggcggcaagagagtgaattcccgggagcatagataaccgtatgtttataaaaacggtgaccggggtgagcgagcgcagccaacaaagaagcaacttgaaagacgaagtgtatatttaaataaagggagttctggcaccaataccagttaacgggcagattcatcttctttattattttcatccggtgatttggttttggcagtcaataaataaggggattgctgccaacggctgggagctagctgtaataaattatgagcaagaataaagccgatcgccagagctagtagcaacatgactctgagcagattagttgtattatccacttgcttggcttctgttgccaatctgtgtgtatccagagtcaggcgcagaaaacctttcggtttatttttccccggtataggaaccacaatttgctgattgaaataactacccgctttttttccatccaaagataaccgctcccgaacagaaaccaactcaccactccgcgcaaccagtgttccgttttcctgataaacactggcatcgagaatacgacttttgttggttaaatagttcaggttatccataattttttgattattgacttccttgctgccattctccatatcagcagacaggctgaatgcaacctgttttgccagtgtctttgccagatcttcaaactgatccatatgggcctgttgttgtgaacggctaaaataggataccccctgcatcagcaagaccaataatgctatacatattaagataattgcggttttgtgcagtcgaaattttagttttgctttactcatagttatcccacctaatgctcgttacattccatgttgccagatgcagtagtgataggatagtttgaaaagcattttttgcctgccctatttattacatggaattacaggagtcgatattcatgtctaacaatctggcctatcgttacttacccgatgaaatccataaatggccgggattaccactatctctcagtggagatgaagtcatgccactggattaccgagctggggacagaggctggctgttgtatggccgcaatctggataaacagcggatcagtgattttcagcatcgtctgggagtggctattgttgttgtttcctcatggcgcattgatgattatcaggttgttcgtatcgccggcggcttgtcgccgcgtatcaaacgactggcggatgaatgttgtctggatgttgttccgttgggacagatcccccgtttgcgttcacccggtttattagtcatggatatggattcaacggccattcagattgagtgtattgatgaaattgcacgactggctggtgtaggtgataaagttgctgaaattacagagcgggccatgcagggagagttagatttctcagaaagcctgcatcaacgggttgcccaactggctggtgctgatgcggcaatattgcagcaagtcatggatactctgcctcttacatccggtttaaccagccttgtccgtaaactgcaatccctcgactggcatgtcgccattgcctccggcggctttactttcttcgctgatactctgcgccagcaactacgtctttttgcctccgttgccaaccaacttgaaataaaggacggcaaattaaccggcaaaatcaaagggccaatcgttgatgcgaaatacaaagccaccacattaatacggctggcaaaagagctggatatcccccttagccagactgtcgccatcggggatggtgccaacgatttaaaaatgatccgcaaggcaggtctgggcattgcctatcatgcaaaaccaaaagtgtacacgcacgctaaagtaggtattcgccatgcggatttaatgggcgtcttgtgtgttctgagcggtggcctgaaacacgaagaacgttaaaactgttttagtagaagtatagggagaatagagtggcaaaagcagcaaaacgggcatttgtctgtaacgaatgtggggcagattatccccgctggcaggggcagtgtactgcatgtcaggcatggaataccatcacggaaatccgtttagccgcggcatcctctccccgcaatgaacgtttcagcggttatgcaggggataccggagtcagtaaagtacaaaaactttctgaaatcagtctggaagaattgccccgattttctaccggatttaaagagtttgatcgtgtattgggaggaggcgtcgttcccggtagcgctattttgatcggtggtaatccgggagcggggaaaagtaccctgttactgcaaaccatgtgtctgctatctgagcaaatgaaaaccttatatgtcaccggtgaggaatcgttacagcaggttgcaatgagagcacaccggctaggcttgccgacagataaactgaacatgctgtcagaaacaagtattgagcagatttgtctgattgccgagcaagagcagcctaagctgatggttattgactccattcaggttatgcatatggccgatattcagtcttctcccggcagtgtagcacaggtcagagagacagcagcttatctgacccgatttgccaagacccggggagttgccatcattatggtcggccatgtgactaaagatggctctctggcaggcccgaaagtactggaacactgtattgactgttcagtaatgctcgatggtgaagccgattcccgtttccgtactctccgcagccataaaaaccgtttcggtgcagttaatgagctgggtgtattcgctatgactgaacaggggctacgggaagtcaataacccttctgctatctttttaagtcgtggcgatgaaattacttccggcagttctgtcatgattgtctgggagggtactcgtcccctgctggtggaaattcaggcactggtcgatcactctatgatgcctaatccacgccgggtagctgtggggcttgagcagaaccggctggccattctgctggcaatattgcacaaacatggtggtttgcaaatggcggatcaggatgtctttgttaacgtcgtgggtggtgtgaaagtgacagaaaccagcgccgaccttgctttactactctctttagtttccagtttccgtgaccgccctctgccccgtgatttggttgtctttggtgaagtcgggctggcaggagaaatccgccctgttcccagcggtcaggaacgtatttcagaagcggctaagcatggctttaaacgagcaattgtgccctatgccaatatgtccaaaaaatcattacctgacatgaaagtattcggcgttaaaaaattgtcagatgctttgtctgtgcttgatgatctggatgattaatatacacctcgtctttcaagttgcctctttgttggctgcactcgttcaccccagtcacatagttatctatgttcctggggattctctcctttgccgccgcgacgcaccttgaaatccattgtgtatagcccgataaaaggccagttttgtttttacctttccctgttggcatgctatgttgtttagtatactaaacaacatagggggttatatggggcagtttgactatttaaaagaggcaattaaacaggcaaatcacactttacaacaagttgctgatgcaagtggcatgacgaaaggctatttaagccagctcattaacggcaagataaaaagcccgagtgcacagaaattagcatctcttcatcaacatttaggattggcgtaccctatggaaaagaaaactatcggtgttgtgtttggtaaattttacccgttacatactgggcatatctatttgatccagcgagcatccagccaggtcgatgaattgcacgtttttctctgctacgatgaattacgggatcgagagttgtttatcaacagttccatgtctcagcaacctaccgtcagtgatcgcctgagatggctgttacaaacattcaaatatcagaaaaatattcacatccactcttttgatgaacaaggtatcgaaccctacccaaacggctgggaaaaatggagtcagagcgcaaaacaatttatgtctgcaaaaggcattaatcctcagtatatctattccagcgaagcacaagacgttcctctctataaagagcattttggcattgaaaccattcttgtcgatccacaacgttcatttatgaatatcagcggcagccagatacggcaggcgcctttccgctattgggaatatattccaacagaagtaaaacctttcttcgtacgtacggttgccattctcggaggcgaatccagcgggaaatccacactggtcaataaactggcaaatatgtttaacacaaccagtgcgtgggaatatgggcgcgagtatgtattttcccatttagggggagatgagatggcgctgcaatactctgattacgataaaatagctttaggtcacgctcaatatattgatttttgtgtaaaatacgcaaacaaagttgcttttattgatactgattttgtcacaacacaggcattttgtaagcgctatgaagggaaagagcaccccttcgttcaggcactgattgatgaatatcgatttgacttggtcatcctgttagaaaataacaccccctgggtcgctgacgggttaagaagcctgggaagtgagcaggatcgtaaagcgtttcagcaattgcttgaaagtatgttgaagaaaaataatattgattatgtatgtgttaactcacccgattatgatcaacgttttcttcaatgtgtagaactggttcaggaaatgttagcttattaacaattattcatattctccaaaataaatttcaagttgcagcaaccgaaaataaacaattataccgggcggcaacttgaaagattaaagtatatatactagtagcctaaattgttattagcgtaatgattaattaaaatgatttattttctatagcaatttttgttattttatgttttattctcgattgtactctaattaaatgtttcgtttagttatttttacaatagtaacaaaatagattctgttaataatattttttgatgcttaggtttctccgtttaggcttgaattgtcaggagataagtcatttaatggacggacctgttgatttatctatataaaattcttttattatcaatgataaccacacattttacatgtgatttttattaaaggatggaggtgatgtaacaaaaacattatattttttatatgagtaaaatgacttttttccttattataaaattggaataaaaacagaataatttataccttttttatgtatgttgtctttttcttagtaacgacgaaaatcattaacattttactctaagactaagaaatatctcatttatcatataataattgtaaataataattgacataagtttatgtatattattatcgagatatttcacaaatgaactatttgaattcatattatgtcttattgatattaataatactgtaaatagatttagataacatatttaaggaaaaagctttaactttttaacctaattgtgttgagaatatgaacttaaatcaatttaaatcgattgaagttatcaatatttcatatggtttaactggtaatacagttaattatgaaatgatttcagacatcacattttctattataccaggtgaaattactttgataacagggccgaaagcatccacaaacagcacattgctatcgattgcttcgggtatgttacaaccagatcaaggagatgtattcattaataataacaagctaaaactaatgagtgattccgagttaggtcagtttcattcacaaagtagtgggttcattttccagagttttaatttatccagtgaacttacgctgttagataacttgttattgtctaattcttacggattatccctttcccgggagctggcagtaaaaattgcacagaagtcgttagatattgtgaaattaggtgataagagccgttactatccaggtgagctttctgaaaatgaaagacagcgagcagctatggcaaaagccatcgtgaaaagacctgaatacttgtttgccgatgaaccgactcgtcacctgaaccatcaggaattaaagatgtttattgatatctttaaatttatcgctcatgagcagaaaggcaccgtcgttatcgcctctcaggataagcgcctgattcaatatgctgacagcatgattactctggaaagcggtaaaattgttaagacatatgagtcctttcaggaacgaagagtgatggtatcctgattgttatttccttaaaaaaaacggcctgatatcaggccgttttctatttcactgaaatcagttttacttactgatttttttatacttaatacggtgcggttccagtgcttcagcacccagagtacgcttcttgtaatcttcgtattcgctaaagtttccttcaaagaaagtcactttaccttcatcctgataatcgataatgtgcgttgcaatgcggtcaaggaaccagcggtcatgggaaataaccatcgcacagccagggaattccagcagggcattttccagtgcacgcagtgtttcgatatccagatcattggttggttcatccagcagcaacatgttgccaccaacctgtagaagttttgccagatgcagacggccacgctcaccaccggataattcacccacgcgcttgccctgatccacacccttaaagttaaagcggccaacataggcgcggcttgggatctcaaagttaccaatgcgcataatatcctgcccaccagaaacttcttcccataccgttttcttatcatccatggcatcgcggaactggtcaacagaggccagtgttactgtttcacccagcgcgattgaaccggaatcaggctgttcctgacctgacaacatacggaacagagttgatttaccggcaccattcggaccaataatcccgacaattgcgccttttggcagagaaaaactcaggtcatcgatcagaacacgatcaccataagatttggtcaggttgctgacttccagtactttgtctcccagacgtgggcctggtggaataaacaactcactggtttcattacgcttttgatactcaacattgttaagttcttcaaagcgggccaaacgagccttacctttagcctgacgcccttttggattctgacgaacccattccagttctttctcaatggatttacggcgagccgcttctgaagcagcttcctgcgccagacgagcatctttttgctccagccatgaagagtagttaccttcccacggaataccttcaccacggtcaagttccaaaatccagccagccacattatcgaggaaataacggtcatgggtaattgcaacgacggtgccttcataatcgtgcaggaagcgttccagccacgccacagattctgcatcaaggtggttggttggttcatccagcagcagcatgtctggtttttccagcagcaggcgacaaattgccacacggcgacgttccccccctgacaggtgctcaattttagcatcccatgcaggtaaacgcagagcatctgccgctctctcaagctgattatccagattatgaccatcgtgagactgaataatcgcttccagttcaccctgctcttttgccagcttgtcaaaatctgcatcaggatcagcatatgcagcatacacttcatcaagacgtgtcagcgcatgtttaacttcgccaacggcttcttctaccgcttcgcgaacagtgtgctcaagattaagtttaggctcctgtggcaaatagccgattttaatcccaggctgtgggcgagcttccccctcaatatctttatcaatgcccgccatgatacgcagtaaggtcgatttaccggcaccattcagaccaagaacaccgatttttgctccggggaaaaaactaagagagatatttttcagaatatgccttttcgggggaacaatttttccaacccggtgcatactgtaaacatattgagccaaagtaatgtacctttttgataattaaggaaataataatattcattgacgtttaaggggcttggatggcgtattctaccctaaattaatgccgtcgtgttgctacctgtttagcattcttttcacacgatcaaacggaggtgaggtaatgatctttatcttccgggctacctctttgttggtttcgtgtcggcttccctcacttataccagcctgcgtttttatcaatagatgtttatctattcatccagagattaatgggaagttcctacccctcagcggaaatcagctctttgactgagtaaattcgtttccgacgaatttgccatttccttgccgctgcgatgtctcttgaaattctctgggaattaagaatgctgaaatgcagcttttctattttatcatctgattgaaataattaacgtattgtatgaatcaaataaattaataaccgattatggcaataatatttaagtcatatcttttttcttacctaaacttgcaatcaaaccactaatttttacattcattagtatgataaaacacttcaatattattataattaaaacaattaatgtattgttcgttgccgtcaattttctggaggagtatgtgactataaataagtggcagcattttatcatggctgtcagtctggcttctgttgttggtatcgcacaggctgattctctggaagcccagcgtgagcggtatcaggcaataaaactcgcatgggatgcgaaaaacatgcaagaagttgaacggttgatgcccacactgaagcattatcccctgtatccttaccttgagtatcggcaattagttcataacctaaaaatgacatctcctcagcaggtacgccattttattgacactcacccaaccctgccaccggctaattccctgtcatcccgatatatcaatttactggcgagtgacggaaactggcatagccttctggcattcagcccccataaaccaaataccgtagcagcaagctgcaattactattttgcgaactgggtaaccggaaagcacaagacggcgtgggaaggtgcgagagaaatttggttacgagggagttcgttacccgatgattgtgatagtttactgaacgtctgggagcgttccggctatttatccgtaaatttaatattgcaacgtatcgaactcgccgtaaacgagaataacacgacacttgccaattatcttattaatcgcctgcccttcgactaccatagcttaaaggctcatttacaaaaactgcaaagtgatcccacatctgttgaacattttgccagaacggtaaagccaacgaattttacccgcttctttgttactaatgcattttcccattttgcccgtaaaaacacagaaaaagcccggctcagtattccttccatcgcccgggcacaaaaaatgaatgaaacagaaaggcagaaattaaaagatatcgtggcctggcaattaatgggagagattacaccggaacaggaaaaatggcgggataacgcaattcgtgcatcacattccagcacattaatcgaacgtcgtgcccgtctggcactcaggaatgctgatgaaaaaggattagctgaatggttaagtcttttacctaaaaatgtcctgcaaaaagatgaatggcaatactggagcgccatcaccttgttgaatacaggaaagaaaaaagaaggagacttaatactacgtaagctgatggaacaccgtggtttctaccctatggtagcagcacagaaattacatctgccctatcctctggttatcaataaatcagaaagacctgacgcctccattgctaagttgccacagattaaacggatacgtgaattaatgtattggcatatggatgatctggcacgttcagaatggatcaacctcgtttcagcacaaaacagcacaaagaaagagcagctggcccgctatgcttttgaacagaactggcctaccctcagtgtgcaggctaccattgtcggcaaaatgtgggatcatcttgaagagcgttttcctctggcatggcaaaatgaatttgcacatttcacttcagataaaagtatttcacaaagttatgccatggctattgcacgacaggaaagtgcgtgggatccacaggctcgctcaccaaaaggggcaagcggattgatgcaactcatgccagcaacagcggaacataccgcaaagagtaaaaaaattgatggctacgccagcagtaaccaattgatgaacccgaccatgaatatcaaaattggcactgcatatctggaatcggtgtaccagaatttcggcaataaccgcatactcgccagtgctgcttataatgcaggccccagaaatgttgagcgctggctggccaatagtgcgggaaacatcaatgccatcgcattcatcgaaagtattccatttgctgaaacaagagcctacgtcaaaaatgttctggcttatgacatgttttaccataattttatgggaaatttagttaatgtcttaaccgactcagaatggcaaagacgttactaatttcagatacaattatggtattattttgtactagttaaatagtatggctaaaaattatgacacaaaatcatttgattgaccctgcactttccccagaagagggtgatgactggtttgcttttgtagaattattacaaacagcattcgaacaaaatttgcaacatcagattttgcagttattattgacacccgatgagcgtacagcactatcaaccagagttcggattattcaagaattaatgcgagggcaaatgagccagcgcgagctgaaaaacgaacttagtgttgggattgcaacaatcacgcgtggttcaaatagcctgaaatcagcgccagctcacgtcaaagaatggctggaaacacaattattgaagtaaatctattgtgataataatcggttagaaaagatcatttcgatattattatacacaatggattttaaggtgcgtcgcggcggcaagggagagagtccccaggagcataactaactatgtgactggggtgaacgagcgcagccaacaaagaagcaacgtgaaagacgaagtgtatcaatattattagatacagaggccataacatcatggccttctgtgactggatcattaaagttggttattcaatatctttgtaaatttcatgatgaataggaacgagagccagtatcaatgcctgatgataaacactagtgcgagtcaggataccattggtaaaaaagccaattgccccacctttctgtttgatattatcaacaccggtcaaataagccattttgtgaccaagctcacgcccttcacgaatgctttccaataccttttcaggcagcatcagactggcagagcgcgattcacccgaaatttgtttatattcaataaccatccaggcaaatgtcatgtcatcttcgattccggcttcaacaccgacccaaaaatcggcttccggccgaacctgacgagcagccataacccgatggcgggcaccggtacgagtttcagtattaccaattggctgttgaggaacactgctatctacatcgacatcttctatacgatatgttcctgctccaaaaacatcatcaaatgcaaggctaatcgcttttattttcgcagggttagtggttgcagcaataacatggtacataataaataagtaatcctttgaactatttcatgatgcagtataacggaaaataaatatgttacaggtatatcttgttcgtcatggcgaaacagaatggaacttggctcgtcgtattcagggacaatctgacagcccattaactgaaaccggacgacgtcaggcactcttggtagcacaaaaagtaaaatcagagaacatcacacatgttatcactagtgacctcggtcgcacacgccaaaccgcagaaattatcgcacaagcttgcggttgtgaagtgatattagagcctcgtttacgggaaataaacatgggtgttcttgaaaaccgtgatctgaattccctgacccaagaagaagaaacatggcgtaaaagtctcgttgatggcacaccaaatggtcggataccagaaggcgaatccatgagtgagttatccgaacgggtgcgtgccgcgctggaaagttgccgtgatctgccagccggaagccgccctttactagtaagccacgggatggcattagtcagtctggtctgttcaattttaggattaccggccaactccgaacgccgcttacggctgagaaactgttctatctcaagagtcgattatcaggatagcccgtggctggctcctggatggatcgttgaaacagcgggcgatatcacacatctggatatgcccgcgctagatgagctgcaaggttagcgctgaatcgggatgagatattcaaattccacaacgtggctttgagactcatcctgtaattttttcctttcaagattagtgagatagtatcgctcaacatcatacccttttctgcgggtaatatttaattgaggtaaacagacagtgtagatattagaaagaaactcatcgagctgatcttctttaccaaaataactgaatgaaatgtactccccacccggtaaaacaaccggctggctatccttggtgtcaaaggtcgcatactccggctctatggccgtggtatagaaaactgtctgctcatcttcatgctccgcgctgacggtggagtgatgcaggccatacaatttaggcggcaagacttccgcgtgttgcaaataggcaatccagtaattgtggcgcatttccgtacaggcttttgaccattgctccagagtgtaagaacagctgtgctcaatacccgtcagcaactgatcttccaaaatcacaaacttatgttcaggtaacggtttgttatccaacataataggagcacaaagaccgctagcacaccactcttcacttcggcggtaggaagctggcgtccgattaaactgttttttgaatgctctggtaaaggtttgttgagaatcaaaacgatattgcagagcaatgtccagaatgggacgaccagtcaaacgcagcgcaacagcagctttagacagccgtctggcgcggatataagaaccaatcgcttgtcctgtaacatccttaaacatgcgctgtaagtgccacttggaataacctgctttcgctgcaacatgatcgagggacagcggacgatccagattattatccagccaatgcaacaaatctcgaatgatgttggtttgatccatacatctccctaattcatcaagacaaaaagaaaaccatacaactgtaagataactgactgttataaaaaaatttaaggatgaaaatgctatatagattaattaataatgagtacctatcatttccaaacacaaagatgattttaattgcctgatttttcacttcatcaggcataccgtcgttttcacaacacagtccttttccctgtcatgacagcaatacctattgtggctatccaaacaaacgttactttattgctactcctaaattgctactcctaagaagcagcattttctcttgcgtgataagacaaagcaccatgacataatcacaacggataaagatcagacactaaattaaacaaggaaaatcttggaataaactaatggtaaatctgatcatttgcaagctcagctttaggatcctttacaacaaatgaaaagatcaatcattagataatcgtctcctacctgtttatattagtagatgaaaaccatctgaccttcaattccagcggctttcgataaagaaagaattttcacgcagtatttagaaaattatgggaatcgtgaaggccagtttaaagcccttttgtttactcattttgcatgtatatttagctataatgccatgtttttctttatagatacataaactaatcaaatgacgttacaaaaatcattaattcgcattatatgctaatactggatattttcactgcatttatttaattcaagtggactaaatatggtaacaattaagaaaatagtgattgctgttgtcctgctgtgttctccaacgatcctgcacgccgaagagataggttctgttgatactgtgttcaaattttttggcccggataacaaaatagtcattgaagcttttgatgatcctgatgttaaaaatgtgacctgctatttaagcagagcgaagacaggaggtatcaaaggaggcttgggattagcggaagatacttctgatgccgcaatctcctgtcaacaggttggcccgatcgaagtagcagaaaagatccttaaatcgccgaaaaaagggcaggttgttttccagaaaagaacatcgctggtatttaaaaagcttcaggttgttcgctttttcgatccaaaacgtaattctctgatctacctaacttattccgataaagttattgatggctcaccaaaaaatgccatcagtgctgtaccgattatgccgtggaaagagtaaggtaatataagcaataaaattaaaagccctgatgccattaggtattcagggcttttaaaaagataaggtatttttacaaatacgatattttttagaataaatcagtggcaggtgtggtatcgattagtcttctaaatcgccacagaaacggtaaccttcaccatgaatggtagcgatgatttccggagtatccggtgtagattcaaaatgtttacggatccggcggatagtcacatcgacagtacggtcatgtggcttcagctcacgcccggtcatttttttcaacagttctgcacgagtctgaattttccccggattctcgcagaaatggagcatcgcacggaattcactacgtggcagtttataatgatctcccatcgggctgaccagagaacggctgttgatatccagctcccagccattgaacctgtagctttcaacctgacgacgttcttcacctacatggctcagattcatcgtacgggaaagcaggttacgtgcccgaatggttaactcccgtgggttgaaaggcttagtgatgtagtcatcagcaccaatttcaagcccaagtatcttatccacctcattatcacgcccagttaaaaacatcagggcaacattcgcctgttcacgtaattcacgagcaagaagtaacccgtttttgcctggcagattgatatccataatcactaagttgatatcgttatctgacaaaatattgtgcatttctgagccatcagtggcttcataaacaacatacccttcagcttcaaaaatgcttttcagggtattgcgtgtgacaatttcgtcttcaacaatcaaaatgtgcggggtttgcatagttgctacctaaaatcgctaaaaaaatagaacctatatgacataagccgttattattaatagaaaatatcctgttctcgttctgaatcacagaaaacccggctcatgtctaaaaaataaaagttgttgatatgttttacgctaaaagcacctgttacttttctctgagggtacatacctaaaaaaacccaatcagaacaggagctatattagtctattaacagcaatataacagctagtaatgcatttgccctctaaaaaaaccaacttttgttgatacatatcaaaatcaattgtagcacgttaacattatttgtaattgttaattttaaattaacagtattgttatatttttggtgtttttatgttaattaaaagtggcgttaactccaacctctaaagagatcacacaacactcaaatgttaaaatcagcgtgttttatcataaagacgaaataattacaaaatatgttttttataaaattaaatgctggtaaaaatatttgaagccggataatgaccaaatcagttaaagatactttgaacgattacaacacagaaaatggtgtttttttccgctgtaattataaaaattatttgac

SEQ ID NO: 286 - DNA, 28660 bp, Xenorhabdus sp.
  CDS (11949)..(12533)
tgctcgagccatgtgctctaaaggcgtcaggctgcgcctgaccacccccctaaaggcgtcgctttgcgaccctttcgaagatgtgagaaagattagtgttcgctaaagctcacctaacctttctcacatcaactcaagggggcttcaggcttcgcctttgcccgcctaaagggtggtggtcaggtgacgcctcaaaaacacgaggctcaccctgacgcccgcccgtgcggtcgtgataactggcgttgccagctttattatttccctgaacggtcaataataaagaacaccgataaaaaagcctttggaggcttttctatctttatcgattgccggggcaatcaataatgttttatcactgctttaaaacctttacccgaaaaaatctaaggattttttcttgttatacggagttcttacgatggctgtgagtaataaaattttatcgatggaaaagcgaaaaaaagttgttttgctactggctaaatttggcttttcaactaaaaaattaatcagtagttatctgggggttaattaccattctcaatcaaggttttttaataatcttatcatcgataatatggttgttgaaaatagcaaagctggttttttgtctaaaataattacattaacaaatgatggctttgaacttgcaaagtattgcgagccagattctaagttcacttttaggaaaaagctatcctttcctaatattgtccatgctttaactattcaaaaatttatgatagataatttagataaattttcgtcttataaatcagagtctgaattaagtgtattgcaattcaatagaagacctgatctaatggttcatactaacgataatatcataatggctatcgaagttgagctaaaccagaaaggagaatcacaaatagaatataatttcttacaacattatagagattggaaacagaaaagatttaatatggtttgttatgtttttgatgatgaaagaataatgaataaatatatttcaatttataaaaaagatgtttggggaacttacgattttttttcaggtaaacttaaaaagattagtgagtttgatccggcggaagtccagcaaaataatttgattagctttatggttattgattcttttaaattctagataggtgaataatggacgttagaaaatatgtatttggtgaggttgaggtatttaatcaattagacgcttgcgcttgggatcaagtgcatgatgaaatgattcctattattggactttataaagatgattcagtaacagatattttaataaatagatatgatgaaatatgggtgtataaaaatggtaagcctgaaaaatcaaattgtaattttaattctgaaagttctttgaattcttgggttagccaaatagctacagtgctaaaacaaccttacggtaaaaattcatcttataaagctggtgatataatagagcctattttagatgccaggtttcctgatggttccagaataatggctacttcccctttgatatctcctcaaggtactacagtatcgttaagaaaagcccctaaagtatttttagataaaaatgattttctatccggtggaatgttcaatgaggaaatatttgattaccttgtaaatatgataaaagaaagaaagtcatttttagttgctgggaatacgggatcgggtaaaacttcattgcttaggtttttggcatcttatattgatcgaaatgaaaggatgataacagcagaggatacacaagaattacatatcaatagatactttcctttagggatagcgttagaatctccacatcgtaatgatattaatagcagtttgccacaattagtaaatacaactcttagggcgcagcctgatcgggtgtgggtaggggaaattaggacaggggaagctattgtagcattttacttagtatgtgttagcggaacaacaggaaacgcggcaacaatccattcaagtacacctataggagcattaaataaaatgcaatggcttatttcaagccaactcaatattgattttgcaacggcgggaaatttagttaaaagtgaaataaatgttgttattcaatgtcgcagagatcataaaattggccgaaagattactgatattgttgaaataattaacggagaacctaaaacaatattttcatattcagccaataaagggaagtttataaaatattagtttttcttatgtatttttttgcgttttttaggcttttttgtgtgtttatttatgtatttatgaaataattccttatctttactagatttagctttttctaaacattgcgtaaaaaatacctcttcaaatgtaatgcctaaaatttgcgctattttttcacactcgtcggcggttgctctaataccgccgtatttgaaatcgttaactctgtgtctatgtgagcctaaatactccccaatctttactaaagtatctagctctgtcgtgtctaaaatacgctgtatgtaattgttataaaaaagtgactgcaaagtcttccccttcgtgttgacttaaagtagaatgtaatgaaattcattacaaatcaaagtgagcataaataaaaaaaacacgtataaactcccttaaaatacactatttggggcattttaaaagatggtgaaccgtgataattcactacggaacgcaaaagttttttataaacatagattaaaatttggtataccatcagaagtatttatcattcttctgtttataaacatttttgctgtgattttggctattaagttttttagtatcatttctctattgtcattggctatttttttacttatttcttttgtgcctatgaaattcttatttaaagaagatccgcaagcacatagagcgtggattaatggctatttttctaattcttttgtgtataacaggggctataagaagcgtaatgtttcttttttttaatctctaaggaaaaatatagatgaaatcaacaatatgtaaaattttcaaaaaagctaaatattatgccggacttgctttaatggctcctgcgtggctagctgttgctgctgatgggactatcaagctacctcaatcggatgagggttttttaaataaaattacaaaatggttgcaagatataattaacttcgttggtgggcctggggctttgtttatcgcatttatggcggggtgtcttgctattgcattatggactcttgcccctaaagccagtgctgcgctggggtttattatgagggcttgtgttggggctattgggatctttaatcttgggttattggttgcttggttgcaagcctaaatgatagggatataaaaatgggattggcaaaagagtttaatgaaaattttaacttagctgggatcgaacctaacaatgatactatttttacgtacaatggtaatgctgtaggggcaatcgaattagtgggctgtgatccaacgggattaactgaaagccgtaaaaaattaatttcacatttgctaggtagcattattcgtcttttgccaatagaagcgattataactcagtattatatccatgctgaaaatgccaaaataaagttaaaaccgcgtagctctgaacgtagtgataaattgagtaaaaatcgtcaggcttttttgaacaatgttagaaagctgaatagctctcgcttagtgtggtttattgagataaaaccgtcctatgagttaggaaaaattttttctgcttcttttttaaggaatttatttaatagtctctttgataaagaggctttgtataaggtaaagaaaacgatatctaattttgacggaattttgttagataaagacgagttttcaagacaatgcgatttactgaaagatacgttatcaacacttaatgcaagattagcatttatgtctgatggtaataatatactgtcacacaatgaaacttttaaactacataaattttttgccacctttaattttgactacctaactgataattttgaatatacccctgctgatgaatgggattcatatactattgatagtgataaattggagattgtgaactataaaggaatcgatcttcttaaaatcagtggtgttaaacctatctatgttagattagccagtattataaaaataggggatgaatttacgccgttatgtgcatttgcatcgggggatgataaacctgttttagctcaaggtaattatgttatttatgggcgttataatccattgacaggctttaagcgttcgatgatgttgactaataaatctaatgaactagcacgttctcaggtgaaaataacggatctattaacagataatactggagcaatacaacaagaaaaagcattaaataacaataaaatgttaagagaaatgcaagaggagttagatcatattaattattctgatgaacggcttgcaatatgtcaatatggggtagcggtatatcatactgataaagatgaactactgaaaacttgcaatgatttgaatagacgtttaacaatgagtatgcaagttgtgtgggagtctgtagcattacttagtgcttattatatgttacaaccttgttacccaacaaacaattatcgctcaatatctcttaacaacatgcaatatggggcggcatcgttattttttaaatctcacactggcgtaaaagaatgggcgtcaggtttaaatgaaacagaagaagcattttatatatttgaatcagaagatcgggtgccttttttctactctccaaaagtgaaagaaaaactattaactattggatgtggagctacacggtcaggaaaaacttttctgaaaaactgtgtggcttcacattttgccaaatttgagggtatatatagttgtatagatgtagatgaaggctccataccgatggctaatttcttcggtgagatcgcatcagcttttactttaagtaaagaagataaaaaaggctttaatttattttctactgctcagaataaagatgatagagtatttatcaatcatgttataaatcaaatgaaagcaatgtgttctctaaatgacgagaataataattcttttacaccagaagaaatagaattaataacgaataatataagaaatttactagaaatgaagttttcagagaactcttcctatctaagtacgccgtcattatctgcacttgtagctaaatgtggtgattccattagaagaaagatatctcaatttgttgatgatggtgttaattctcatttatttgactgtaaagaagatgccataggggtaattaataagcctgtagctgtctataatttgtcattagttaaagataatgagagtttggctaagttggtgcatggtgaaatattttttagagtagttaggttatttgaatcagatcaatacagaacaacgcctaaaattttagaaatagatgaagctcaatatactctatctgttgagggaacggctcaatttgctatagctaaagctaggacgtggtttaaacacggcggaggtatgtcattttggactcaaagccctgagcactactcaaatttgccggagtggtcaacattaagaagttccgctagtgtttttctgtttgctgctgatgcagaaggagtcgtttctaaatatgtagatgcctttgaaatgcccgaagaggaagtaggaataattaaggatttaaaaagaaatcagcaaatttatataaaaatacctgagctgaatatttcaaaagtcgttaatttatttgtagaagcagagcaatacgcgatttgtacctcagaagcctatgaagcatcagaagctaaaaaagaatggcagaaaatgcaatcaggtgaatgtaacgcagatcaggcaattttaaacattgtaaaaagaataaataaattaccccctactattttagagacagaagaagaactgaaagaggtagaatattatgcgtaatttattgataaaatgcttaatagtatcttttctgaatgctggtcatatggcatatgctgctggtattcctgtaggtgatgctactaatgctttgcatcaactagcaaaacttactcaggatctgaaaaattacgatgaatatataacgcaaactcttcttagtaaagaagaacttgctaatgcacttagacagtatgatcagatgttagctgattataatcaaattcttaccgatgcaagagcattaaaagacagcattgagggcatgagtcctgaagaatggctgaatgaattagctagggctgctaatagacacgatccgctctatggttcaacggctattcgtactaataccggttatagaccctgggatgatgcagtagaaagaaataggttgttaaatggctatggtatgactgatgaggaatacgcaagtatgttagctgatattccttttagcggggatgatagaaacagagcacaacaagtttttgaataccgacaaagaaaagttgcagagggaataactagagatgcttatgttatttcgttacagggaaatttagcggaacaggctaaaaaacttacacaaatggatagaagaaggcttgaaaaccaagtagataacaatacaacggcatctatccaatttcttgcagaacaaaaccaacagttattatatcagtttcacactatgcaaacgcaacaagctgaatctatgaaatttagcgatagattggcagaccattattttaataatatggctaaagcagaagaaagaagaacaaagcaacaactggagaaaatcaaaaaatgaataaaaaaattatcttgtcttttattttaatggcgttttcttccgcatctatagctaattatgttgatgtggaagaaaaaaaagaagcagagaaaagatctgtattaagaacaacattactaaaagagtgccaaagtaaaaaaatcattgctaatggtaacaaaatagcttgctcacaatatgctgatgaacagtcattagaaaaaataccgttggttagagggggggaggattatatggaaaaacattactctaatcttactaaagaacaagcactatcagaattaaaaaaattggtagagttggaaaagcaagtaaaaaaagatgaatctaatattcagtactggaatggaaagttatatacatatcaattggattctgaggctaattttattttgaaaaaatattttcagggtttaacagctaatcaaggtatggtttcagcaaaacagattgtcgccagaaaaggaaacagtatttaatagattttattggtttttaatcttaattaatgtagattttaaaaatctataaggggggtgttttgtctaaaaaaaataaaaactatatatttttaacgttttttttattatcaattttctctacattttccagttatgcggctacagacacctctttgctacatgcagaatttgagtctgaaataaataacgccattaatgccatacttaataattcaggtatcaaaaattggtctttggcattagcattatttttagctttttgtatgttggcatggaatattgttacatggattagaacggctgagatagtgccaactattgtaacctcaattttagttatctcatatttttctttgtatgctggatatgctcagatcgctgatacaatttatggagcgtgtaatcaattggggcagatgatgtatgattcagcaataggaggggctgcgcctgatgctatttataattcatttgttaacactatcatgttacctactgttggtatttttgatgcgatgaatttgattactatctctatattttggtatatagcaactggggtactagctattgctatctattttgctgaaatttggttgattacaggaatggcccttgctaaagttgtaggtgtcctgtgtattccttttattgtttgtcggttcacgcattctatatttatgaagttggtacaattcatttttttatggggtgtggcttctattttcttaaaaataacatctattatatgtttggtaataatgaaagcatcattaaatgctgttgcaaaatctcaagggttatatgatgttgtaggatctgattttacagcttataaagcaatacaatttgccgaagataatatatcgactttatttgcattagtggcatttatttttatcgctgcaattatgatatttggtagttttaaacttgcagcaatgtttttaagtggtggttcgggttcggcaggtagtggtttaaataatggcgctacagcattggctaaaaaaatagctgctcttctataagaataaggttaactaatcatgttttcaaaaaaagaagtagatagtttaaataaaaaaacttttcgtgatagagtaggagagttgaagaaagatagaaatttctttcttatcggtgctattattttggtttgtgtgaatatttatcaggggagttctgtcagctctttggttgagcaaacaaaaaaaacacgtgaagttgtttttatcaaggttcagcctaatggaacttattcagtaaaagattttctaccagaggatgaacaagtagtaacaacccctttagttaattctttactggatagatatataagaaaaagattcggtattcataaagaaacaatagagcaagattacggagaagcatcagtttttatgtctgcaagacttgcaggagaatttatcgatgaaaagggatttaatgcaagaaagaaaattaaagatattttatctaatcctgactctcagaatgtcagtattaaaatgatagatgtagatcattatgatgtaatagatggtgtttttgattctgaaacaaagcctgtaattagaacaacgttagtttttgaaaaaacgtacaaagacaaaaacggagtttctttgaaaaaagaatcaatacgattgaaattacaatggtctttattgtctaaatcagttttagctaagcaagaattaaactggctgaatgttaaccctatcggtattgttattattgaacaaccagaagaagaaataatatgattatgaaaaataaaattaaactgttcacagctatatctttgcttttgagtgctgttaatgcaaattcagcggggtgtatccaagtacattggaaacctggcagcataattaaagtaaattcagctttatatctaggtactcgtattcagttgccagaaggtactaatttagttacaaaagatcctttttcttctaattctctctggaatgcagcaggggcagcaaatcaagttactattcagccaacaagtggagaagttgaaggaaaaaaatcaatgattacaatctttctttctaatggagaggctttagatattgaggctaatagagttagttcagaggctaatcaacaatgcgttattattaatcgctctggtattactacaaacgataggcgagcactaactagcactcttacaggcggtaattcatcacaagaagttacccgtttacaacagcaaataaatgcgatgcaaagaacgcatgagcaagaaaataaaaaattagttgccgaggcattacaacgatacagatattttatttatacccgttataactggaatactggaaaagggtttattggtaagaatatcatttctgatgtttatgatgatggaagatttacatatattcgcatctctaaacctaatcgggggttattagctgttactgctgaggttggaggagaagcggctatcataccaacaaaatatgatgaagcttatcatctttatcagatgtcaggaatatatcctaaattcactttaactctagacggaaaaaaaatcgaagtcgttagggctgataatggtactaatggggagggttaatcatggaggaaagagaaaaacgaatagatgaaaaaccgtcaacacacaagaaaaaaacacagctatattttttgttggtttttggcgctgtatttttagtgttgcttttaaactttatatattctgttgcaactcgaagtaatacaaaaaaaacgagcggctcagaagaacaagtagaaacaactactaactctaacggtgtacaggctcaagatttaaaaaatatctttgctaaagataaagaagaggctatttctcaaaattcgttaaaattgaataaagcgaataatcaatcaggagaagaaaaaacggggggagagtctagaacaggtaatcaattaactgataatggtcataggcaatcaccgtatacaactagatttgctccatattcaaactcaaatgatataaaagaaaatcagaacacaccggaaaagatgcgtgaaagattcgccgctgaggaagtgagcagggcgttaagagctagatatgataaaagaaattttgattcacaatcatcaaataataacgggggtaatgcttatgcaagcagttctggctactccgttgctaatagctcagaaagaagtaatgatgatattataaaaggaataggaaagcagagatcggtaatacaacaaaaaatatcagatttagaaaaaaatatagcaattgataaagcaaacattccgagtaagttagcggaagctagaagaaatattcccaatactaatggcgtaattaatacggaattatctggaggtaattttgctaatgtgagtgaaagattaactgataatcaaatgaacaatgctgtttctaataatatagttggttataccaatgataacccctataacgcatcagttgacggattagtaaaaataccagttggcactgtaattaatggcattacaaccatgagtgctatttctgattatcagggcggaagcatgaaagcgatgattacgcatgatatttacgacgcttccaatacaaatatattagcgccgaaaggttcagaagtgattatcaaagtagtgagagcatcaggggtgaatgaagttcttcaaaaccgactggcttttttgccgtcatggttagttctacctaacggggatcgcattgattttagtaaaactactggattagatcgaatgggaatacctgcggttaaaggggatgatgtagaccgccatttcttagctcaattttttggtgttgctgcatacgctcttataggaactaaaacaagctatgagggttcagggggaaatagtgatcaaacttttgctggcaattttggggctggagcaagaacccaagccggaggattaacacaaaaatatttacaggttgtacctactgtaactttaaatgcagggcagccaattagaataattacagaagatgaaatcttcgtgaaaccgtggggaagtatttatgaaaattacattgactaaatttagttttattctgtcattatctatgttctctatttcttcttttgcggtggaaaacactaaaattgatgtgaaaggaaattttgcacaagaaaaacaaaaaatagagttatcaaaatcacaacaatatcagccaagatttatcgacccgttaagcgcatatacaagaactgtattcccgaaggaaatatctactgttcgtgaagcggttcaatatatattagagcctacagggtataaattagttacggagtatccggcaccaacaacagcgaatgtattaatgaatcagcggttgcctatgtcaatgaaattaaatagaacgatgccgattattgatgcgttgcaattattaatcggcatcaataatacaattattattgatccgtctcataggttggtttcttttgagaaagggcacaggtaatgaaaagattattattagtattggttgttagtaatttattaggatgtacaaaaactacttttgatagtggtaaggatcacctttaccaactcaataaaacccatgtaatttatcgtgatctaaccgctccagaagctataggaaatgaatcacaagtaatagactataagcctataagaatattaccatgataaaatcaaatctttttttgattataatgttattgcccctaagtatgggggcattatctgattcatatgatttttatgatgatgaaatagggagttatgaatgggtttctgcaatgcaaggacgttggggaagcaccacgcaattgaaagattttaactattattatgatattcaaaaagaggcatcaaaagaaataaagaatgttatatctaaaagcggtgaatataaagatataaaatttgaagcaagcaaagaaataaaagacattgttaataaatatgctataaaatatgacgttgatcctactttggttatggctctaatcaaacaagaatcagagtttaaaaaagatgctatcagcaaaaaaggcgcaaaaggacttatgcaattaatggatgttaactcgaagccacataatatagacccttatgatcctgatgataatgttaaaataggcactgcactattagctagattaatcaacaaatatgatgatgtgaaaatagcattagctgcgtataatgcaggagagggagcggtaaaaagatacggcggaattccaccttataaagaaacaaaaaagtttgtgaaaaatataatgacgacattaggagaggatgcagattaaatataaatcacagacagtaatgctacttgttgcgttactgggctgggattcaccaactgagcatagcgaaggcggtagcaatgataaaattttaccaataacatttacaggccaatttcatgagaaaaatattatcaattctattgtgttctatttcatgttattcatttgctgatgattcaacagctattgattttctaacgggagatgaaaagttagcttgtgaagcgatcctttgtttgtcatctggtcatagaccacaagaatgtagaccatcattaaatagattttttaatattcgtgacaaaaaaccgtggaaaaccatccaaaaaagaattaattttttaaaactttgtcctgaatccaaagaagaaaatatgtcatcattaatcgatgtgatttctaattctgctgaacgttgcaaagccagcgttttaaataatgagttatacgaagagaaatatgtaacgagatgcacaggcggcggcggtaggagtgatccgcattgcaatagaatttactatttcagaatcaaccctaatttacctacatactgtaacaactatgtaaatcatgaatatacagatttaaatataagatatgtaggatcatctgactggactctaaaatctcgtggttcttatgacagaaaagaaacgaataaagaacctgcgggaaagtggtttgataatgctattgagtagatgaatgataccaatttataattaatgacataagtaataagagaaaataatgaacacgttactaactgttgatgaatttgaagagttgttactaatagagaaagagctaaatgatgaagggatggaaataataagacatattttaaatgaaattcgcccattcataacgagttttaaaactaatacagatgaattagtaaaggtagcttctgagcattcgcctacttttgttaatttgtcggaggggaaaaaagaatttttttcagtggttttaagtgtacatgtttttttctattcctctgaaaatctacaaggagtgtaaatcatgagtcagcattggttaactggaaaaacccaaaatagtgatctaaaagttttaattggatgggataaaaaactaaaatatttctttttagttatagaatctccaaaggaagacgaagaacctttatactcaaatttatatgaaaaaaattcattatccttaacattagaacattaccaaaaggtaataaatcgttttggtatagaaaatatagatctcaataaaaattcacaactttacaatacgttaatggatgatatgagaaatggcctttaaaatgcagtctaccgccttcgctgtgctcagttggtgaatcccagcccagcaacgcaacaagttgcgttgctgtctgagatttagatttttatcgccatcattttgactatattcctccaggttatttagccttttttgttatcagttcgccatttaaaaaaagccggtatccatgaaaatactatcaaattccaaatagatcacgatgtgccagcttgtaagactctattttctctttgatgttatctagttcttgttgttggttttctagtaattttgttctgtcggtcaatagtgtgttgattctttcgtagtccatcaaaatatataatagcgtttgtgatgcagtattgatttcaagctctttagaaagtttagctatcattgtttcatgttctggtttggttcttatagttaatgttcccacttgttactcccttttatgatagtaaagttgatgtttgatctatgcctgtactcttaattgctatcattttatattttttattttttattctcaatataatgatagtgattatagggataatgctaaattgaatgacccgcgtaaaaaatttgcgttttttcggtgtgttgtcgtaaggttactaaacaataagagttagattatgtagatatttttgtatctataaccgggtgtaatgaaaggagtatttaatgcctaattcggtcaacgttgcgaaaaaacgcgagtataggaaaggttctccgcagacacaaaatgattacaatagacgatacaaagaaaaaaaaatgtctaataatgataaagagttaagagtttttatccctcaagatttgagagataagctggtagctttttgtaaaaaagaaggctatacgcgatccgcttacttaacattattgcttgagcgagagagtcaaaaatgggagtagaatcttgatcatctgcggttgaagtgatagattctttatatattggtggacacagccggaagtgtgtcagggtaaggtgataaaataatcacctgaaaatgaaaaccccgtaacactgtttcaactttggccggatgtcacagaaattacgggggtaatatagaactactagaagaattttgttctagtagggagtataaatacatgtctaatagattgcaatactctgtgttcggcctaagtgcgggcttgaatgtataatgtagaacaaccgcataacaaaaagaagatccaccgccattacaccccaaaatatacggggggcttacctaaaatagtccctgttcgccgtttggctggtgcattgaaaatacacgactggaatcgtaacaccccactctataagcaacgctgtgaacgtaatcagcgtgtttctatacgttctgagcgtcgagaaactttctccgagttagcgttagcaatgattgcttatgctgactacaatcccgatagcccatatctttttgaagtcatgtgttcaactgaaaagctagctagtctttgtgggcaactttaccagtatgataatggtcgaaagagttatgaccctatacggcttgcgattctcgattgggaggcggctggcatgatttatgtagatagagacaaagattccgaaactaaaaagtataaagcccagcgcatttggttgaaatctgagtttttcacaggtctgggtttttctctatcagagcttagagaaataattatacgcttcaggcgttggatggaaaaaaaaggattaagaaaagatcatcagcgtatttatactgaacatacattacgtttggcgcgttctaatgttgcatctcttgataataaacactctttaaaaaaattacttcttaaagttaaacggttagtgttaggcgatgatgaagccctaaaaaaagagaaagaacacgcaattaaagccttagagcatcgtaaaaaactcattgaagcaacagaacctaaacccgatgaaaatcaagttaaccataatatttatcaaaagtgggtacaaaaacaccctatggctcgaaaaatttcatttgaaaacgagattaaaaatttatatccagagctttcaggcaatgaactattacgggcttatgtaaaacatcttcctgataaataatgaatgtattaaataagcaccgcctcttttggcggttttcgtgttgttttttaaatatttctgctcattttttaatccctcccccgtcttgattttttgattagcgaaactaaaaacggtgttttgacataaattttatatgattgattgaaacgcagtcatttaaattcgcaaatgtgtatgcttatataattaaattcgcgatttattactgaacaaacgaccctattacatagggagttagcaagggggataaatcccccattgcttcactcataaaaaagaaataaatgacttcgcttgcaagcggttttaccgctgccgctcagataagtggtctagtccagtcattacagttgtgcccgtaattcgctaacgctcatacgcgcagtacatccgccattcatagctacgctattctgtcggctaactgcgttctttgaaggctcaaattcaccactttttacatgctatataagatggctctataggacaggggaaggttctatgcttattattgctcttgtaatcgcattagacgcactttctaacgcaagtgtgtctaatgctctgcttcggggcgattcagcttcctgatgctttttaggcattctctcgccccttatatttgcttcgcaaatcaaaacaacaatatagcacctgatagcattttgaaagataccagctcaccctggctgttataatcgatagtaatttctgattaatttggatttttttcttttctttttttattatgtacctgtatttatttttagttaattattacctgataatgaggttattactatatggaacatgtattacctgttttagagttatatgctctattgtatacaactttatctggagccgctttgtggcctgtttttgttatttttgggttattctttttttatctgacttttaaagcaaaaaaaataagtaagaaaataatattcctcgtattatcagtggtttttatcttaccgcgtttcctcgtactctatgatccagattattttatttttaagggttttaatttagatgttcatattaaacacgggggaattatttgatcgaaagtaatatcagattgccctagatttgcagagtgttagagcgtatcggcattttagccggattaaggttaatcattgtaatgagataggccaaaagctaaaattaagcggtgattttattgtttataacaagagaagtaatacatgaatggaataattatatttgttattataataactgtagttattattgtaatgggaaaggctaaaggttctaaagaaaaaaataattcaataggtagcaagaagaaattttctgttgagaacggatatttatctaaatctgtcatgacaaaaactgaattgcatgtttttaatgaaatccaaaaggatttggatagccgttaccatcttctagctcaagtgcgactggctgacatcgttaaggttaatactgatatttacaaagcccgatcatcagaatggcagtcattatttaataaaataagtcgctggcattgtgattttgtgattatggaaataaaaacaggtaaggtgctatgcgcaatagagcttgatgatcatacccacagggcagataaacgcatcaatcgtgatatagacttcaatgatattttaaaatcagcgaaaatatctttattcagggttgataaagacaatttcaaaaatattttaccgatagaaagctacgtaaaaaacacgaaataaccccagtgaaattttcctatatgtagcgccctggctataaaaggggggcatctaagagccattatgttacatggcacaagataagtacaaatacttgtacttatttttttttggtgtatagtctataaattacacaacaactagtgagtatgagaaatgaaaactatcaattacagtgaagcgagacaaaactttgcagcactcatgaatgagtgtactgatgaccgagttcctatcaaaatcatacgacagaaaagctctccggcttgtgttatgttgtcctatgatgaatatcgcgcattagaagaaacatcctatcttttacgctctccggctaatgcgcgtcacttgatggactctatagaggcgctcaacaatggtaaagggattgaggtggatattcaggaatgaatttaactttttcagaagaatcatggaatgattatctcgactggcaacaaacggataaaaaaatggttaaacgtattaatgagctaattaaaaacatcaagagaacaccatttacaggcattggaaagccagaaccattaaaacatcacttaacggggttttggtcaagaagaatcacggacgaacacaggctagtttatcgcgtcacagataaaggattagaaatagcatcttgccgttatcattacagttaatattaattcttttaaaacaggaaattagcaatgaaagaaaatattaaatttaataaaaataatttagaaatggatatacttaaaaaaataaatgagcatgataaatataatgataaatttttatatctaacattaattgtttatactccgatcgcttttattataattacttccgtttattttattgattcaatatctcctatagctattatttttatttttctttcttgttctgtttttattaattattttatggcgattttgaatacaaaaaaagcaatgcccccgcaaatgctattagattactttgaaatatgctctactgataaggaatttagagatttttttatggctactttcaattctaaaagcattataaaatataatgacaggaatgaaattaattctttttttataaatagagagcgttaataaaaataacaatatgaggtaacaataactatgaataaatttgaaaagcacatgactcaacaacaaattgaagattatcgaatagaagaagaggctgctgaacggcgttctgtacgccaaatattatatatgggattgttcttgatgatagtatctgttgccgctgcattagtcagaaactatgatgatagttacattgataatatgctcaggttaatgcaaatcttaggtgttatgctttcgattatttgttttggctgtgtgcttggcgttagcgcgtatcggtatttgatccgaattttttgtaaaaagcgaatatagagggatatgatgaaaaaattagggttaacaggtgcattaataatggtcgtcattattgttattggttacttcatgatacacaaaaaagctcagaatggactaaaaaacatccaaaattattacgcgccctctaattgaactaataaaagtccggtttagaatttcaatcatgataaattttttcgctctgcaaacgctacggattttgcagagcgttcccgcaaaaagaggggcatttaagagccattatggataaaatcacatttattaatgatattcactcaatagagaaaagtaaaatagccgtatcaattttgtttgatagaatgtcagaatctgctagtaaaatatgcggtttacattatgaaatttacgccagtaaattgattggtgatttattggagtacatatcaaaacttaatgaaattgaagcgaaaattctttgtgattatgctaaagacagagggattgtagtcaacaaagaatcttatcaacaagcattaatagaagagaaagaatgtttaatcgaaatatcaaacggtaattagtataatgtgctagaattcatgtatgttcgggttttttgaacttatagaaatccggtttataatcccaatcccgataagtttctttgctctgcaaacactacagatttatattaaatataatttggaaaaataaaactgatgaataaaaatgagaatgttaaatctttttctggtgaagacttcaaaaaagcactaaaagaaacttttcgaggttctgccacgcatgaagttatccctgaaatagattcatataaacgtttctttttcatgctatctgactatccaacattaaccccattttgggacatagaaaggaaagcctgcaataaggaagagttattaactaggctggagactcttagtcatggagagataataatggctaaattctttatgatggtatggtttggcaaagatagtgaatttgatataagagaagccgcttcggtgttagatgcaacatcccggcgtttgatagctcagtggttgttagatcctttctggccataaaattattagtgtataacctccgtagattttgcagagcgcccccgaaaaaagcggggcgcttaagagccattatgttaaatcgcaaagtttagccgccctttggggcgttacgccgtcactctgtcctcaaatcgacaaaagaaccgttttacctgcccattttcccccgcatacagagaagcaaattttttgcagaaatgcacaacaatagtgcatttgtaacatttttttaacattgataaatttgcgttcaaaatactgctaaaagcgatattttcataatttacccataaagaaatacactgtatgtacaatggtaatacagtgtatttcattggggaataactttcatctatcattgatataaaggtaacaagctgaaatgtgtgctaatttacaaatatatctggaaattcacaggtttttattttttaagtgatactagtagtaactttttttacatatggtgattattaccattgctatacaaaacatcacaaggaacggcattattcttgaaagaattttaataagtttatcaatttgattttcggatggttcttcaaatttaatgttattgtattcatattggtttttatctacgcttaacgaggtgccatccttacagataaaaagataactattaaaataaccatattcttttattgttttataaatgggatcgcatgttttaatttcagggctaatcattgatgctgtttctttttctttttctttttcttcacgtaatttattaacttcatcaaaattaacgaagtaacatattgatacaaacataaatactatagagaaaataaagtttaacaatcctgttaatatttttcctttccatgccgaatgtatccctaaaattaaggctaccataccaagagcgagaaacaataacataataatcataaaagtcattatatactccattaaataaaattgtatttttactttatctactaatcaattagctaatcttaaatttttagtctctctatgcgagaaaactcacgagtattgtttgttacacaactccttacattatatggattataagtgatctaatttactttttaccaaaaaagaaacataatgtacatacaatgataatacattgtaatgttattgtacatacaaaaatgtattgttattgtatttacaaagtatttcatttggtctatattcatacgtaagaaacacaatgtacatacaatatacatacgatgtatttcaaaaaaaagaggtagttatggctgttatagttttcgcttctgataaaggtggagtaggtaaaagcacaaccgcagttaatacggcagtaatgttaagtgataaaggaaaaaaaactattctgcttaaaacagataaaaaccgcgatcttgttaattggggtaacaaacgtaaacaagaaggattatctacaattcctgtttatgaggcatatggaaatgtgagtaatgaaattaaaaaacttgaagccctttgtgacgtgttaatagttgattgtgcaggacatgacagctctgaatatcgtagcgcaattactgtagctgatataatgattactttagttaaaccatcttcaaactttgaaaaagaaacactaacatcagtcacggaaactgtacgaaaagtacaaaatatggctaaccccaaattaaaaccctgggtgctcatgactcgcgtaaaaccacataaaataattgatgcaatagcacttgaaaaagagttaaaaagtgatcagatatggattcaacctctaaaaactaggatttctgagctagacgtttttgaaaacgcttgcaatgttggggctggtgttcacgatgtaactcgtgctcctagtttgggaaaagctaaagcacagattgaactgatggtaaaagaaataggattgttataaggcttgttttatctctagaaatacctgtaatgggtacttaatgtatgcgcattgtactgttgttgtatgtatgatgcatgtacattgtactatcattatatgcacgatgtatgtactatgtatgtacgttgtgctatcattatatgtacgatgtatgtattatgtatgtgtgtttgtgcatatactaagagggaagcatgtctaagattacacttaaaaaaccggatattagtctagataatacagctatagaaaagactacaaattcagctattgcacgttttattcttgatggtgataaacgtcctagcaatggtaacactattgcttctacgttccgtttgccacagaaatttattgatatgttagaagaagaagcaatgagaacaggacaaaataaaactacaatagtgaaagcatgtattacggcttatcacctttttttagatgattctcaaaagaatcaaagtatccttgaatcaaggaaaatctaacttgatacacgatttaaatcgtaataattacaatttgaacatagaaaaaaaggagctttatgctcctttttttaacttttttgacagaacgccccattttttcggggggggctgtcttgtctcttgttactttaattttggcattagctcgatcatggctttaaaagtgttttcatattctaatatcttgcttttagccgtcattaattcattttctaatggggtattagttttcctgtacagatttaaaacctgttcagcgaagatatcatcatctatataaaaatagcacggaggaacgtcaaggatatcggctaatttacaaacagtgctatatataggagcggagcgcccacattcatacttagagatagtggttctggctgcttctgcatcatctaaccctaatttttcccctaaatttcgttgagaaagtccctttgcttttctggcttcaaatagtcgttgtttattcatttcataatttttacgtttatcttgactattatctatcactgttacagaatgcacactagattctctattgggttctagatcccctgtgagtatcttagtttgctaaatagtagagataaacccttgtaaagatattagtaacatcagggaataataccaaaataaataattacaataaatattaaatatagacttcgttgttgctgccagccctatttatagggctttttttcgaattattgattacagaggtgtttgtatgtcaggtaataatatgaattgtaattatgacttgtgtaattttatctctgattacttaaaaaatttgtcatgggaggactcaaaaccacaattacaaaaaaaagtagcggcgtttattgagtcattcggtgaagggcggtgttttgttgctggattgtgtttatacattttgtttgatgcaattgaagaaaaggaactcagcgaagagcataagttagataaagaaaagataggcaaatgtagagcgattattgcagatattaggcgatttcttgaatctaatgttgatcctcgtagttggaataaagaaaaacagcctgtaaattttcattaactaaattttctgattatcagtgctaaagcatctaaaaacttaaccaaaattgagtaaatttaaatgagtaaattgtgattaagtcaagattttggtatatttattttaaggatcacagattttcgactcctcaacccctcttagctagttcaacttctatgtgataaaaaatcgtcaaattttcgttcacaacccatcaatagatataaatatctgcaataaaaatttttattgcagatctctattaaattcataataacttcttttattcccttaatagcaatgataggattattgaatccacagcaggcgtaaccagtggattaatcgcctaatatatcaacttaaaatttctatgtcgggcaatgttatgttgcttcggcatcataacaacccgtataaggatctgttatgtttaaagaaattattttttctaacttaaacttcaaccttacagaatttaataacccattcggcattgatgcaatgagttattacagaggttacgaaacgctagatcgcttagaacaatgtattattgagctaaaaagaactggtgttattgctaacttgaatatgactacttgtactactaatggtcgcttacttaaagcatggtatacggaagaatccatgattattcatgcaaatattaatttgcgaaccagagaagttattctagattgtatgaaaatttggaatgctcaggagtatgagtgtatagaattatctgacttcgttatgatgctcagagtacatcaaaattatttagtctaagattagataatctttgagtcataagggaaatctttgatttccctttttttatctatgcggttactacaaacatttttggattactatcattttttcttcttccagagagctggccccgttcgaattactatcgattataacagccagggtgagccggtatctttcaaaatgctatcattgtagctactatttgtgattatctaaaaacaaaatgagcgttcggcgttgctgatgtgacaagcgaggccagatcttatcgaaacgttcttttaaatctgcatcttctataaataaaagtggggatgtgctgtttttttttcctacttcaatatcaatacaatctataaaaaaccaactaataggagtgtttagctccgtgctaattgaaacaagatgatttatatatattcgattggttcccctttcatatctggatagttgttgttgagatgtaccaatccgcgtagctaaaagttttgatgatatgcctacttctttacgcagtattttgatgcggttacctactaatgaattagcatcggtaataaaattttcatctagtgctgatgttattttaatcatgaagatatccaagttttaacatgatgttttttataaaattcatcatataagtatagcttaaaaaagatgaaaatatttaatttactcttaaatgaaacatttaagagttataaaagacggttttatttttaatctaattaaataatgttggttgaaagccgtctagtttgcgatcactgacggcttttaatggtgatttgcgagggttattcttttatttctctgactttttcacctactgcatttacatattcttttattttagttcttaacttatttagtgacttgtaaatattgtttctttgttgataatattctttagttgttatatttccgcttagctgtaattgctttagcaaagtaatacattcgtcgcatagctgatttatacgaatgaacgttaatgcaggagcacagggaagaatatcaatctttgtttcatgtatatgttgtttagactctttttgaattacttctttaaatggtagcggtttaaccgttttttgtaggatattcttagctttttgatactcatttaagctatcagctagtaaattttcaatttctggcattacttgctttgaaagttcgcattttgcaaaatgtgatttactccgatattttttagctttactggcagtaaaaaaacgctctaaataaaataaagtgctttctccatcaggaatagatcgtcttactggtaaatcagaaaaattataactccatgatattaaactttttatatcatgaaattctatttttatttctgttcttctcattgcagccctcttttttcatttaattgttctaacatctctatgtttttgattattcttctatttttcccagtaaagagaagtattactgaaagatcagcatctttgatagttcgatttaaacgtatcgctagccgggtgtaatcatcatcagtagtagtatgatacagatcccaaagcatttggcattgttccggcgttcctcgctctatagcccagcggaaaacttcgctaaaatttaggctattaggttgccattttttttgtaatgattgtgcgaatttcattcgttgtctgttatatagttctgctcctatcttgggatcttcgcagcgagtgccttgaactggtcgcttgtcaaaactcaactcatataaatttattttatcattaaattgatagtcttgaggtttagccagtctaattaatttactcattttgtgccccaaatggattggttataattttaacctctcttttattttgtttgatttcattatgttctacatttttttcttttggttctgttctaattgttttttcttcttctttcatttttatagggtttgatgataacagttctttaactgaatccagttctgatatatcaatgaaattattttcttttgtattgactttatttttattcttaacctttttatcttcaattattttttcgcatgttggcaatggcattttttcatctattgatatccagcaagtatgtaaaatcttactcagacttcctattctttgtaagacgcttactctagcaggtaatgataaaatggtgtttacaggtattaaatactctttatcttgtcctatcatacgcttaccgccccaactttcagcgccaaagccgtcagtgtctacttcttccagtttagttaaacttttagcaattgttccagaattaccggagatccattcggctgtttcgctataacattggtgaactatagttatgtttgtgtttgtttcggtacttttcattattgatttacacacagcatctgattcatcatctatgtttaataagtcgtctctttcttgatatgcaatgctcatatttgcattactagcaagtatagtcgctagtgctccggctatttcagaagaaataataaatctgatttcatcgacagctatataattatgtttatctggtgagatttcaataattgcctgtgataattcagtcagaatatttctacaaatagattttactgttttatctttcaaatttcctttgatgtagataacttttccatgtctcactatgtcgtaaatatttaatatgttctgagattgtccaatggatgttaaatccttccattcatttatacattctgtgattgcatcggcataagttctaatgaattcattatcattgtcggataattcagggtgatcacctttcaataaacgagatagactgtctattttaccatcccaaagatgttgtatttttgtaatgcaatttctggcttttcttttgtaaaaatctgcgtctgttcctccattatctaaattaaatgctgtgtgtaatctagaaattctatctcttttattaccgtgtaaaaaaggttcgtaagatacacctctaaattcgtttgcatcaaaaactataatattcctgttaactttttttgctgcgttacacattatcgtataaataaaatggtctggtttttgatcaatgaatactgaaccccatcctttttttattgactgatctagcaatacaccctgtataacacctttacccgtttgcgttgctcctaatacttttatatttgtaccgcaaaactccttgtctgtaatatatattgggttttcttcttcgtctaagcctaaaaaaatttcaccatttttataaaatgattcagggttaaattcttttgctttgtttttatcatgttctattcttacgtcagatagagtgtctgatgtttgagatactctatactttctaaataaagctgatatttttggtttgatgtaacgtctgttaacaaacaccaaaatatatggtaatagaagaacagctattatatttaagaatgtacttatgcttaggatttctacatattcaaattttgaaaataacatatccatgtaatgatctgcattatccttgtttttacctaatgcaataaatgaaataacatacattgtgataaaaaacatgaatgttattaaaatataagctactaatagtttttttcttatggtttcaactattaactgagtggttgatttatcacctgatttttctatatatcctgtgaaggtaaatatacaaatcaatgataaagcaccaagccaaagataaaaatatgtagggtaaatattgttcaatatgtgggctaaaaattctagctggttctcattcatcattagtattctctgtaaaaaatgtaatgaaaaattgtacattgttaatgtttttatggctacttttaagatgttaacgaaggtgaaagttgaaattgttatattattttatgtactattttattagatatacttattttgtataaaatatcacataaaataacatatgaaatagtatataaaatagtatataaaaaggaaaagtaagaaaggaattcaatatattataattataatatattgatatataagaaaaaaccgcattaagcggtaatttcttataacatattgaaaaaaaggattttttcaatataagggcataaaattattcggtgaataattttatcatattattgtttttctgaacgaaaacaataatataggtcttcgacctcttggatttatctcggctggacgccttcgagaaatccaattcaccaaagggcgggcgtcaggctgcgcctgacctttagagcacatggtccga

SEQ ID NO: 287 - DNA, 66038 bp, Xenorhabdus sp.; identical to SEQ ID NO: 120
  CDS (3)..(164)
  unsure (1)..(66038): unsure at all n locations

SEQ ID NO: 288 - DNA, 66038 bp, Xenorhabdus sp.; identical to SEQ ID NO: 120
  CDS (3006)..(3440)
  unsure (1)..(66038): unsure at all n locations

SEQ ID NO: 289 - DNA, 66038 bp, Xenorhabdus sp.; identical to SEQ ID NO: 120
  CDS (3461)..(3904)
  unsure (1)..(66038): unsure at all n locations

SEQ ID NO: 290 - DNA, 66038 bp, Xenorhabdus sp.; identical to SEQ ID NO: 120
  CDS (6478)..(7062)
  unsure (1)..(66038): unsure at all n locations

SEQ ID NO: 291 - DNA, 66038 bp, Xenorhabdus sp.; identical to SEQ ID NO: 120
  CDS (28446)..(29321)
  unsure (1)..(66038): unsure at all n locations

SEQ ID NO: 292 - DNA, 66038 bp, Xenorhabdus sp.; identical to SEQ ID NO: 120
  CDS (33327)..(34133)
  unsure (1)..(66038): unsure at all n locations

SEQ ID NO: 293 - DNA, 66038 bp, Xenorhabdus sp.; identical to SEQ ID NO: 120
  CDS (47072)..(48268)
  unsure (1)..(66038): unsure at all n locations

SEQ ID NO: 294 - DNA, 66038 bp, Xenorhabdus sp.; identical to SEQ ID NO: 120
  CDS (49757)..(52174)
  unsure (1)..(66038): unsure at all n locations

SEQ ID NO: 295 - DNA, 66038 bp, Xenorhabdus sp.; identical to SEQ ID NO: 120
  CDS (53962)..(55116)
  unsure (1)..(66038): unsure at all n locations

SEQ ID NO: 296 - DNA, 66038 bp, Xenorhabdus sp.; identical to SEQ ID NO: 120
  CDS (55159)..(55698)
  unsure (1)..(66038): unsure at all n locations

SEQ ID NO: 297 - DNA, 66038 bp, Xenorhabdus sp.; identical to SEQ ID NO: 120
  CDS (55701)..(56273)
  unsure (1)..(66038): unsure at all n locations

SEQ ID NO: 298 - DNA, 66038 bp, Xenorhabdus sp.; identical to SEQ ID NO: 120
  CDS (61490)..(62035)
  unsure (1)..(66038): unsure at all n locations

SEQ ID NO: 299 - DNA, 66038 bp, Xenorhabdus sp.
  CDS (9173)..(9856)
  unsure (1)..(66038): unsure at all n locations
cggctgtggnataccttccataccgtaatattcattaaattataaacatgatctaatgtttttagtacatattggttagtacactcgtcacagtgatttgatatttgttccaagacaaatggaggaattaaactgcatctattaattgcttgtctattcataattatcccctgttttgtcattgctatgtttattgttttgggcgcccatttgcatactatcgataattaaagtgatagtcattagggtaaatattgactttttataacagaatattgttaatggaatgctatcaataaatttattaatctattgatataaaagcaggggtgtaatatatacaattaaactcaagatgtgtagccagcaaagacataacttgaaagacgaagtgtatattcaattttaaatttagattagagtagtgataaatagcccaatacatatttatgctattgggctactcccggatttatttatatccaatctttttttatcagaaatgatgtatagagctcttcttcgggagaatttggctcaggggaataattatactcccagcgaactaaaggaggcatggacatcagtatagattctgttcgtccgccactttgcaggccgaataatgttcctctatcccagactaaattaaattcaacatagcgaccacggcgatacaattggaattgcctttcccgctctccccagccgatatcttttcttctttcaacaataggtagataagctgaaaggaaaccattacccacagcttgtgtgaaattgaagcaagtatcaaaatcggggctatttaaatcatcataaaacagcccgccaataccgcgaggctcattacgatgcttaatgaagaaataatcatcacaccattttttatatatgggataaatatcctcaccaaatggctggcataacgtactggcaacggtgtgccagtgaacggcatcctctttaaagccataatagggagtgagatcaaacccgccaccaaaccaccagatggggggctcaccttctttttcggcaacaaaaaagcgtacattggcgtgactggtcggaacataaggattttggggatgaataacaagggaaacccccattgcctgatagctgcgacccgccagttcagggcggtgagctgttgctgacgaaggcagggaatctccggttacatgggaaaaattcacacctgcctgctcaaaaaccttacctgattttaagacacggctgcgtccgccaccgccttcctcccgttgccagcactcttcgatgaaatgggaatgatcatccagacgttcaagttgtttacagatttcatcctgtaatgagaggaaaaaagtcttaacttgagatatattagctatattcataattaaagtataaccatttgatattatttaaataattacaattatttaacgaagttgtttttgtttgtttatgcaattgtttatacatagaacgctgaacaaacttataaacaagacataagataagaacagtgtaaaagaaaagacaggaaagaataagagtgaatttgtgatcaataaaacaaggccagtatgctaactgttctgattttgtgaagaagttatggcttatctcgctgaaagtttttgggaaggataattacgaatgttactgctagtgagaagataccccgttacggctatcttcccgatgatttttaaatggaactgattatttttatgatctatcccgaaccttgcgctcaatcaattcaccatacgaatcaaaatagcgactgggccagatttctgagggatgtatttcgagatagttagcaataatccattcgcctttcggccacggtctgctgagagtatttgctagtgtagatgaactgaggccagattcacgagaaacagccgctaaggttgtaccacgtttacgtaatgcagcgatgatgtcagcttgatgccagtcatttttagcgttattcattcctgctaccccttccattaattgagaaaattgatggtggcaattcagacagggttagcactactgggagctatcttccagcgaggccgaagcctcccctgcctgaaccgccattgaatgggcgatagcagacacactggtagaaacctcctaccagtggatagctctttgcaagggtgctaatccttgaccactagattttgctaatggcggggctactttaactgattggtttatcggactcaataagcgaatcagtataaacgcttaactttttgcgttatatgccattaaatagcccatataagctgacactcttgccactctggattcaagcaaatataacagtcagctcatagccaaaagaagacgttctttacttcataaatgttgtctacacggaaagaaatatcaccagtaaataattgaatttcagtggaaaaagtgtaatttcattgtttggaatatataaagacaagttaacttgtctttaagcacagagcgactcgccgactaagtgttagacctacaccaagacttggtgtcaaattaaatttaaggaataaaaatgacagataatttgccagcaatcttagggaaaccatcgacggataatttccccacaactgttgacgcagaaatcggatatttatcacaagcaagaaggcttttggatgcgggctttcctgaccactctcttttagacatatggaatgctgctgttcataatttgcgccggagaatggaagcatatggtattgaattattcacttcagcggtaaaggatgaatcagggagaaaaaaatatgataaagatggtgaaacgctaggtgaacgatggtctggtgtagatgaccttacattaataaatggtgctacaaagcttggcgttttacacaaaaaagcaggaaagtcacttgagatgattaattggatgcgtaaccacgcatcaccagctcacggtagtgaaaattccgtacaggctgaagaggtttttggcttagctctcatacttcaaaaaaatctatttgaagcagagatgcctgatccgggacattctccatctggcctttttgatccaattaaaagctcaaagctttccgaaggaaatgaagaaattttaaaagaccaaatacgatcatttaagcctggtgacatacgtcttacttttggttttttacttgacatgatttgtaaaggggaaagtccttctcacgaaaatgccagcacactatttccagtggtatgggaaagagctaatgaagacctaatgaaatcagctggccagagatatcattcatatttagtagaccccagttcagacaccagccatgacaaaggggcaaaaatcagagttcttgagactttggtgaaagttaaaggtataaaatatatcccagatgctgcgagagctagcctctacagacatgctgtaaaacaattagctaaagcaaaagatacatcttacggctggtctgacgaagaaaaagcagctaaagcattagctcagtttggtcctcatataccttcaatcgcttttgaagatgtgtatcaggaaatcctagcagtatggtgtggtaactattggggtagctccacagcccatataaccctcaagccgtttattgatgcacttaatagcaatcaactcatggcgttggcaagaatgtttaaagataatgaaagagcgaatatagagctattccaaagtaagcctaatgctaaagcaaaagctcttttagatgacattcaaggaaagttaacaattcaagctagcatcgatgagatagatcagattaaagatctaatcgatgagatgtgaagagcctaacaaatggcctctaggtctgcatacgctatgctctatgcagccctagaacgagtattgatgtccacttctcgctcatagttgactgtccgatagagtagcgattaatccaaataacggtgtaatctctaaccttctgattatttgatttcattaatttctatccgacacaggcattaaaaatcaatcagttatctaaattccatcaaagttatctagtctctgtttctgttcatcattgaggatgaaagaaaactcttcatgctctacttgccatgtaccaaagctcatcaggaacgcaatcgcagggtcgattttgttcgctgatttctttttgttcggtttgatattggcgttagcgtcggtttccatcaccacattggctatcgcccaaacaagcaccggatcgccgttatgacgaatcaccttgcggttaacgaacacctcagcagatttcgccacggggctaaagcgcatataggtttgcgggaagggttcaacatccagccccgcgccttgtaattgggtgcgtaagtgtgtggcgttccatgtatcaaagcccaccagcttaatatcaaaatgctggctgtctttgagaatatcatcacggatgcggtcgtaatcaatgcaatcgcctacggtagtgcgtataagacgctcagggagatgggcagggaggctaacaatcttgacaccctctctaaaaatactgcgatgtccattgaagatacctctaagctcaccggtgcattggtgcaaatcggggcggatgctgatgatgcccaacagtctgttcaaaacttatttaacgttttgaattcagcccagcgcggtgaaaatccctctgtactggcagaattaaataatcttaatatcccaatacataccactaaagatggttcagcggatacgatcccaaccttattggcgatagcggaaaaatttcccaatatgccctccgaaacgcagttcagattatccaataaattaggattaacaccggaattaacaccggatgttctgacgttaattcgtgaaaataagatacaggagcgattggataagtcggtaaaaaatggtcagagtcgcacgacggaagaaaatcaaaaactcacggattttaatacggaagccaatgagctgggcgcaagggttgacggcatttggaaccgagtaaaaatagggagtgcgacatggtttttggataaaagcaaaacaaccaaagccagtccacagatgcaatctgttgaggaatataagaagcgagagaaagacaccgccgacaacttttaccacggaaataaagagaatgatattcggcaacgtgcgctcagggatgacgaatttaagcagcagttaacgtttaaagaaagattgtctctgaccgttaataagccagatgaaggcctgcaaaagaaactggatgataaatacagtgagtcatgggaaaagcagaaaaaagcccatgaagctaaagaggttgccaagcagataccagtagcacaaaaagtagaagcacctgattatcctaatccgtcaaagcttaaaggcgcggcattactggaatccatgtctgattattttgccatgctggagaagaaatacggtcacgaatccggtttgctgcacggtgtggctatgactgaatcgtcaggagatcccagtaagattgggccaatgacatatacgggggagcgagctatgggaatgttccagtttatgcccgatactgccaaagagcagggattaagcagaagtgatgcccttgatccgtacaaatcagctgaagcagctgctaaatatctcagcttgttacgtcagaaaaccggtagtacagacgggatgttggcggcttataacggaggtattggaagactggagagaagaggcagcataaggaacatgccaccggaaacacgcaattatgttcccaaagttaagaaatacatgaaggctggcgccgcaattgctgaaaaaaataccaataagaaaaagccaccacagcaagagcaacaacagcagccactcccctcactctacggacagaataagcaggttgagcgcgatgaagaaatgggtaaaagaattgcacaggcggttcgagaggctattggtgataaaactatcaccgtcgatattaatttgttcaatgataaaaccggagaacgacaaaaaattcagtcaaattctgccgggaaagtcacaacgtcgatgaaatactcttaagttagcggtaagggatttatttatataagcagctataattaaaccaaattgacatttaatgaggtgctaaatgttaaaatcgattgtttgtgtagtcgctctcctgatctcaatgggggctgctgctaacatcggtactggtattggaattgatgctgatggtcatcattatattattgatggtggttatgaatgcgaagcacgtaatttaaaggaaggcaaagaaattgaaggatgggacggtgctttggtgggtatcgctgggagtaccaaagttaaagcaatagcattctcattgttcaaaaatggcgaggaatcacctgaaatttctattagtcgtttaagaatagagacttttccgtcagaaactttttacactaacctcagtaactctgcttcgattagagtgaattcatcatcaatagcgatagccctcaacattggtgaagaaggtactggaattcttttaaccaattgcatacccggaatcccataaaaagccagagtagaggaaatagaccctacgggctttgatctgcatttcatgacgccttcatagtcagcacaaaaaataagccgtttcccttttcacaatttggacaatttccgttcaagcatcagaacgagtaatgtagtatctttcgatagactatttgatgcaggagagaaaatggaacgtagagaaaagatagctttcatttttccagcggctaaagacgtggatggtaatgaagggcctattcttaattttcaatgtgaaaaattacccgttgatacaaaagtaacggttgcagctgcttttgttgggcttgagcagttaaaaaagtatctgatttcattagatatcattgataaaaatggtacaactatcttaaaagagtcgccagtagaggttcctgttacagcaaatgatgatgaggcagaccctgctgacgttccgggatttctccgtgctgatcttttagtcagaatgatgagtattggtgttcatactattaaaattgctatagctagtgctgatgagataaataagattctgcacgaaacggaagctcactttagagttattctcaaaggagagcagaatgaatcctgaaaactctaacattatttctttttctagtgggaaaaagctagcgtccaatgttcctgcaaatgatggacatcatcctgataatcattcaccattaaagaatggtaacggcggtggaggtggtgatatggaagcgagagtggcaaaacttgagtcagatgttgaacatatcaaggctaccatgagtgatatgaagtctgatctgaaaacaattaccagtgatgttggtatagttaaaactgacgtcgctttgattttgcaaaaaatggataacatctcttcgtctgtagaaagtaaagcaaacactgccgatgttgctttagtgctacaaaaaatggatagcctttcttcaactgtagagagcaaggcaaacaataatgatgttgccttgatattacagaggatgagtgatatgtcttcatccatagagaaaaaatcaagttctgagcaagtggatgcaaaaatcggtgttcttaagatatggtttttgactctattactattttcaatagcaatgcctgtcattatgttcttgctaaatctatacatgaagaaaccataactaacccgcttcggcgggttttcatttctaaggccgccgagtgcggttttttttcgccctaaaaaaagaggtctcgcatggcttttattaaagatgccgtttcttccctgctggggggtggcagtgatgcgtcatggcagtgggctgaacatctgcatccggcttcgttccggggggtgccgtttgcggtggtttccggggaaagtgtcttcggtcgccgtcaggctgtgcatgaatacccgtaccgcgatacggcgtggctggaggatttaggccgggccacccggaggatcacgttgcgcgggtttatcattcaggacagtgcggtttatcacgcgccggatgtgatcacccagcgtaaaaatctggtggccgcctgtgaaaccggttcgacgggcactttagtccatccgacactgggggagctgacggtcagtgtgaccgaaagtggcctgcgcatgaatgagagcaaggagtttggccgggtatttgagttcacgctcaccgtgattgaatcgggactgaaagtctttgcagtcaccaacagcaccaaatccgccaccgaagtaaaaaagcattggttacaaacctataccaccacactggcaaaatatatcgccatggtcagaggtgagatccgttcggtgacgcagggcatacggattattaaacagaccgcgaaccaatgggtcggtatggtgacccgttcaatgaatgaggtgaccaacctcagcgatatgctgaaaaccacgttcggcagtgagcgttacgggcgttatcagcgcggaaaaatcggcggtaccgtttccggagctaccggacttcggtcacgggatgaccggcagcacaatgaagcggaaattgtgagaaaaaccacggctgcggtggtgatgagccgcaaaacgattaccgacagactggataaattgaacgccgcccacaccgtggaaaccttcagcgaggccgccggtcaggtggtgatcgcgattattgactcttccggcagtgtggatgagaaagtggcgattttcgaggcattagctgcgtttcagaacacgcgctatcaacagggcacggttgaccgtcacattacggaaatgaccgtattgttgttggttgtcctgtcagcgggggcgatggcgcaggtcgccagtgactttaccccgtccagcaatcaggaagcccatgatttacaaacgcgggtctgtcaggcactggatacggcactggtgatggcgggtgatttgggtgtggatgaggtttatcagtctctgatggccttgcaccatgaatttatgatcagtgcagagctgaaaggtgcagagtcaggacggttagcgcagtttagtctgcctactgtcctaccggcactgacagtggcgaaccggatttatcaggatgccgggcgcagtgatgagctgatacaggccaccgatccccgtcacccggcttttatgcctacccgatttaaggcactcagacaatgaaaaaacaggatgaactgtcgctggtaattggcggcaaggccatttatggctgggacagcgtgcgtgtgacgcggggcattgaacggttaccgtctgattttgaactgatgctgatggactattaccccggcagtgatgaaaaacaacaggtcgaggccgggcagccctgtcaggtgctgctgggtaatgacccggtgataacgggttatatcgatatctggaattcttccattaacaagagtacccatcagatacgggtgaccggtcgcagtaaatgtcaggatttagtggactgttccgccaaatggccgcagaacgtcattagtcgggcaacggcgttacagattgcccagaagctggcgcaatggtacggcattgatgtgatttcagatgtggcagacatggagccgctaccgcagtttaccctgaactggggcgaatcctcacaggagatcattgaccgcattacccgctggtcagcgctgctgtattacgacacgccggatgggaatttattcctgacccgcgtcagcgataaagtggctgccagtggggtggcgcaggggaaaaacatcgaactggcggattatcagtcttctatgaacgagcggttctccgaatacattgggctgtccatgaatgtcagcggactcagtgaactctcgtccgggcaagggtaggttctgattttgccgctatagggttcggtgatggtataggcgaacctgtgatcggataaccgttgcgggacaaccgctgacggtgggtaagagtgcaaggattgcggctgaccatctttgccccataggatgactgcatacgcattgccatttaacaggcaatgacgcatcagggttcgcttaaactgaaacggggtctggcaatcgttcgggcattcattgagcaggtaatcaaccggatgatcgctcaaccattcgcgggactctttgccgtgctggtgttgaacccgatagagataacagggcatagtggcaatggcttcactaatcacggtgacggcattcatcaccgcaggtaaaccttcggctgtcgagggtgaaacatgctcgccagatttggtattaaccatgcctaccagagaaaacaattcatcaatggtcatactacgagtttcagaagcttttcgcttaaagggccacatgatcacacctcagataattgcagccagtaatgacgcaagcaaggtttgactgcgtttaatgagcgtttggcaatctcaacaccactttcaggataggcgggtaaactggtgacagtaatttcccgtaattcagcctctaagacggttctgatatacggtgtttgattggtatcccactgatctttaacggcacgaaagccaaaggacataccggaaatatcaccacgttcaaccagtgccagtacatcgcgtcctaattgcgtatcaggcggggttaactcaaagcgtaatccggtggcatcttcggcaagctgcaacgtaccggatgtggtacggcctaacaggttcatatgatcatgttcatacagtgccctgatatcagcacttgccgctagactggcgctaaaggcattaggggcgaattgttcgacaaactcatcccataagacttgtgatcggctgttccacttaatcacatagcctgtcagctttttatcactggcagaaagtgaggcggtgcgaatttcaaaatcattcttcatcaatagactccaaaactgaaagggggctgtgccccttattcattaacccgctttagtgcctttgatttccagcaccttgattgcgttggaatccaccagcccaccgcccagatatttatcagtgtgtaccttataaaatcccggttcggtgatattgtcgggacgggtacgaatacccgtttgatggtcaacgatgaagtaaccgcgcttgaagtcacccagaccaataatgttatccggcataaattcgagatagtggacaggcaagcccagcaacatatcgggatcgcctgcctgtaaacgctcccgccagatataatctccgttgctatttttcagcttctgcacgttggcggcagttgtggaattcatcacccaaacagcatttttacggtatttgttcctgagaagaaatttcaggtcaatcaggctatcggcttcaagactggttgcttccaatttttgcaacgtaccgaattcgcgaaccttatcggcttgagtatcgcggggataagacaaaaagcctgtagctttcttgctgccgtcaccactcaccagatcggtttcttcggtatcaacaaaggtgtcagcgatttctgaggttaaccagcccagaatatcgacatcgctaaaatcgataatttcctgcgtggttttgggataggcataaatcggaaacagcttgatgctgacttcttccattttcggtgtagctgtctcactgcgcgccttgccttcttccccatgagcaaccgctgcaccaccgaccgaaacaagttgcttatactcattactgcgtgtggttttgatggtacagattcggcgcataaccgactcatcagccaactgctgcatgatttgtttgttcagctcagggataacggtatagccaccgtctgccggaactcccgtagataaggagcgagtttctccggtcaggatatagtggcgcaattcgtcattattgagtttgttattgatcggctggtttttggcttggctgcgttcttcatcagataaagcctcataacgggcaatttccgtattcaggttatcggactggctgcgcagctcgtcgaactgtttggcttcatcagcattgagtgagcgtttttcgttttcggcttgagtaagtaacgaacgcatttgctgggttaaatcgtttttttgctggcgtaattcgagtagttttttcattgtgtcttatggttatttattttcctcaaagacactatttaatactatctaaaataattaaaaagcctctaaactttagaggctaaacaggacaaaacataaggacagaatatttacaaaaaatttcatttacacagcgataaatttttgacgtaagtagttggcgacatccacgatattttatcacatgttaaataaccatcattttttaacttatagctcacataaaaagatataggcaaactaacgatgaatgatgtaaccatcagcatacttaagtacttgacaataaccttgttaaatttaggcagcctatcaaatagaaagaaaaaaatagaacctgataaagaataaaacaatagaggaaaagacataaaacatatgataacggcgctagaaaatgttatttcatctctcattagtattaatgaaatagcagaatcaacaactaagctcatcataaatgtcagtcctaacaacagaattagcacacctaatgctttaacatatttactcttcacctcatccttcctaatccgttaaaaaaatgtcgtaaatccgcttctggcgctcttggttttctgtccctttgttcttttaaaaatgctattaatttttcacttattccatattgtttatcaagaacgtccaaaccataagcaaccaaaaaaacccgttaccaaaactattccagcagcagcaataatactcccacctacaatggctgttgcagttaaaactgtaccaacagcccaagatgcagccgcagtaatggctgttttagccatatcaattgttatgtttccgagaaaatcagctaaagtatactcatccttaaaaatactttctacgactcgatatccaatagaaaagatgatgcagaatctaacccctcttacaatgctgttattaagaccctgctgccctatccccatccctatcatttgaggatgattggcaccgtatcgtgttcccctgacaagtctcctaagacctgcatgccccgacacatgaatatacgtgcggccattttctgccacatgtgttctagccgtgatatttaacctctgaaactctcggcaaacatcataaaatcctcgtgaatcatagatatttccggcataaggagaaataggatctgtgacagaaaatacatgtgacataggaccttttgtctggtcgtcctcttcaatacctcttgccagtgattcaccgtgacttggattttgtggacgactaggattgatatcttcaataatgctttgggcttgagctaatgtaagaacgtagtgatattgagtattcttatttaattccttttccaatcctatactatcaaaaaattcatgctgaggtattaactggttaattcccacttttccatttaaataatcccccaaataaccgtgccaagtgggattataatctttacgcttggtcatttaagctctccatactatttcatattgaataattccaaatgtcaccattcaccataatactaataaaaaataactgagttatatccggtgactcccctagaaatctttttggagccattcactgtacacactatgcaagatttttaaaaagcctgtcatatctggggttgtggccattaatatggtattcattaactattcatctgttaactaaaacatttttagattatgtataacatgtatacttagtgtatagaggaagaataactatacatcctatttttatatttaaaatcaaaaaaatacgccatttaatgtacagaatgtatagttaaacctaaaaatctataatggtataatgttgagatctttatgctcaggtaacgatggaagccattcttccgcttcttccgacaactcaacattataagaataccctctcgttgttctcgtctttcgataatctttccggtactcctgcataatcttaggaatagattcgccaaatttagtcaatgtcagcgggcgttcaaagccgtgcgcttccataaaggaaagataagcatgatacagatacaacctcggcgctcgtgggctaatgttcttagtgcccatcttcatcccagttgcatcattgacggttaccagataaccacaaaagcgatacaacggatcggaattgcttttcaccgttaacgcctcgttagaatcgcgttgtgcctgtagcagctttttagctttgttctggtcggcaaattcgtttaataaatggcggataatcacaggcagttcccggctgattttctccggcaagtgtggatctttctctgactctttgaccggaatgttaaacgggaatatcacccgccgtcgtgcaataccgccattacgttcggtaaagctcatcggttcgttattggtggctaataccacggccttaatgaccgtagaaaattgcttctcatatttcccgtcaacttcgattaaatcaccgccagtaatcgccttaatgcccgcgccttcaccgacatatttaacctgatcgggcagcgtaatcaggcttttcccgacaaactgataacgtcctctggcttcatccagcgccttcatattgccactggcggtattgtgttcacctgctaataaagccgcaatgtaagtaaacacacttttaccgctgccaccttcacctgtgacttcaataaataactgccagtcataacgattagccagaatcatgaacaaagcggctttaatgcggttcatcttgttttcattgctccccgctgcatgagacagccagcgataaaaatctggagcatgattcggcaaattttcaccaatagcaggcggagtgaattcgatgccgttatggttcattagccagtgttctagctgatgtgggataaattgttgttctgataaatcatacacaccattactgaacccgattaaatcctgccgtggttcaccaataacaggaatttgtaatttcatcgcactaatcgcgttattgatcccgttcgggctgtaaggggtttcgtgctggtcgaagattgccaccattgcgcggcgcagctcattatccgacacggtttcccatgttgtaccgttatagtggtaaaccatttcgctatcaggattaaccgccactttgccgtaccgctcaaccaacagtgccccccgctgactggctgccatttgagccaaattgttcttggcctttttggactttgtttcgtggataatcacctcttctacttccatgagttttttctctccaacctgatataacccattgctgaatgcctgctttgctgcctcaatgccgtgatgctggcgataatcgtcccagtcagatttcagtgccgtaggcggtagtgtgacccagccgttaatcgctatagcggccttttctgccgctatcttaccggcgttcttttttaacctgccgtttttgtcccgtccttccggttcgtgccaatcgttatcagcagcaaggataatttttgcgttaggccattgagttctgaccagctcggcaatagtgggtaaattactttcatcaatggctgccagtactacgcctttatgtaactgtctgaccgttaacgccgtagcgtaaccctcggtaatgatgaaagtgtccggcgttccggtaatctctgagacgggaataaaaccacctttcttctgagttcctgatacaaggcgtttttcaccgttcggcttgatggtctgcgcgcccgtgattttgccgtccagagtctgaatcaccagcaataaagagccatctttcagtaaccgctgattggggcattgcagcccctttttagtcagatactgagattcacccataacagaagttgcaaccagcgcagcgatgcgttctgtaatcggttttactgttcggggctgctctttagcgggtttgggttcaggcaagggaagtgctagcgcatcagctaccaacttagcggcggcaaagaccgtgatccctttggttcttgcgactaaatccagtccatcaccgtgattcggcgcatcacactggcgacaatgccagtcaccatgatggttatcatctataaagtgaaagcggtcagtaccgccgcatatcgggcaagcaccatgtttaccttttgccggaacatcaacaccacaagcaggcaacaggctttgccagtgcttgatggctgatgttttaactgttcgaatcacatctaacgggcggcttttctgattattatttccctgactcatgatcacgcgtcctcaccattaaccgctgcatagagcgaatagtaaacttcctgattaatatcacaggctagcgacagcaaatcgtgtaactcttccgaacagtgttggcttgcctgttcaagaatgacctcatataaagaagtacataaacccgcacgaaacgaggattgccctaatggatctctctccctgcgtacaaggcaattaactaatttattcactggattctgtggagcatgtttcgacaggtcgcgataaacctcctgatgaatgccgtgtgccaatgcaatcaggttatttaaattgatttcacagtgttcatctttggctttttgggtaatgaacgtgaaaagtgaaatacccaaacttgcacgatgcagcgcctgttttaatgagattggtttcttactcatggtgtgccccctgacgtaatgcaaagatcaaagaggatatgtcagccagccgctgagtgtcggatgcaataaggaatgtaaatttaaggcgagtttggttagactgtgtatcagccatagcattagctccgataatgttgtggtcagacgcctcgacagtgttcccgcacttcggggcgttgttattttcataccatacacaaggcttggtgtaagacacatgatagatacaaggtgtcttacatgtcaactctttaaattttggtctttttgcgtatactgtcttacaccaattaataagaggtgcagaaatggcaacaggtgcaaaaaatgcgaaatcacaatcaataacagtacgagtactacacgaattgattgaaggaatggcacaaacaaaagaacacaacgaaagtacagggcaatttgtttctgcggcaatgcgcgctgagatcaaacgccgccagcgcaaagccaaaacatcatctgagtaagcataatcaattaaccctcttaaagagggttgtttctcaaattgatggttatttaatatcaaagaatctctgtaactaatatctaccatcacaccaactattcccgaaattaagccgcttttagggtgaatttgactgctgccaattaaggcatttaatttttcatagcattattttttagttagtaggtttgcggctatatgggttattcacgttttctactgtgggtggattacgtacccaatgcagcagatcactaagcaaccaagcacatgaattgcggcctaatggcttacgggcagggaaacggccttcattttctaatttccatgctgacgttctagaaatagaggtgatgtgctggcgttccttttcacgtataagacgatcataaggttcaccatattcggaaaggatggagtggcgttcttctggtgtaggagtactgtattgcatgattatgttaccctcactgtttaattgtttttgtgagggtattttacttaacagaaattattacgaaagaaatccacatttgttacgtgtatatcacaatggtcattatcacaactcattaattcccattattgagctgcttttaatataaccacattctcataattacccgctaatacatccagtcgctcacaccacttgtttaaagcgtccagcttctctggtaaatattggctcttgttatatatcgccataatgcccggcagtgcatggcctaacagttgctcaacgacatgaggtgcgatgcctatatcatttaatttagttgcaaacgttcgccttaaatcatgcaaagaccattcctcgtcatgctctaattttttccatatttttctgccatattgtgcgactgcttcaagttttttaatttcccctaagagataaccacttttatggttttggtgaataatatccattaaaaatggcttcatatattctggtattggacgaatgattttctcacctgtcttgctattttcttttgggacagtccatagcatagaattcaaattccattctgaacatttagataacctgatctcccgtgtccgacaaccaaatacaaccaaaattttcaataaattattataataaggtaggtaaatacctgtatttatagagtcccataattgaccaagttcatgatcgtctaaatatcgctggcctttattttgtttttttccaacatcctgaatagttaaatcatccaatacatggctaactgcataccttcttacccggcaaaattttagagtttgcttgcacaattgaaatacagaaccagcagccaccggagctttctttttcattctatcaaagcattgtagccaatatattgtttcgcagtcagacaatgccatttcaccaatataaggataaatatgtttttctaattgcagaatgagggtatcaatattgactcgattttctctgccgtagtgctctatccaatattcaatagcgtctttcacagtgactggttttaatgattcctgcatcactaagttaaattgcagctttggatctttcccagatgctaaccaactacgacatttatccctcgtttctctagcctgcttaagacttacatcaggatagcgcccaatggtaaggcggtttaacttttttccatcaagtcggtacgtaaaaacccaactaacgccaccagctttagatgctttagcgctcaaccccgcaccatcggcaaaaaattcaatattgcccctttcttttccgtgcagagttctaagttttttgtcactgagcttgtttagttcggcagccatgatcgctaaaaatatttatacaattgtttatacgcagtgtgctgcaagagaggcaaaacgtcaataaacactgtaacaacatacagtttaatgattaattaattatttgatctttatataaaaataataatcatggacaaacttcaaaacacaaagtaaatatatatagtctgcaatgatttcagatacatttacgctgtttgcagcgatttctttgcaaacgtgcgaggctgttcccaatatttccagaatgataagagagcaaccatggcaaaacacatcatattttccgccaccggcggcccagaagtactcaaatatagtgaatttacccctgttgaccctgcgcctgatgaagtccaagtcgaaaataaagctataggaatcaattatattgatacttatgtccgcagtgggctttacccaacagcaagccttcccagtgggttaggcactgaagctgccgggattgtcacaaaagttggctcgaatgtgtcatacatcaaaatcggggatcgtgtggcgtatgctcaatccggtctgggtgcatatagtgaagtacataatgtccctgccaacaagttaactattcttcctgatactatttcatttgagcaggcagccgcttcccttttgaaagggctgacagtttattaccttttctatcagacatataagattcttgaaggtgaaacttttctgtttcatgcagcagcaggtggggtggggttgattgcctgccagtgggcaaaagcattaggtgcaaaattgattggcaccgttggttcagatgaaaaagctcgccttgctcaaaacgcaggcgcgtggcagaccatcaattataatcgtgaaaatattgtggaacgcgttttggaacttaccaacgggcaaaaagttgatgtcgtttatgattccgttggtcaggctacatggctggattcacttgattcgctggcaccaagggggttgatggtcagtttcggaaacgcttcgggtgcagtaaccggtgtaaatgtcgggcttctcaaccagaaaggttcgctattccttactcgcccttctattaacggttatatcactacgcgggaagagttagcagaagcgagcaaaacactatttgacttcattgccagtggcaaaatcaaggtcgatgtgccagaaaaccaacaatttacactgagcgaggctgtcagggcacatcagatacttgaaagccgcgcaactcacggttccagcttattaatcccgtaatttctaaaacacctgagcggatcacatccgctctgtaaccatttccagtgctttttcaacgaccataatatccgaaccgggtttatgtgcattttcgctcagatgacgacgccattggcgtgcgccgggaataccctgaaaaatgcccagaatatggcgggtaatgtggcttaaataagtaccgtttgacaattcctgctcgatataaggataaagagctttaaccgcatctaccgtattcgttacttgagcgttttggtcgaataattcacgatccacatgtgccagaatcgatggattctgataggcttcacgtccgatcatcacaccatccacatgtttcaaatgttgtttcgcttcttccaaagtcttaattccaccattaatggaaagcgtcagttgtggaaaatcctttttcagttgatagactcgtggataatccagcggtggaatttcgcggttttctttaggactcaaaccagataaccacgccttgcgcgcatggataacaaaattatcacaggcactattttgcacaacagtaccaataaaatcgcacaggaactcgtaactatcctgttcatcaataccgatacgagtttttactgttactgggatatccaccacatcctgcattgctttgacgcaatccgcaaccaatgtagcgtcccccatcagacaggcaccaaaacgaccattttgtacacgatcagacggacaaccaacattcaggttgatttcatcgtaactacgttcctgcgcgatcttagcacactgcgccagcgcctgaggctcactaccgcccaattgtagtgctaatggatgctcttgctcgttataagccagataatttcctttaccgtgaataatcgcacctgtagtgaccatttcagtgtaaagcaaagcttctttacttagcaggcgatggaagtatcgacaatgacgatccgtccaatccagcatcggcgcaacggagaagcgggaaggtttgaattttccgctttcacttggtatttcagtgaattcactggtgtttttagtttgtttattttcgtgcatttcagattgttttgggctatttttggactattagcaccccatagggaaccccataaatatggggacctgaataggagaacatcaaagatggcctactatagcatagaaaaacgcccccgcgcagacggcactatccgttatcgttgcactgtgggtgttaaagccagcggtaaatatatttatagagagaaccgtacattcggaaagcaagctcatgccaaaacatggggtgctatgcgggtggctgaattagagcaaaacggaatccctacacagaatgataccgaaggcctgactgttggcaccctgctatataaatatatcaatgatccagatttaggtggtaaggccgggaggactaagaaatacgtgctgaatatgcttcttgattgtgatttagcaagcatctctctatctgatttatccgtgaatcatattattaatcattgtcgttatcgccgggaatctggcgcatctccaacaacaattaatcacgacattagttatctggcttctgttttaaaatcagctaaaccagtctacggtattaattatatatctaacccggcaagtgatgctcgccctacattaattcagatgggcttgattgggaaatcacaaaggcgcaacagaaggccgctacaagatgaactcgataaactaattgagggtttacgtagaagaagtgatcatcgagaaggaaagatcccttatgaagatatcttaaatttctcaatactttcttgtatgcgtattggagaggtgtgtaaaatcagatgggatgatatcgataaaaaacagaaggctgtgctcgtcagggatagaaaggacccccgaaagaaagttggtaatcatatgtcagtcccattactcggtgaagcatggaatattgctcagcgtcaaccaagaacaagcgaactgatatttccctataatcccaaaagcgtaacagcgggttttcaacgtgtcagaaatgcattaggcattgaagatcttcgctatcacgacctacgcagagagggtgcaagtcgtttatttgaggcgggcttctctattgaagaagtcgcacaggttaccgggcatcgctctctgaatgtactctggcaggtatacacagaactatatcctcaatcactacacgaaaaattcaataagttcatgcatcagaaggcagagtgactcataaagggcagaaatatgcccttctgcacattgattaatctctccgtttgaaacggaaggattaagccaaagcgaggaccacggaagaatcaatgggttaaaaggggagaattatcctatttagataattgattgattttgcttatttcctgcatggtgacagaaataaaataaatcaataggttagcagatatcaaggttataaggtcgcgtaaaagtttacgtgagtctgcgggttaattatttatatcaaatataaccaatggaaacagtttagctttggataatatttttcattgcgattgcgctctatctgaattaattgttcccactatctcacaaatcagataattccctattaactatcaataaaagcaatatagtgtatgtcgttctatgcataaatgaagcagataactgatagcattcttgctataaaatcatggcggtagatccaatcgttccagtgatatacatacgtgatttagatacatattattgttgggttgatttgccggtatcttacaaagccataccacaacaaagcaattaaaaatcaattaattaaaaaaataatattcaataatagcaatgcgcaatataaagcttaattaaacataacgcacaaagaacaccttgccaatcctactatcaggcactataaatggagtataatttgtgaccacaatacaacaagaacgtaccttttatatagttaaatttgaagaccattacagtagagtcttgcatatcgtcattaaagcattagagcaaagtaaagtgttagctttaaatacaaacctactaaaactagaaagtcctacatttaaagaaagagctaatatcttaagtgaagtgcaaaagagaatgctcccagtagcaaccgctcttggacttgactatgatgcaactgttttagatgaatacattgatttaatgcaccaaatggccgacgctattgaaaatgatgacacagatgaactacaaaaaattgtaagaattttggataaaaaaccttttatatgccaagaatttatataatttcaccgcgaagtagtatcaattaaatatagtgccaaatataaacattaaatcggagataatttatgaacataatagaaattaaaagatacttggatgaaatagataaattacttacccgagctgaagagttaggccaaaagatagatttagctatttataatagcacccaaaaagcagcatagtacctagctcaaatctattcactaaagatgtgattcaaaatgaataaattcacaaagatattaataaagcaacctattttagattgattttttaaccctataatttcatccactcacaataaagccaccttaaacacggtggctttttgcttattcacccacctacttcaccactcaccaccttctgcttcacattccacaccgaattcgccggcatctggacacggacatccagacgacagcctcactccggctgttcaggccagacgatatcgggggcagtcgaacaatccacccggttgagcaggacacggtattttttccatttgagcagggcggctttctcttctttcgtcgccatatcaagatcaacggcatcctgccagacagcaattttatctttggccacatccatcaggtattgtttttcatatacagcttgttgctgtaactgctcaggcgtaggcggtggattcgtaatagcccgggcttctttttcggtaatcaagataaaatccggctcaatccacgcatcctgagagccgtctgacgtaaacgcatgaacctgattatcttttgatttgtagtatttcatgttcacctcaattcaacccaacgaacaatcgcatcgggtgtcaaagtcaccccccaccccgctttcacgatataacgacttcccgggggaacaataaaactaaaggaatggatgctgttagttgatacccaaaaataacccacccgataattatcgacttctcctcccatactgaacggccccgttcttttatcggtcttttggctctcaacatagacggtgatcggtttccctgtatcattgacataccacgtatcattactgcggactgacatgacatccgtccagatttgatcaacaccaagcaattgtgatgtcagggccaccgtgcctgtttttttggggaaatcaatatagttcagtgtgttatttttgttatcccgataacggacggtcagcatactttcgctgttgtccgggttagccgctagcgtggtgctgtaaccgctgggcttttttaaaacgacaccggcccagtcatgcgttgcattcacatgcaggttgccacaggtgaacgtatcttgtgagattttataagcaaagcggtcatcaacctctttcgttgagtacacgcctatttcttcaggtttgggtttgtgcgcctcactatagacttgtgcccatcccccggtatcatgacgttcatacaacttagccccacctatccagccggccacgtccacatcactggttgtaaaaactttaccctcaatggtcccccctgttttagggtaagccccgagattgttcacaaacgccgctttatccggaatatccgccccattcttcgctttctcaaggcggctattggcgttgtcgttgacctgattcaaggcagtattagtggcgtaatcgcctttgtcttgtttggtgttcagagcatcagtggtagcgttctggctcatcacctgcgctttacagttaccgactgattgtacgacatcagagcgattgagctttttattcagctcatccagaagctgagtggtacttacctgtttccatgccgcattcactttctcagacgattctttgttaaagttaattttgttgttatccaccagactctgaaactcacgggtttcgtcatcagactgcaatattgcccctttggggtagcccccggtcgaatctgcatattcctgcgaatatttaaacttcccgccttgggataaatacacgatattctctgaaatctggttcaggataccgttaaaatcccgcccactcggtggcaatccacctgcggtgacgggcatcatggtgatttgcgggaagccggtatcccatgtggccttttgactgggcaggtctgatttgtgattcgtagggatcgcgtctttttgcccgttctgcgcgaagggcttggggattaaattagggtttttcattgttcaccttattgtgcaaaagcggcctgaccgaaaggctggaagcccgttccgtagaagccgaaaaattcacccgcgggcagttctgcgatagaaatctgaacccctgacggatgcggtaagatgtggtggtggtaaatcaggttcttttctaattccgataaccggtattcaaaaacatatcttgcggtcatgtgtccggtgatcaggtaataggcccggcctgtaaaaatgcaacttttcaggaaccggttaatattcggggcggtggcatacaggatattcgagtaagccttcattaaaatcacgtcccgataagtggaatcatccatcttgtaggacatatctgaagacccgccactgtaaaagggtgactggtcaaacggggtatatttctctgtctccttaaagccgaaataatcggcattcggatccggtatggataaatccctgccaatgccgacaatccgcccccagatatccagcccgaaccctttcgctgtgagtacattgactgccagatgataaaactcatccgtactggctctggggtcgacagtatcattgaaattattgaggatagtgcagatagtggggctgttagcgtactggctcaggaaggtgtcttttatctcaatcatgacgctatccttatgtcatccaccgataacaccgggaattcatcaatgccaaactccagataatttgctaccgcctcgccttttctggctacctgaaccgcgattaaccgctcagtcgcagcttgagccacaacataaatgtaatcactggcaatcagtttcttggcaatgcgaccttttccccgacctgtggtgaattcattcatgaccgcctgacgggtcgcttctttgtcctgatgggttagcttcaacttatcttcaaaggtgataataaactccaccgggatatgatgcggtctgatgaacttaatatcgtaaacaggcggcatgtaaggaaagctttcggtatcttcgtacttgaccgtattattacccataaaagagcagccagacccggctttactcagaatatgccgggcaatctcattatcatcgccccccacgacagacactgcgatggagttgcgaattaacggataattggtgaaccctacggtttttgtttcgttagagggattatcaataacgtaacagtcgatcacgcccttaagattacctaccgcaccctgtgtcgcggcattagtatttttggcattgaccgccacagactgctgtcgtcttagctcaaattcctgtcgggattcggcctctttgcccacaatggcggcctgtttattgataactgagtctaccccggcaatagccttcacaatgcgattaatggactcggcagccgcttcaattcgtccaataacatcacagtaaacatgcacagtgaccagtccatcatcaccgattgtggcttccgtctgcgtactccatgtcctcccggcgttatcagcaacctgaaaaccaaccggaataaccgcattgaccagcccattaaccgtgatctcagcaacagacttggtagcctgcttacgttgcaggaaataaatataccccagcgcatcctgcatcaggccgtcagcgtaacgaggatcaaagctgttcaggagatggataaagaagttacgttcgtcggtgataatcgcagtcaaggtagtcactagctggccttgcggggtgttcatgtcggtattgagattgtcaccaaagcaccctttaagtacctgccaccagccgtcaatgacttcctgtgtagggggcgctaatatcccctgtggggtcatttgcagttttgggatcatagttcgatggctcccttggttccgttaatatcagtaaacagtattcgtcctctcactaccctgtcattggcggtgctgagttccgccgtagctgatatcactccctcgacagacattgctgcatcctctaaatacttgcggtacatcgccagtgaatagcggttcttgcctaagatttcctccagatacggaataccgtccccttgcgagtaatacaagtctttgacaaatacccggcaggcattagccaccgattgcgctctggcgtactggtctgaagccacagcaatgttgcccgccgcatcgagagttaaatcccatgtggcaggcattaaaaataatgtccgcatgattacgccttctggttaggtgggctggtattagagccttgcccgtgttctaggtgagtatggcggttatagatttcacgcataccagccattgattggctattgatgattgtgttgtcggtaatattgctcttggcctgaatggtgctggtcgtctcaaccggcgcatccagtacaattttagtggctttgacgttcacgatgccggtggacacgatatctattccactgcccagaaagtggataaactggctcggcgtgccattcagtaaaccaccgagatagagactgtccgccatatcgtatttgcgtttactgcccgggggcgctgaattcttggttctcttcacctttgagatatcccggctggcggtaaaacaaaagcccaaatcccccaccttcgggtcaagaatgacggcgttctcgccgccctgatagcgaaaatacggcacattgtagacggtagcattctggtagatattgcctgcgccatcgacctgttgtaccagaggcaggatatcgacatgccctaccgggccaactccgcccccgtggattttctctacccggcaaatggtcaccgtgcccattctgccaatcagtgaccagataatggcttcctgactgagcgccccgccggcggtggtttgtggatcataaagtaatacccgttcacttcttgatggcggcataatttcctcctcgtcggctggctgagacttccatcgcccattgtgcggaatcctgttcggtttctaatgttgtcctgataccaaaaaccagccagtccccgttacatatctttatcaggctgtcagtaatacgcacgataccgccgaaccggacgagcggatcatagaaacacttgaactgcacgccgagattggttggtatggggtaactgattaagcctgtttccggtgagatgaccggtatttttaaggtgcgtcgggggctgtctttgtaggtgatggccacgtttttgtcttcgatatacacatccagattggcagcatgagccagttggcggattttatcgatgtccgtgttatgcaggtacggatctgagactttcacgctcaccccgttagactcaaaggtgtagcccatgcgctggcaaatggtcgcgataatagcggcaacatcgtgttcaccttcgtaactttcagcattcaccccctgcattttatccaacaccgccgtttgcgactcaatcaccagtgatgcattgggtacatcaccaaaatcaggataggcaaacgtgataccgcctctgaagacctgtgataacgcctcaccttcctctccggcctcaatggtcatcatattgcgaagcgcctcaaaattgccccactttttgcgcagtagcttctccatgatttcaataggcagaccataagctttcacccgcgcgtaaggcgtgattgccccgttgccgtagttaatttcggcgttaatgcgtagcccggtggcggcgagtttgttttgaccggaggtgaaagattcgtctttgcctgaaagcgtgagggtaattttgatgacttttcgattaaaaaccatttatccacaccaacctgtatcgagagtttaactgtgaatattctggatcggtattgccttctatgtccgcaaaaacaaaccactcacagatgtaagtcatattgcgacaaatacgattacaaaccagatattccccatttttcttgaccgtagcgaataaattttcaagccgggtttctaaagttaaatcgtagttatccccctcaaaggagaaagaaagcgtttgattggggattttgtctaaaggtatttccgctatcactagaagctccttttatctatttgattcaccatattttctgcctgagcttgcatgttcgataaatcacttcctataccctgcatccctctccatataattttagcgccttcgactgtcacttttacctttgacatgttgccatctttatttagctcacccagctccttagccatctttgtcaaagaaccgggagaagagctagattccactttctgtgtctgatcgcctgtatcctttttcttagcatcgtccgggttcttcacttcctctttgtcatatttgattttcacttccctgacttcttccagatggacattcaccttaatcagcgtagtaccgtctttggcttcccgtgcaaggtcatagccgacaatcgcagcattgatgtagacaaattccggtgtgaccacatgaaacttcaatgtgcttttcgccagtatctcaagctgagacaggaaaacgccacgttctaatgtaccgcctgaactcttgcttaactgaaccgtcactttgtaaggctcaccgaccttgttataagaagcaaatgagccgttctctatcggggcactcaccacccgatactggttttggtattgcagcgagatcacactatccgccagcaacagagggatgccatactgattgaatatcccccagtagttgccgaacagtgtattgattaacgctgcaccacccaggctaattccggcatccattgcagcgttggggatacccttccagttagggatatctggctttccaaacatagttcaccccgtttttagatgtaaaaaaaccgcactaggcggccttagaaatgaaaaacccgcacagggcgggttagttattgtctctgaaatcttgagctattcttgctagataacccattatcttaggattcctagctctaccgtgggcatcagggtgcattattgctaataaggaatatttgtattcttccaaaagcccttgaacgtaaaccaagcaagcatcgtttttagtgtcacctgatttacaagttctataatactgaactctgttcttggggaatgcgtcaggcggaaaacaaagatgaatatgcatcagacatgatttatatgcagcttctggttgagtataagcgacatcacgaccaaaataatcgggaacttctccagtctctttataatgcttaaagtcttgcaatatagcttgctcaagatctggatgcttaaggaagacgtcatcaaaaaaatctttccttgtgtatttgtttattgatacgtccacttgctccatttatcacccggtaaatgaataattttcagactcaatctttttagttgtataagcagccagttctgatagcgcagctttatttatgtcacttttataaatagtaggcaaagtaaacaactgacgagaaaagtcatttaaccgcactatctcaaacctggcttttgccacggatttaagatagagccgtatttcttgtttttcttcatcaggtcggttttgctttaacatggctttaagcccctgctcaaacccttttattgtggtttcacaggctttattcatttccaagtcgttttgaatcatagctccacggacttggctttcatcaaggctcagaagatttagataataatcactgatttcattagctaataaatcaatagtttctcttctttcttgatattgagtttttaactcatccagactacagatagtcttacctacattaaacatactgcgttcgtcccctgaatccactggctcagcagcaaatgaaggaactgttaacgcgcctccaaataaaactcctgctaaacaacttcttagtagtgatagattcatgacgttttaccttatcaaatagttgatcacagtgagtcacaaacagtcatagagtgtcactaagtatcactatatgatacattacttaatcttacaactaccgacaaacggcaattaacgacttatataagcacgattgaaggagatggaagcaagttaaaagcactttttcgaaagataccttcactttgccatcactttgtattaaatgttatacatgtagcaaaaatcgaattagccctccgtggcctaccaccagccaccgagtcaatactaggtgttactgattatttgatcagcgatttcagaaagtgtgaagagatagacaaaagttcaatggtaaaaagcccctcacggggcttagtgtttactcagcaagcaaatcttcgttcaagcctattcctgagaatggagataggcccgcacaaattattgaatgccccgttaaacgcgtctgctatatcaggtgtcagaatagtaaaatgcggattgaacgtttcccacacctctttaaaattcattatatttttatatagagcattaacgttacttagctcaaatgataaatcaatttgctgggatataggcaaagcctctttacctagaaactcaccctcaatcactttagttgccaaatatgctatcgcagaaggaagctgttcatgacttagctcgtcaatatggtttaccccaaactcacgatgaaccatctggaataacgttctatcactgatgccatatttacccattagggtattaaccagtccacgtaagggagtgcgatcataggttgtggttttagactcaaccccttttaggttaaagtagaaatcttccagtttcccgaagacatcccatgctttgtcagtatccagcattttagcgtgacgagctgcaccgcgttctgtccataaagttaagctacgagcattctttccaactaactgacagttagtcagtctgttatcaacagagtagcttaaagatactctgttcttaatctcttgtaattcgttacctttaacagtaaaaaaatgtttaccttcgcaaaacctacctttatttctagcgtgattttgacgtatacgaacaatatcagtttcataaacatcagctaacaactcagtagtaatgaccggaacattgttgtgcatgatggggatcatgtgctctactgatggggagtttttagttaattcattaactgttatacttaccatgtttacttcctcttcacggggtaaacgttgtattagaggccccgatactatgaccagtagttcggggcttcgccatttaaagcgacatcatttattacgtaactgtaaccttttgtaaatatttacatgctaaatttgggaagcggctcgaaaattagactaatcaatcgatttaagatagggaatcggttgcatacccttaataacattgatagcttgattgttcgctcttcgccttccgtggcttaaatccttaagcgacttcttccagatttaacatcttcgctagcttggcaatgccttttgccgtcacaagaacctgttcgcgggtttgttcttgaccttcatcgtcggtaaatgaccttactttgtgctcaatgacaccctgctgtagtttgtcctgatacccaatccagtttttattgccagctcgacggtagatccacttcattgaatgcagcttgtcaaaaagggctttgggtttgatttgaagatgtttcgctgcgtctgtaacacacatactgccgttggattttgctatgcgctcaaaggctttaacatcgggtgtcatttcggcgacctgatcttcaagacctttattttccagtagcaagcgttctttatcttcttccgcttgaataaccattagcgcaagctcttttacattcggtaatcgcggaggcgtgttgcggcgttcctgttccagtgtaattaagcgatcaatgactgcagcgcggcgaacaacatcatagccagtaatcagaatttcagtgtgtcggcggtcgagtaagaactcaaagacataacctcggctatcaataactgcaattacaccttcaattagagtaactcgttgatttttatagttacgcaaatttgcgtcatctttatttagtttatataactgctccaacattacccagatgtcccggataacatcggtatgacgcttccttgccagctccgctatttcacgacttgacatcttggtgacaactgcgctagaagctgctacattattattagtcattaaagctctccgtagagttagtttgattaaaaccagtagccgttaactactggttttctgtttttagagcgcctgcaagtgccctagaaaattaatttgtcattcgttacaatggctaagttgtttatctcacggtaaatagcactcaggagccttagttgttcgagcagctaaggcttcgctattcctacgctgcattcttccgctgtcctctaactctattcatcctgtcctttaatatcttcacgatctctgcatttagagagcggccattattgttggattcttcctcataccattccctaacctcatccggcatcctcaagggatacgggggtattcttttcttatgactcacaatgactccttatttacccttaaaatcaacttacttcgcttacataatggatcataatgactcaccttgtcaaacatatatttactacctacactgccggtaatgagtctaaaggagtcaaagtaatgtcacgtatagcgccataccctttacgcatgccgcctgaattaagggaagcgttggaacaaaaggcagagaaatcgaagagaagccttcagcaagaggttatttatcacattgatatgtcattgcagattgaaaagctttttgcagccacttcatctgacgatatttatacgcggatagctaaggcgttaaaatcagaaagcgagtctaagaaaaaagatgaagatattgagaaattaaaaatgcaaattagtctgttgcatggaataacaaaagacacagacacagacagatttatgaaaattagtacacaggttaaaattgctcaggaagccctggataacataaccaaacacataccaccgagatatgaagagcctataaaaactaaaaaataatatcttcttgcctcagtaccaacaaaaaagccccgtaggggctatttacccgcaggaacactgagattcattaggctcataaatccgccgctaccacaaaccacatactcaacaaaggatggctgtcctttcttaagtaatttttgcacactttgtttgtctgcgttgcttaattcattaaaccccgtaggtatggcgaagatttcattattcaatgccttaaatttaatgagatcaatggtattgccgctctcagaatactgaaaaccatcaatcgtaaagaaccccttgccggactcacatccctcaacaaccttatcaagattgttaatgctagccgttttggttacttcatttacggtaaagctgggctctgctaacgatggaaatgttatggcggtaagtaatagagcagtagcaattttccttatcattttagacctcaaatcaaattaatttggtttaattatagtctttatgttgaaagacaaaagacatccttgtctcagtttgcttcaactcattgatgtcataatttgagaaagactcaatcttgcagcttcgcctgcatcggttaccgttcctgttaccgtatttgctgtagtggttacgctgataggcgatggaaagtaaaaacccaggctaggcgggctgtgtatacatacttgtgttatttttcgaaaagaaaatggtattctcctaattcaacaagctcttcatcatatatatagcctgcatcttcaattactttctttttcttatacctttcaagttcttgccttgcgtgatctaacgcagtatcttttagataatcttgatagcctgggaaaacatcataatcgtttagagttaataacctgtctaattgagtatgaagtgaagacatggtcatctttttcccttgtaacgcagtagcctctgcgtatagcaggaattgctcagatagtaaatgcaatcgataaagctcatcaggccgaagatagtttttccctgtttcaatctcttttttggtagggaaagtaccagctattgaataaagccccatgttatcctcacgatgatttgctctatcaagaatcagttttgagcttgtcatcccggtaactgcatgatgaaacttgtcttgcagaagcgcataaaaagtcctgacttcttgagatgagggattataatcagaagcactaatcttaaaacattctcgtacttttgcgtaaacttgcttttcccctgaccttatttcacgaacttttgctgctagcgcgttaactttttcgggggattcactgagaactttttcgttaagaatatatatccttgctcaagatacgttcttagtgtttgagttgcccactggcggaaatttattgctcttttggcgcttactctataaccgacggaaataatgatatctaaattataatgatatattgctctgttaacggttctgtttccctcatttcgaactactgcaaatttttcagtagttgaagactcatctaattcaccatcctcatagatattttttatatgttttataatagtagtttcatctacttcataaagagtagctatttctttagttgtagcccatatctcttgagtatcccggtgtattttgaaatcaattagctcattttctttttgaaaaaccaccagactaaagcgttgatcggcactcatacagaattccctatagttaattgatttcaatagaacatagcgataaatatattaccatttttgctaatattttgatcgaaaattgtctgatttgtgagatggcagataagtccaatttttgtatggcactgataaaattagccctccgtggcctaccaccaaccattaactcattgacgatactagctgagacaggcttgtcctgattgcttccccgccgtctgatacagtgcctttgactgtgtctgagtttgagtaaacattaacattgccattcatatctactttaatattagtcgtgccacccataggcatactgcgtattctttcggtttgtgcgagaaactcatgaggccatccgtggctcacaattaaaatggatagtttggctttctcaggttatgtagcaccatccagttatccatctgaatagctttaatttggatatgctcactggctttctccagtatttgccttgcactattggcacatttgatagcgatttgtggatgggtagcatacgcccctgctaatttatgttcggctaattgaagtaacggctctatattcatcatgtaattagccatatcgacagaatgctgccacagccaacagagtgtttgcaggtcactgtcagatatttgctgttctgcttttgggactggtaattcttctttgagtaataactcgccctctaatggtactcgtgcagctaaagaaagtgcttctgcaaactgctcactctctatttctttgtaagtacatccaaaatgagttttcagggctgaccacatagttatcattgctttggcttggctctcttttggtaacgccttgccacgattgagaaccagttgcttgatagcctcttgctggtctggtgttatgcgcccggctatttgcttgggttgtttacggggtttgggctcgttctggttgaaatagtgatcttcaagtttttcaaagatatcccacgctttatctgtttcgattatttttgcatgtcttgctgatccgcgctcagtccatagcattaagtgcctgacatttcctgcaattttcacaaagggactatctgtcaccttgtgtttaaatgaacgtaaatcgttacctgttaacttaaagtagtgcttgccttcgataaaacgctctgcattacgcgagtagttctttttgatgttatcggtatctgttccgtacagatgagctagtaattcagtagtaattaccggagtgttgccgtgcatgatggctaccatgctttcgattgaattattgcttgcaattacctctgttgatataatagtcattgtcaaatttcccaatagatttttgataacgaagctctgattgttggctcagtcagagcttcacctttagcaacgtaaaccttcctcagtcagtgtttttcttatcctgctaataacttctttactaaatgtcctatcattaccttttgctagtttttcaagtaactccctcatttctatagggaatctaactgttgatggtttagcctttcccatgtttattttctcctttcatgtgtatgcttttgtatgtggtacgcatacatactatgtaggtacgcattgatagtcaataggtacgtatttatatttagataaattttttgtttttctgtattcaatgaggtatccgtgtctagcaggccatacaaaaatccacaggttaaccttcgattacctgtcgaactaaaagaaaaagtgaataagttggctgacactcatgggcgctcagcaaatgctgagatggttgccgctattgaacactgggtgaacatggatcatgtagttccagcaaatgagctaccggatataatccaaaggttagctaaagtagaatctcaactagaaaagctcactaagaaaaatgaaaaaagttagaggtataagtccatacagcataagaatgcctgacgagttaaaggaagctctgaccaaacgagctaagaaaaacgggcgttctcttaattcagaaatggtaatgattctacaatctgctctagatgatgattcacaacctaaaaagattgatgagctagctcaacttgaagcggataaattcaaggctgcgctgctagaaacattaaagaaaatgtcgcatgaataagctccagatttagaacttacaatatcttaccccttgataagctggctaaactatacgaaaaggataattgaatgccttacgacagatttaacccagagtggcaacaaaatatattattagcgttttatgagtgcaagcacggtagagtcactgaggaagagtgggaatcgctatgccagccatataacgcatacaaggatttttacgacaatataatgtatttagcaagaagtgacttgcttgatatttcagagtgcccaaggtcaaattcagccgatgatcacaggttcaatatgccaattgtactagctccgagttggattagcattacaaacaaaggcattgatttcttgcgcgcggatggcgggcttggcgcaatactgaatgtcaatatagtcaaatttcacgatgatactcttgaagcattaagctcttatattgacagattaaataccagcgactcagaaaagaacgccttaaaaacggaactgaaaaaactacctgttgatggacttcgtcacatcatgacaaaagtcatagacacggcgctcacaaatcctagtgaaatacttaatgtaatttcttccgcagtcagtcaaggctgattgccaatggctgcactataaatatgcgcagccatagatggatatagtgaatcatcttcactgtacggaaacgtattagttaacactggttcttccccggacttttgcatgtagtgtttaacttcaccgttgcaaaattcagttatcaggaaagagccttttactatttcgttgatgtagaccagcttaaagcgttggtctttctgatgatgaactttaccatcatctttatttaagtagatatctagttggttcatgtcttactccgtgcaaaaaaaccataagaggggatgttacaatggcgcataaacacaggctaaacaaattagtgttatgctgtacacataagatcaactactttgaggtgcaatgtaatgagattaataaaagccgcactccttataattgccactgtaatagcattaccttctctggcagcagagaataaaaaatatgagtcgatgacttatgcaggtaatgattactatatggatattcgcgctgggaaaatatatggtatttatgatgtacccaagaataattcaagtgatgttgacggctactggtttaattgctctgcccccgttacagcaattgtcactgttgtgtctgttacaccagatgaaagaactgtagaaacttttaaagtaaaagatagtgatggtaactatgaaacctatgatatatccccaatctacaaagatatccctcaatatgcttataactatatccgctatctgataaagcaggatgccaagataaaattaacatcccgcggttgcggtagcggtctttaccccacctttgtatctgccgaatctatcaaacagtcttgatctaagcggggattcccgcttagcccatcgatgtcataatctgagaaagacttaatctagccgcctcgcctgcatccgttacagttcccgttaccgtattggctgtagtggtcacattaatgtctccattaagatctactttgacattattagttgcaccagccataggcatactacgtattctttcggtttgcgcgaggaactcatgaggggcgctcatatccatgtttggaataatcggttgattcatccttgcttggaaatcagaaagtgactgcacaataccttgcgccttccggtcctgtagttctttttccctatattttttgacttcacggatataattacgtgtttgttttggcatattttccatgccatttctctccattttaccttccccccaattatatccggccaacatcttatcttcgttacctttaaattttctggataaattaccgtacattttggctgctgcatctgatgatttataccaatcaaaaacatcatcgccttttaatccatattcggcggcggttggcgggataaactgaaatggacctttggcctttccatattttgtctgaggtccaatagcaaatcgattccctgatgattcagccatagcaactccatataaccaccctgctggcagcccctccctcttctcaagctccataaaatatcctctcatggcattgagagcagcctgaccttttagcttattggcattcggggcgacaccgttaagctcatcaagagtcatttcaccgcgctgaactttgcgtttgcgtctgtcgaggtcaggatcgccggttgggatatcgagggtggttggggtgatgtggtggcctgttcccttaccacgattatctacccattcaccattaacccatctggcatcaccttgtcctatcgcagccattcccgcatatttccagtttggagcagtcctgaatcgctgaaaccagtcatattcaccaaacactgaattaagcacagcatcaacataatcaacactcgcatatgcagcccccgcagccaaaccaacagctccaactctccctactgcgcctaattttccggccttattaccaaccttggcggcttgtttgcctatccctttaatgcctctgcccactttagcgaatgcttttaaaatcttacctacccagctcacagcaatgtaagtggcaaatcctgcaaaagccattttgagtaaatcaagctcaccgttagtgtcagtgaaccacttgccaatcgttgtccctttgaaccacatctccaactcttccagcttctccataacccatatcagagtttcatgcgcctttgaccaatcccaaaaggaatcgccgccttttttccatgtctgataatcgtcataaacgccccacattgccgtggcgaaaagcgcaatcaggcctattcccgtaaacaacggtgcgaacatggcaagcaaagcagaacctgcggcaatagccatagggatcaaggctaccccgataaccattgccacacctttaaagactgagatagccgcttccctgtttctgttcagatactccaaaaatccagtcaccatctgagataatttcagtaagcgcggtatcaggtaattcgccaccagcgttttcagtccttcccattgctggctgaggacagcgttttggtcttgtagcttacgattaagctccagttcttctttagtggagataacaaggttcttctgtgcatccagacgtttctgaacagcttctttgccttcaagcaatagattgattgttccatcatccaaccccatgtgtttaccgatgttataagcttgtgggcgtggcatcttggacatgctgtcagccatatctaacagaatgtcatccagactgcggagttgaccttgtgaatccattacagccacttccaatgcattaaaataagtcagaacctgagcatcacctacagtcaccaaatcccacagtgacttatttaaacctgacattgtcgccgccatgccatcagcactaccacctgtctgttctgctgcattctgccatttcttgatggtctccgcgctcatgccgaggttcttactcaggaagtaaatcttgtcattggcacttgatatttcaccaatcagtttcgtaagtcctgtcgaaacaaagatagtggtaaacagcccggctaaggctttgactgcgccgtttatcgccttgtcccagtcctgcgttttctctgtcgttcctttgatattatcggaaaaattcaagacaacattggatgtatttttagctgacttccccacgttatccgtggatttagccagtttttggttagactgttcaaagtctgtggtactgcctgcggcttcgttcaccccgtcagagagtttcactaccgcagtggacgcaccaccagcctttttatccagatcatcaagcgctctggttgccttattagcatcactggcaaagctgttcatatccagcttgagtgaaacaagcaatgtatcgacgagggtagccatttagctctcctttgggcgtaaaaaaaggccgcttaagcgacctgactatatgatgggttagagttagcgactacttttaatccatttcattgtatattctccagctttccccgcccactggttgtactcatttactaaaatgacaagctcggcgtttgcttcatctaactccttaaatttttcatgaaaaaactccatgttgacctcatgtaacctatcgaacgggttcgggtcagtgtggtatttatttttcatgtcacgaaaagcatcatccctcttacgaagggtttcaagtatttttcctttcaagtgatgacagcgacccaatgcttcaaaatcaatttcagacataaacgtataatccttattcattattaagttgctcataaactatacctttcattagaaacattgggtaataaaaaaccgcagttaagcggctgatagaaaaaaggccccctgtggtagcccggtatgagattaaggatatttatcttcttaaattagcatcattaatcatcatcattacttcatctttaatggcatcgcagatattggctctgtcaccatcaaagattgggaatttcttgctttcagctcccactttggcagtcatctgatgaccgtcaacaaaaagctctatttctactaatgaagcacaaccacctctgggcgtgtcatcagtcactgtcccaataataaatttaaggtggtattcaggtgtcagctctatgcttgttaacggtaatttttggaattgttcgtcaccaagaagacctgtcataacatacggctgtggctctccatttaaattgaaccagacatcatcttttttcagccctagtgagtgtttatatgcctcaatcagcgcaaaagcttcagagtaaatcagattgattcttgcttcgcgttcttctttaatctttgccgttttctcacggatatcgttataggtgatcgtcataaatcttccttcattgcagttaaaagtgttcacattatcacctatatggttaatttgatttgactaagcccacattaaagaaggcgtaaaaaaaaccccgcattaagcgaggctggtttttggtaatgcaataaattatttagatagcactatcgataaaagcacaaacattgatggaaataaaaagaagatagccaatattgaaaagaatactctgctaaattttgttttaaatatacatgccggaactataagacctagccctataggaatagtagcgcaccaaaataaactaaataggacaatataagcatcaaaaagtgaagctattgtttgcatcatttcctccgtgcatattctctcatgcgtccattgtcattcaccaaaatatatcagtaattccacctgctcactaccgtcttaactgagattaattgcctgcttttcaccacatcaggcgaggtggttcctcacttaccgtaattaagggaaagtgataggttgattgatccataaacaaaatgaggaataagaaaaatggcggattttactgttcgtatagagcttcacaacgcaacaagctcagattacgaaacccttcataacaaaatgaatacaaagggttttaggaagacgattttaggtgaacgaggaaattatgagcttccatcagcggagtacgattacagctctgacaccagaaattgtggtagcgttcgagatttggcatacgatgtagctaaatcagtaaagacaaacccatcagtactggtaaccgaagttaaacgcagatcatggattggattaaaaagtatttaatctggaattgagcagtctgaatcactcacaatactaggctcttcactttccaaggccacaaatgcctctctcactctgtggcctaaataccgcgcttcgctgtccggtaaatcaaataactgctgatacttggtcttcagcatatctgccaatacttcccttgctgcctgttgtgaatcaagcgataaatcttcaaatctcattattcttctcccgttattggtttaatgtgtctgcatatttaaccacctcagacggcagtggttttgctactccccagcaacaaaatcgattatgattcaatcaccccagcgaacaaaaagagaaaatcaatggcaatgctgaaagagagacatcttatgattattcgcgcactaaataaccctgacaggccattacaacctatcagtgatgagaaactgaatcttttgggtgatatgttaggctgggatcaaatggctgacgacactcgctatttgatgaatattgggttaattaaccctgatgccgtgggttttagccatgatggttactataccttccgcactgattttatggcattgaccgcaaaaggatttgattatgccaatgtggatactatcggcggtgaattaaatgccgttaccatcaaaatccacaaaaacacccttgagcagattgaaactattattatgtctgccaatttgcctgagtcagaaaagaaaacccttttgcgattagtgaaagaaaaaggcgctgaatctgtcgtgggtaaatgtgttgataccttattcgctaacacaggcacagtgtcacacgtgctctctgagctggcaaaaagtgtactttaagcccataacgggctttttattcccccatccggttacacttgcccagtactgcattcactgggctaaatgcatcactactactcagcgcagctatcacacctgctttttccgtgccaatcacatacgcgaaattgctgtcatctctggcgacataataagtcacctctgacggacttcgtgagccggttcccagactggcgttcacatagccccatgagcctgatggccttgtatcaaaagccatacccgggtgcaggtcaacaccaatgtatttcccgtcctcatccgtgctgacattcatcatggctttcggaaagtaaccggacggaaagcccttgagattttgcgcatccttaaagatataagcggggtacatatcacagaaataattaccatcccggatagctagcttaccgtcctcccctttatacaccccgctatcagccagtaacgtacaggggaataacagtaaagccgcagcgattttcttgaacatcggacacctcacaacaagataacctgtgttaagtatagcgtttttgcctgaatttaagggtgtttgccttccatctcttccttgagacgcttgttatattcactagcctgaccgatttctatcagattcatggcagcctcaaggccgtagatcgtggcaagctcgtgataattggcatagcctgcggtcaccacctgaaagactacactggacacattcacggtctccgccagtaccccggctttcagcggtagcccggcctttagctgctcaagtctgagccaccgccttgtgtgaaaaaatcgatatggatagccagtgcttccttgcgtaacaaaaacagcgttttcacatcccggatatcggcattaaattcaatggcacgggcattgccgccggatgggacgatttgtacgcagtccagcagttcattcagcagcggaataccgtcttccgcccggatgttcgccagtgccttgattgccacatgcgccattgccatcatgcccatttcaggccggatatcaccgatatccacaccgccattagcaatggtaaacagggcacgcatggcccaatcatcggctttcactatcggcatttccgtaatcacaaaggtcttccctgcatcacggcctgattcaatagtgatagttttggagtttaacagtgacattatgcgatttcctctgcgccgttggtgaccatgttgaatttgtagctagtgccgtccagtagtttttttccactcgcacctccggtcaggctgattaagcctcccgttcctgtgtagcgttttttgatggaaggcatctcaatgatgatatcgatatagcgtgattccatattactgttgaaatccttgcggatattttccagtacctgtgtcgaggggctgtttgcctccagatacagtgtccacggcgtttcatggggaatgtagccgatagactgcttaccatcgacccctaaccgggtttccccgatagtcacttcaccgaattcccatgcgttatccgcctgaaagccctgaatcgtgacgtaatcgtcataaatacccttgcaccgcaacatcagcaccgcattggcggaggtgattgtgagggggttatgtcccattggcatgatggtttactccttactgaacattgatagagggaagcgtgacctgctggacactgccaccgtcggcataccagagcttcaacggcaaagagcggcgaagtccgcgtgtctgcgcagtcgcttcaccaatgcgcaagcaccagccctcggttttgatttgggtcgcggcatcaaagcccgcctcattgttaatctgctttttctgctgctctgacagggcaatcccacgctggatagcaccaaagttcagcatctggtcaatcgggtctttgatggcggcgcggtgaatagcggcgccgttatcgttgtagggaatgcttttgaagttcgccagcatggtcatgagcgcaagctgtaactgactgttcaggtagacctgattgacatagctgtccagccacttaaatttgccggatattgaccccggataggcaaagataaagcggtcatttgccgtaccgtaagccccgtagaaattgaatttcaggcgcagtaattcatcagccagtgctttatcattcaccgacggtttcagcccctcctgacggcggaaagcaaagttagtccgtccgttcagctcatcaaaactcaggcaggccggataaccacagacaaaagcaccgtgcgtgtgatcaccaaacatcaggtacgtgccgcctatatccgattcgataatggtgttagagataacttccagtacgactttctcactgctgtcggagtacagtacatggagataacgatcaccttgtaatgtcacccatttagcaatcgcgattctttcatccgtactgaaattgccaagtgccatcacagaaacaaaattgctggtctctttggtaatacggggcagcagttcttcaatggtatcggcattaataccgtcgtttttctgtgcgcccgtgtcttcgctcagtcccatgtagtcggctaaatccccggtgccgaatccaatcgtaccgtcgctgcctttctttgcgccctcaatggagaaggtacgactgccagagtcatacttacacactcctgctttggcgagtgatgccgataccgtttctgctagtgcagaataagacttgatgttgtcaggcgtgatagtgactacctgacgtttcccgtcaatctccagcgccaacccttgcggaacgtggttaaaatcacggacgggcattttgctgcccaccagcttagcgggttgatcgctggtcatcatagaagcgatatacagtgtttcaggtcgcgctgtagagccgacaaagcccgcaaaatacacctgcgccgcttcgtgctctttggattttgtgccgaaaatatcagcgacctgctcagcatcgccaaaggctttcacacccagcatcgcactaggcgtttgtttggtaataaacagcgcgttcagtgccagaggatttccgcccgtgccaacgacaccgggcaggacactgacaatgtcacttgccggaatagtgttcatggagattccttaaatagagttgagatcgagagagaatgagtcagtgttatccactgaataggtgatttcagggttgtattgcaatttcacttcaagcatcacgcggttttcatactggttcgcctcgttgaccagcaccatttttcgcggtgcctcactgtagagaggctggcatttttcgagctgagccgtggtataactggactgccagaggttagcgactacccttgcccgtgagtcagcctcctcgccgtaaaaatctaactgcatggacagctcgacagaacgctgcgctgtgatggttgaggcttcgtgatggtagtaattagcggtatagtcaatatcgcgctcaaacagaacgtgcatcacaataccgctttcaggcactggcacgtcattctgatagccctgcatcacatcacatgaaaataacgcaataaggtactttcgcacctcggtaaaaatatcctcatgcgtgactgttattgtcgccatagcagcaccttgacccatgaggggtaagactctatcaccttggtgacattccactccgagacttcatcttccccgtaagcggcgaatttcatccggtctgaacctttctgctttgaacgccggatagcggagatttgccctttggcataagcataaatgtactgaccctgctggttaatcacgcccaaatgctctaaatcctgcgtactgaggctttggagctgcacagtgatgtcatgctcggtatatttggggatctgcctgccggaatcagtgacggtgtagccctcgtttgcgaacagaatcgcactgatattcgggttaacggtggtaatgaggttattggcgatagttctgacattaatcatttctcacctttgaaatacaaaaaagccgcacgaggcggcattagatactaaaatgtcacactgattatgggttatctctggcgtgttttttgcgcaccataatgactgtcgcggccatttcccctagcataatatttttgtttttaaagatattaccttccttcattgcctctagccattcgacaatatcttcataatcaggctctgaatatgtggctttgaatgcctcgacattgacatcctctaccgactgaaagtactcagagcaaagctcaaccgcttccgaagcaattttggttgcctctttctgagtacctatagcttcttgtttgacatgctcaaccaaacaagtactcagttttttccgttcttcaaggattttagagcgcaatactttgttctctaaaacagggactgcaaaaacatggctaacactcattatgagtaacgtcactaatgcaaatttaaatttcattgtcgtttcctttcgttaggtcacgcaatgataacaatgaaacaaatcggctaccgtgatttattccccgcctttaataacttcgtaatcaattgctcgttgcatactgccagtatccactagcgtcttatcgggcgaggcgatcccttttttcgtttttctggcgaccgttgccggggcattaggaggtggtaatgactgttcgatactgtctttgatatcatcggccattatcttacctaccgtttcaaatgcggcttcaatcccgcctgattcctgtatgcgtcctcggagttgagcaccaagcacccgaccccattcatcggactgattggcaatggtaccgcgcataaaaggacgtggtggaatattacgggtgccgtattcgttagccgctgcataaggggcgataggttcaccggtcttttcgttagtggcgcctgccaatactcccgcacgaacctcaatggattgcgtacccgcaaggagtgctaatgcagccctgattttatccccacctttcatcaccatgattcacccccaaggatgataatgttttacggctgagtattgcccgccaaccacatacttacgggtcgcctgccagtacatttgtccgcacggcgtaagcttaaaccacgatgcattagcggcatccggcacggcaaacgaaacgctgaccgaaccttctgtcgcactggcggctgggcctgcctgaccgttattcccccagagcgtgaccgtagcaatatgacaggtcagcagatacagtaaggtcttgcgttcctgtgtgccgtcaggctcatagggaatagccgaattatccgagttatcgagcagtaagcaggccacatcaaacgcctgctgtagctgtcctttcgtcaggacaccggcaaagcggggatacagttcaaggaaggcgccactgtcaaaggtgacgatggccatcaggtactctccttcaccggctccgtggctgttttgctagtatctacaggctcgcgcccgtggcgcagttcttttttctcgctggctttatcgttagcactggtcgttttctcatcccagacacacagctggtttttgaagatttccatctcgccataatgcgtcaggatgtaatcccacttgtccgcatctactcgcgtttcaccgaatagacctacggggagctttcctttttcctgcccaaagagataaaaggcgttccctttcaacaccacactggaaccgtccggcatgggaaattcaataccatgcggatgattcaggcggacactcacggtttttccttttgacatactgcttttctccgatataaaaaatggcctccaaagagaccattaaatgttgttgtattgtgtcaggcttaaatgcctgtcatttgcgcaatcgccgcagggattcggatcactgcaccataagtggttgccgtgaatttctgcgagaaagaagacaaatcaggcacaatacgacctgcccgcattttttccccgaagcccaataaacccgtctccatgcccgcaactttcggggcgatgagctggatagtctcaccacttggcccgcccagctgcggcagactcaccaatttgagattgctgaagtaggtttccagcattttcatcacagaaacgttaaagtctgtcgcatcccccagcaacacgcgggcagatggtgagatagtcaggatcagttcatcacgctctgacaccagaccgcctgtttgactcaccagccgagcaaacaggttcaggatatcccggtaacgctgttgcgtggttttatctgcccacttggtggagcttttttcacctaccggggcagcggcaatagccgggtttaaattcgggtcattcagcacgccgtaaatctcgcggtctttgacgcccagcagataaaacttattgctatcaatatcaataatcgtcgcggcggcgcgttgcttatcggcagccagattgattttcgcctcagaagccatgtccgcctccaagtcaccgtattgagtcaccgtctgaaaacgatactgttcacgggtatgccactcgtagttcgtgccggatgtcccggaatgcccgaaatccgagtaagccgccgtgttgcctgtgacctcattagcgcgccacttcatatacggcgttgtccagtcgccacgcttctcttcgctgaacacctcacgggcgttacgtatcgcagtcaggatctcgataatcgtcgggtcaacataggccagtaattcagcgggaacagtggagtttggcgaggtaatgagtgccgcatcctgagccagtcgcgatatgctgccgggcgtgatccactgacgggcaccgttaaaaataaagccatattgcttggcttgttcaaaagaaatattactcattgggttctccacacgcatgacaaagcccacccggtatttcagagtgtcgcgtcatgcgtgaataatgtcagtcaggaatcaggcggtctgccagttcgagataatggcgaggttgctgtcggcgtcgtagtatttgactatccagcccgttttaacatacccatcaagggtcgctttcgcatcggcggtttgaatgctgccgtcagtggtggatgcaaagacagcctggtcgatagtcacgttctgattgctgggtgcgcaccagaagtcacctcgtaccgcaacggttacatccgtttgatcaggaatctccatcgtgcccggcgatatcagattatagttgtagtacgccagtaggcgttccacaaagcccaccggggcatctttgcctgctgtggcggtttttacctgcctgaacggatctgtacccgcaaagacgaaatgcccgatggtgatatccccttctgcccttgggttaccctgcgtataaatcaccggattttgcgtggccctgtcaccgggcaccgccggagcatagtacaggccgacctgtttttgtaatgccataatagcctcttaaattttgatgtttttcaagcctgcgaagggcccttccagactacttggagcggcatccatcaccggattttgagtaaatggcgatggcttttgcgctgccagcacatcgaccatgcccttatacgcgctcttgtcgtattttttgggatcatagcctttgtttttcaatgcatgggcataaatcgcttcggcactgtcaaacgccatgatatcgacctcacccaccagcgagcggactttctgcccggcttcattaagcgcccggaaatgggctttcgcctgctcaaccgcctgatgacgaatcgtattggcatccatcgtaatgttgggtttgcggtccattgccggtgactctttcttgctctcgccggtattttctccggggggattatcattcactggattaggtttttcctgaccattatcaccaaccggcacggtgactggttcaccttctgccagttcatgcgcaaactgcatcccactgataaaggtctgtacgacagcttcatcatccgttgccaaccccagttctgtcatcttttctttgacggcatcattatctatcgcaaactctgtcggtttctgattctccgtagactgagcctcattcgggttatcctgagtgatagggcccttattttctgcactgttcggtgcggtattttcctgtgacattgcatgttcctgtaattgagacggcttgccgtcatgtacaaagacatcggggccagcccgaccttctttaaccagtgccacatgatttccgcgaagatgacgcatcacgaagtcataggcaacaccgttaaactcacctgatgtaaagtcaggctcaaaaaaatagccgcaactgagttcctttaacgagccatcctgaatggcatcaattgccctccggtcggttacggttaatgcgttatccagatagggtggctcccatactggcgttgtgccgatagagcccacccgcaattcttttaatggctgttcagcactgtcctgctcatgacgataaagtagcgggatgccattaaacgtggccttggccttttccagctcatcggcgggacgataaccgaaataaagccgatccgggtctaattccagcgtctcccagccggggatttcccgcccgacataaggtacgacctgttctttggtcagatgcgtctgtgaaacatggaggtagccgttggcatcaatgcgtcgtcggctccccttgtcaaagacgaccgagttattttctttcaatgtaggcatagattaagtatttccaaattgaggaataacaggccggaaatcacacttacagttaatcagctcaccgggctggatatgacgctgcacgtgcgggtcgtaacacccctcgctcaacataaatcgctgcccgttcatgctgatatgtgactcgcgatacgatttactgcccccggcgcggtgtatccaaatcccctcagtaatccccgttgatcggcaacgctcccgggcaatggcattggtggctttagcgttctggtctcgggcaatggttttagcccggttttctgtcaggcgatagcgctgtttcagctcggctttcagaaagccaatatcccgaccgttaaccacactttgctgcaccagcgtttgtacctgtgtcagatactgctcaggaatggaggtaatcagactgacctgctgttcatacaggctgtctaacacattctgtactgcgggtgtgacgcgcatattgacggtgatactgtctgctttcagtttgtttttgactgaatgtgacgcataggtattggcccggttgacaaaccagaccgcgattgacttcgccatttgcccaaacttcgtattccatcgccctttgatggcaaagagtttttctgttaacgctttggcaggtgaggcatcaccgacaatctccggttgctggcgtttgtattctgccgataaccaataatcaaccgagttcgccatttcctgaattaaggcttgcatccgacggtaatattcctgctccagtcccgcgttggggcgcgtagagcgtcccgttttggttttcttcttccccataatgaccctccgggatttcatccgcatctataccgaaatagtcgctgtccggatcggcagataaccgctgtctggcttctttttccgaaatcaccccggtatcaatcagcgaaacatcgcggtcggtcttcattttctgagtttccgcggcggctttggcatcatccttattcaaatcgacaaaatcgaaagtgacagattgtgtcaatcggcccaatgtgacgatttggaggatattcagtgccttttgcagcccggcacggaagattttctcttgctggcttttcacatgatcattgtaattgcggatatcactgtccccggtcgcattaaagccactgggcgagatacctaatgatttcaccgccggagtccggtttatcacgacaatcagctccaacatctggcgaacaatatcggtcacacctgacagcggcgtttccagcttgacaatgtcttccatttccatatcaatcgccaaaataccatcattggaacgatgttgggccagatacgccaatcgagcatccaatcctttagtggcattaggattggtcagaatgtcttccatattggtttttagcgccgtgagcgagaatttctccagtaaccgcgcggcggaggttcggctgtcctgaaagtggatcacatagtcatacagcaactgcgcctgtggcatgcccataaagttataacttggcttgagcaatatcggcacttcattaccacaaatgcggatgagtcgtgaggcatgaacttctttgcctaatacccaccatgtatccgggctgaaatagcgcggattgagcggatcggtactctcatatctgccgggaaaaatattaatcggctccaccagcacaaagcgtttaaagtttttcagctctgctgacttttctgagatatccagcggcaccaacaattgggtgtcagatgcaccggtatcaatgaatatcaggcaaccaccaaagtaaccgttaaactctgcggccttgtgaaagacgtctttgaccttgaaatcaatcaaggcgtcttcaatgtccttcttgtcttcgctgctgtcaccctgaccgtcaatctccacggctttgatctctatccattcccgcgtcatatcatcaacgacggtttcaatgcacgcccggattagcccgttctgggtcagtgatgacaatgcggcatagcccataaaggacggtcccattgcataaccctgtccgtgctcccaggcatgttgaataagcgtgtacgcgcctgaggcactgagagcgctgtccattgccagcgccactgctttgggtgcgcctagtgtttttgccggaccataaatacttttgacttcttcataagtgaggatgtactgccctgactccagcttttctgccagggtttgagacaatgccaatccccgccgaggctttatcgcctgacgtttttgttttcttgccatagtgatatttaccgacgcatagtgcgtgaagggcgcagggcctgattaacgatgtccgggttcatactgaaaccccgtttcttctggtataaatcgcgcagagcctgagtcatggcatccacaacatcatcatgcgcccctacggggaaggtagtaatttcatccaccgtttcggtgatccacggcgcgatgtctttatgaggcaaaaagatgttcccggcttcccactcagcggtaatggcatgggcacgggcaactttacttccgtccggctcaaccggtatcaaccctgataccgtgcttttgagtgaatcaatgaccgcagggccattggctttatcttccaccagcttacgacgaccttcggggaatttatccgctaacactctcactgctttcagggtggcagtaaaactcatgcgttctcgcacctgatgtagcaaataggcatttgcgcctttcttaccccagacctgaccaacaacatagtctgtgccttcactgtctttaaaggtcatatcccagctatgaataaccctgtcgaatttctcaggtaaatctttaggtagataatatttcacccaatcttccttgaaaatcgtcccgccagagggcttcggcgactgctggtacatcgctgaccagaagtagtcacccagaatgattttggtttcgagcaatttttctatcggatgtaattcaggaaccagtgcttcaccttgttcattgatggcaggaaaggctaacactttagcttttgagctgatttcaatgaccttgccggataaatcgtcggtagcccaacgggtcgccatgatgatctcgccactgtttttcgacaggcgtgttttaaaagtagaaacgtaccagttccagatggcattttttgttgttgggcttaatgcctcttgggcgtttttaatcgggtcgtcaatgatacctaaatcaaccttcttacccgttaatggcccaccaacacctgccgcgatataggaacctttgttacccacaatttcgaaggtttcgctgtttcgcttcgccattgtctcaatagttacaacccgtttagggtttaatgacgatgcaggaaatagattgcgatactcctcactcatcatgatgcgctgcacatcacggttcatgtcggaggctaaatctttaccatatgacaacccagcaacacgtttatcgggatatttaccgaaaaaataggcaggcagataacgtgaaacaatatctgatttaccatgctgtggcggcgcacccagtatcagtatcgggcgttttccgttcatcatatccagcagaaattcatctaaagcttcacaaacctgacgtgaaaaattactggtaatatattcaggatttatgtactggatgaactcatgcagactgcgccgggcaatctctctttcgatagcctcatccagcattgcattatcgatatccatgtcagcgcccaaagtgagaaaaatacgcggttcgtaccaaaatcacggtgaaatgattttcacgtttttgataacaaatcagcaacaaacaaacgcccgaaaattagacagaagagtgagacttttacccgtttaaggtgacattttgattgagttggaaagcggcgattcctgaaatgtccattatgttaaatagagctatttttcacgattttttctcaatgcctgcaattgctcaaaactcaggtgactgaggtcgatattattcggagtcattgagccatcactcgacttgtgatcaatttcctgcttcactagttcgccatacttcttgggcgcaaccttcgtaatgaaccacttgcgcgtatcaacccgtaattttgctttcgccacttccgccggatcagcgatgcaatcgtcagcaatctccaacgtttcttcaattaaagtttccgcctgaacctcgcgtgcgtgcgcgtattggtcgcaaaaagcttgatgttcacgcaaccaacgaaagattgtggacttgtttggcattcccggacgcttgcaaatgcttcttaaactttcaccgtcggcaagcaatgcgcatatatcatccgccacctccggtaaataatcagaggggcgaccaactttgtttttagccgccatttcctttccttacttcgataattcacaagccatcttcatgacctgctctaattcttcgttattgagtccgtagtatcgcttgagtttgacgatatccagcaatatcttagccttggcttcttctttaggggcgatatcaggcattgacctgatcggacgcaatcccggtggtatctggtgctcaggcatatttacctctctgtagttgaattcagaataaaaaactggctctatttatataaacccctatcggagcgagacaccacccgcccaaaactgacacaaaactctatcaagcacccgttttaggatgctttgcaggatcaggtggataaaatggttactcttgctctttcaatcgtttttcttgttcactctggaactgagctttggctattgcccctattgcgtaaatagcgcccaaaacaaaccagccttgatacacaacgaagatgacaaatgcagtatcagtcagtatgtcgtaacaccgaaaagaggtaggaatgtgtttgtaatctttaaccaatgaatccctaccaaacaaataccctaaaaacttaatcacaccaaagagccaacctgcgaaataaccgacattcacaaaaccctcggtattctgtataacgccaataaacaaaaaggacgcgataattgcatccagaatgattgcatatatatatttcatcactaggttctcttacctttgggtttctctgctgaatacttactcgcccatgccttagcgatactcagacaatcatcaaacaacttacctttccggctggctgaggctgaacggcgatagtgctcctttgcccggtcacttgccatccccgcaatagatgaagaaaagccgagcttgattaactcggcctgtacgttcttttggataaattgttcgtgattcatgcgggttcgccctcatcatcagggaagtcatcaagtcccggcaatgtaagctgtgacaactcaaggatggccttttcagccttacgtatcttcttaaggtgacgcttacgcaagttcatcaggtcactgcctttctgaccgaagttttcatatgaccatttattggcacttaccaagcgattctgcatttcaccaatggttagctctttgaggcttttcatatccatgagagccaaattatgcggctgatgctctttctctgccaaatccagcaaccatctgcgtaatgattttgcgacatcagtatcagctaacatcccaattaaatgagaacctctgacagagaaaatcctcaccttctttttacgtaagctattgtttattccaatggtcattgactcagtgaccattgtcatatcgtccgtgaactcatctttatttgcgttgtaaagattagtgacagatttctcgctcttatactcgagcagttcagccatttgtttactggtaaaccaaatcttcccgtccttattgtcgaatggaacgatttcatgttctttgaaagttaatgctgtactcatagggtttagttccttttagtgataaaccttgcgctcaggaataaccagcccaaagagggttaaccagaccactactggtattcctcaaggcttatcctgaaaggttctttggtgtttgtgcttcgagcgagaagcggtgaaattcagatataaaaaaaccaccacggatgtgatggcttggggtattcctttaaccactcagggaatgggtaaagaaatatttggtttagtttcagtgagttactaatggttaagaaacatgaataacatcacggctattaataaatgattgtatccgtttgcggaaatatgacccacatctctacgttttgcgttttatagaagtaaataatagatggatttttaacctcaaaaaataaggagatagatagtgttcggaacagcttcatatatccctatattaaaagctaagcgagctgaacttgctgcactaagtcaattaaattcgtttaccaagtcaaaaataattcctctgcttgaaattgaacctgctcctctttatccagatcaggattatccagacaaaacatatgacataatactcgatagattcggacagaaaatttccgttgaacgcaccggagtttcgaccatattcttggatggcattttgattgaaggtcagtttattgacatagcagatcaataccctattgaaaatgctattaaccaagctaggagtgcaggattaagggtaattccggtaacatctcctacccgctcacttcgctatcagcaatcaattcactctcttgtacagggggaagtctgccttagattaacaacttcagatctagttaaccctcagcttatttctgaatatataaaatcactaggtgtcgaacttgaatttatagatgtgatcatagacttacgcgatatgctgtcagagaatgatatcagttcaggtcaaatcaaaatattagcatcagggatgattaataacctcgctcacgtccaagaattcaggtccattgcattagcgtcaggttctttccctgttgacttaagagatatctccgtaggagtttacccacaagcgcgcttagaatggcagctatggcaagaacttcattctagtaaacagctagtaagacacattatctatagtgattacggagtccaacatccagattactctcatcctgcgactagataccctagcactacagcaagcattcgatatactggagacgatgatttctgggtatttagagggaaagtagctcgccagtatggttatgaacaatacggtgcccatagccaagcgataatttctcatcactcatattctggagcctcattttctgcaggtgatcaggatatatatgattatgcacagacttatgcaaaatttcttcaagatcctaatgggaattataagtttggcaacgcagaaacttggagaagaagcgggcaaaatcaccacataactaaggtagtttttcaactctccaatttgtacgggctttaagttttactctaacgaaaccacgaagctcatttgtgtctaaagcttcagctagtttgttccataatatacgccgtggtttacttttaaggccacggtctttgcctagaacagagagaatttccagcatctcttctttccataacagcatagaaagggagactttatctatagatgggttaaggcgattatgacgttcagtgtgcagatatactccatttcttgcgccttgtgttactatcttaaccccccaccaatcagggataatttccattgctggtttagcgtgagtttcagaaacaacaagtgttaccttatccatgactgatgaataatattgaacctgcgatggtaagcgtaataaattatcacttttgctttttatttcataaccgtgcataaatccattaatcaccgtgatatcagcacggcttgctccaagactcattgtgaactcgtcaataaccaatgtatctggatctttatgatgttctttcagtatcttggagtgaacagcacgccgcacatctatatctttcattttcctgcctttctttccaaagaggtaatgtaactatttttgaagccaagaactttaaacgcttactgaatgtatagcactatttttttcttcgtcctctgatgcaaagccagttctaagaaaaaatttcaattttcaattaatgcactgcgtcctaacatactccacgccacagagtcatttgttctggggtactatttaataagcgatgacgcatactcaattaaccagactttgggagctatgactatctgaatgacagtgaatccgcaacgtaaagagctaaatccaaatgcgcacacaaaaagaaaaaggggaaggtatgcatagccatcattgtagatcatgctttttgtcgctttcctccagacgtaacccgccaatattgccagcgccagaaacaggacaaacaacaatccatgttgccagagtttccaaagcattaattgctctatgactgcgggtaactggtctttgccaaatccaatcatgccatctatgcctgacagtgccttgttaatcaattcaactaatgctttatcagtattttccattatctcccccgcactcagccttaacgtaatcctgcaaatatctcagttttgcccggtcgttgatgatgccttctcggatatcgagaacagcttgtccagtttctctactgagttcgacggtggtgtcattgaccacgcggccggaggcagtggtttcagacacgggacaggtggctttgatgcgcagcttgcgacgaccagcggcaatatcagcccgaagagtgttgatttcagtcttggcattggcgagttcctgagtgtgtttgctgtctaactcatgcagcatatcaatgtgcgtgttctgatagttaattcggtcggtcagttgctggatttcggttagctggtcgttattgataccaagctgtttcttatacccagagcgatagaggtaagcagcaccagaggcaataatcagcgcaataatcacgccataggtgagattgaatctcatgataaaaacatctggcgttcagatgccctgcgctgagtcagacccttcattacctgacccgctgccttattccatctctggaattcatccgctgcaccttggtagtcaccggcattgagtttcttcaacaaggtagaacgaacaaagttaccggcaccacaattgaagataaacgagcacagggcatcaaactgatcctgagtcagtggtaccttcacggctgattcaagggtgatataaataggcttaaggtcatcatgcagaaatgcttcggcctgctgttcggtgataatttgccctggcttaacgtcttttgtgtgaccgtagccaatcgtccacggaatgcttccagtagccggatcgggataggctttcagtttcaggccttcatattgcttgatgaagctcaatccgttctcgctgattttcatcagatttcaccccgctgttattcagcttcggtcagtaattttccaacatcccaactacacatactggtgcaaacctctactccagtgtccagaaaaatagctgttccactattaccgttgtagtcgatgggctgaaaatgcgtaatacgttctaaaacaacagtggtgggatacatccggctactgataccataaggaggaaagtcataggtattcatgattcacctgtcttcattcgagatgtttcgccgatttcatatcgatcatcaatttcatatcgaccatcaatgagttcgtcgtcatcaccattgaatttagccatcgcatcacaacagagggtacaacaacggtagtgcatgatttcaccgtcaaaaacccatgtagataatctggccgtggatttcgaaggaattatttcatcgcagatataacagcgagccgatttgcgggttataccgattttgtctttcaggcaacgttcagttccatcaccaaaatcacccgcaaataaatcaaatgacaggacagcatctacatactcactacatctcgttgttgccattactgccccctgctttcttctctgctgccttacgcagcaattgaccttgccacttattcgctttgttgtagtcaatgttgccgggattgttgttacgaatgcctctggtcatctgtgcaccccgaacttgtttttaaagaaggtgaagaccgcatcaagaatggaaccaatcttcttggtccccaaaaagccaatcaggacaccgaagaactgagccagactcagtggtagttgtgcatactccagtgcgttaataatcccgacactgattgccgcacagataaaagcttcgactaatgaggctttccagcctgagccatcccttttctcccgggcaaatgcagttgatgccgctaaaaacataccacccagaaaaggagcattgataattaaccagtcccagacatgcgcccagaactccgtatctttttcagtcatacgcatatttccaccccatcagaacaatgggcgtccgtggggtgagtctgtggtcgcccctgtgagttgtagtgaataggttgccctaagaatttagggcatagatacgcaatgtgcgtagcttgtagcgggtctagcctgcctgttttcagatgttaaattgtggtcctgccaatatgagcgtttgcggtcggctggaacatgtaaatccgcaacgcacccaacactttctcggtagttggcgaccaaaaacaaaaagaccgcattagcagccttgaatgaataccataccagccattagtcagatagtaacgattgtctgagaacggggaacatggactttcaacaataccgtcatccagacggtagcctgagtggacgcaccttaaacaggtcttcaagtccctaaaagggagaacaaagatattcctctgaacatcacgaacttacgggatttcgaactacctgaaaatcctcggtagttgggctgtaactctaaattgactattggtagatatgaaaaagccccgcgagtgcgaggctatggaattctattttatttcaacgagaggcaataactcatcgttgggataacgataggctatttttccgaatgatgcaacatctatttaccaatcatttaatattaattggaaattatttctccttctgtgagtttttgaagtatagaatcagccctgtcctcttccttgaagcattccgttaccagatgctcaaacaatggctgatatttgtcgtagcaggtggttttggatacttccgtgagtggttttaatgcactccagacgtctttaaatttcaatctggagtacccacgacctgaacatttgggacaggttttataaaccggaataccctgtaattcagtcttctccctatccagaacctccccccgaccattgcaacggcacgaatgactcacttcacctttccctttgcatgttggacaggaaactttcaccacctctctcacctcacgagatttagcgtatgatgacgggataatctccgctcccatgcttaaattagccttaacgagcgttcgctcacgccagggtgtatatgtctttgtagaaaacacctccgcctcgataaacccgtcatcacaatccgaacacagcttcttactggctgcactcctcgcataatcctgaaaggcataatttacgagtattcgcaggatgctttgcttaacatcctcatcaagtttcgcaattgcactgtgcttatgaacctgcgtcagtgcatactgatagagactctccactgcttcatcgggtttattgatcccctgtttcgccaaaaacagctcaatacccatcctcgcctgagcggacgccaaccctagtgaggccataacatcggtaattgaaaaggaatcagtcgctgttgcggctggagagtcactaaacatgatgctcttgggtgaaaagtacttgggtaatgattctaatttcattttatcctcagatttgcctttgcttttcttacaaaagttgcgatgccagaacgactaacatcaaacttttctgccacttctttttgggttaacccttccgctaacagccccagaattaatggcgcatcagtgggatgtagcttgtaaattttgctgtgagtgatgttatagaattcagagcgttcatcatcgcgtgttgtccacgccggacgctgaccccgatgcttcccgcactttccaactgtcaatcgcccttgcggtctctggttgattgcatagtgttctttattctccagccgacgcttccttgcgtaagcctgagcctcgtcgaagttagtgaaaatcacgccacctcccgtgcccgtaactccctgagtttttctttgtacttatcccggatagactgacattcctcaatcgtccatcgatgccgatcatgattggactcaatagcatccaccgctgcctgaccgatgcgccgaattaactcaacccggtaaggaacaattttcccggatttatgct

SEQ ID NO: 300 - DNA, 66038 bp, Xenorhabdus sp.; identical to SEQ ID NO: 299
  CDS (7767)..(9176)
  unsure (1)..(66038): unsure at all n locations

SEQ ID NO: 301 - DNA, 66038 bp, Xenorhabdus sp.; identical to SEQ ID NO: 299
  CDS (4523)..(6034)
  unsure (1)..(66038): unsure at all n locations

SEQ ID NO: 302 - DNA, 24270 bp, Xenorhabdus sp.
  CDS (17833)..(18696)
agacatttttactatgagaacctttggttatgcgcgcgtctctaccagtcagcaatcactagaagtgcaggtgaaggcacttaaagcggaaggggtcagagcagaccgtatatttacggataaggtgaccggcagtagcctggatcgagaaggtctccaaatgcttcggctaaagattgaagaaggggatgttattctggtgaaaaagctggatcggcttggtcgtgatactgccgatatgattcagctgatcaaagaatttgatgagaggggagtcgccatacgttttctggatgatgggatcagcacagaagggacaatgggcaagatggtggtcaccattttatctgcggttgctcaggcagaacgccaacgaatactggagcgaacaaacgaaggccgtctggaggctaaagctaaaggggttaaatttggccgtaaacccacaatagacaaagctcaagttcgccatcttcatgaacaaggtatcggagcaacaaacatatcgagacaattaaaaatagcgcgtgctacagtctataaaatcctcgctacggtgtaacggtactcagaatcgtcacttttgggggttcttcggcggaacccgaacaggcgagcacccctttaccgctgccgaccgatcccattatctgaatattggatttaacccatatttggcgggggagcgtgatcggacggcgttgctcgtccagcccgagaaacaccgcatcgttagccatcgcaagggcaaaataatcagtcggattaaaatcaggcacagaggcaaattgcagagaacgggcatcagaaagttcaccggtacggccttgatgttttgagcggctttcaatcacacggcggttaacctccgcatctttcttcgccagaaaatcacgcaaaaacaaaaaatgcgttaagtttgccgtcactgatccgacaacaacactgcctatcagccagaacagcggataaaaacgcgcttcgcttaacaacaggttgatgatggctttatcattcaccagcatcaaagcacccacgttaatcccataaaacaacaccgccgcaccgcaaagcaacagcacaaaaaattccgcgaattggtaacaccgccgccggaaataaagccctttcggcgggtgatcaagattcgctttttgggcacccgtgagattaatccgttttccgtctgcccccctgttcagttcccgcgctcttctcagttgctcagcggaaagaccaaccagccccatatgccccagaaatcctcgcacattagctaaaatcagagacaacacaaaaccgacacaacacaccgtagaccactcagccgtgaccacgttaaaaagccagtcatgcgattggtaaaaccgataaatctcatgcgaaagtttagacactgatacctctttttcggtgaaattatcgcgccccagcgcgggaaagaggctcagaacgccccagcgtgacgagcctcggtttcatgctttcgcattgcgttcagcttggcgaaagcacacaagaaacaatctgccccagcagatttttcgccgtgccacaaagcacaacgaacctgccccagcaggtgagagaaaaaacacgaccccagtcgggatttttcggtgggctgcgccccgtcaaagagaacaccgtgaacgcatgaccaaaatgaaaaacagcgaagcgttaggcgcgtccagcgacggagttttttattttggtcatgcgtgagcatgacggggcgcgggtgaatttttgccgttggcggcgttcagccgacataagacaaaaagagggggaagattaacgttggcaggcgtccagcctgacataagtgcagcttccccctgattgtttttcgacgccctcgcggagaaaacaatcatgccgtaaggcataacatagctacttaagatagcaatgtaaataaaaagggagattagaaaggtatcttatgtagctattgtgtggcagtgcaatcatgaagaaaaggggatattccgcttcctcggggcaaaacaagtttgccccttgcggcgagcggtgcgggtgaaatgaccggaattctacggttaactagggagtacaaaaaagccccaaaaaggggctgttatctgatataggctatttgtgcattacccaatttctgatcgtatttcgatgcactttcaactgttctgcaatttctttccgagaaattccattcgcaaacaacgttaatgctaattcgcgcttatctgcgttgttttttcctttagctataccgcctttactacctctgatcgcctgaatctctggcgtatgcgtatctgccacatactgtgcgaatgccttttcactcatacgctggtgtgtccacttcgcaatactgcgcccgatacaggcgcattccggcaacgatagcgggttggtgagctgaacgttgtacatttccacacgttgaatgacggccagttgccactggtcaaaatgggggtgcccctgcctgatcgctctgtaagcccatctgcgcgttttttcgaataactgacagttacgccctaacccgtactcaaaatcgctcctgcgggcttctgagaaactcaaatcgacataatcggcaagttcatccagtgtgtagacttcctcacgccatgcggtaacctgccaatgctgattcaggggatttttacagataagtccgctgtagttcacatccgcacgaagtttcgcacacagaccacgctctactgaggcggcatatttcagcgctttgagactagcatcgggggcggttctgaccgccgtttgcagcccataaagcaggtgtgcatgtccgtttgtctggttctttaccgtaatgttgggggcgggtgcgttgctgtctgtccagtctatcgctgctccaacgcggtcaacatcaaacacaaaccagaaagccgcatgaggaggattatgctggatgtagcgggctagctttgccacgtcagcgttattgatacgcaatccgtaaagtaaatcgtctgtgtgatacggtttacggggcagatggtcggcaaaataatcgagcgcaagactaaccattcactgcggcgcttatggcggggtattgtatctgtgttctcatatgctaatatccttttaggttatgtgcttgcgccctcgttaatcgtgacattccgccaagtttgaacacgatttcgggggcgtgtgttttataagcttaaaattatcctgtaatcattgttttgtctaaccgctaaacggtaagtcgtgacaaaaaaatttttgttacggcgaggcgttggacaaacgaagtgcgtcagcttacttattctctgccaaagaaaatcgatcccaatcgaaaaaatcggatgttgattctcccatcgttgtaccacattaggacattaggcagccttgcgctaaatctcgccttttggtgatattgtctacaagtaacaaaaagaatctcaggccgattttttttgtcttgatacactcattacaagtttttttatgtgttaagttaacgctctctggcttggggttcaagccagtatgatttgaataaaaaactaggacggtaatatttatgtcatacatgatatatttaacattaaatggcaagaagcaaggcttaatatcggctggatgctcaacgcttgattcaatagggaatcggtatcaaaagggacatgaagatcaaatacaggtactcagcctgaatcatgcaatttcacgccagcaaaacgtgagtcaccagccaatacagttcatcaaaccaatagacaaatcatcaccactactagcaatggcaatagactcaaatgagtcactaaatggggggtttattttttatagaacaagccaaacaggacaattagaattattctacgaagtgaaaattacagaagccactattacagatatttcctgtgtatacccacactctataaatgatcatgatataatgccatatgaaaaagttatattaaactataaatctatatcatggaatcatgtaactgctggaacatcagcttatagtatatgggaagatagaattttataaacataaaactaagcatataatgtatatgcttagtcacatagcttttcatttttcacatatttatttgaagaatttagcgattttttatagcacgttacatatccattttcttttaattttgaatcaacataccaagacacaggaaaactaataaaaaaacctaatataccaacaaatgtaagaaacttaaaaattgaattatttttctttggcatattcaaaaaaaataaataataaaatatagcaatgataaaataacataataaagggtaaaaaaacaatgttgcaaatattctccatgagaaaaagacaacatcagaaagatgatacatcgataaaatatcatccacagaaaaaaagagagctgcattaattattaaaaataaaaaaaacatcccaattgctaaagttaatctatttttattactcatccagtcctctttattatttccaacactattaaattaagtttattttattcttggataaggataaccaaatggttgtttacgataatctaatttatcagcctcagccagttccttctcacgcaagtagtttatcagtttcttactaatttcataacgttcatcaagcttagatagcaatagagttgtaataactccaaaacctaacgctacaacagcaactcctaaagcaaaagcaccagcttccaaaaaaatagctgcgccagcaacaatcaaaaaaccaaccaaagctccaacggcggtttttgctacatccatcgtaacatttccaaaaaaatcataaatatcatactcatccctgaataacatctccgctgatctatacaggacagaaacaataataactcttctagatactgtagctattccatctcgcattgcttgtgtacctatgcctatatctattaccttccaatgacttgctttatattttgtagcagttaaaaactttctgactccagcatgccccgtcagctttaccattttatgtccatatctattgacatattcagttacttttacgccgaaattactgcttaactcatttgctaatcgcataaaagcataaccatccaatatattaccagcatacgttgtgacaacatctgtaactgaaaatagactatctttccatgatgaattcggattgcttccacaagaattttttacagcatcaaccatttcaccatgagttaacacaacataatattcttcatcatcacacattcttttcacaatatcagatgacatatttgaatattttctttctatttcagagaaattcttatgcctataatctttcgtgtaagatagtggttttaatgttccattctcaaaaactaaagattgatccacgaacgcttcttcaaaatcccttctactcattttaatatctccatgaaaaatagataatataatgtcttaattattttaattccaactataattttatagttgttagaccatctaagacacccatattaactccattagctttagatgatgacaacaattgaaaacaaaatccctgcaaaaaagataatttatcttttgcaataccatcactgttatccaacatgtttttatatgtaaacaccctatttaacccataagatataacccattttcaatataaaatcataatattacaaaaataattaaaataaaatatttgaaataaaaaaattatataattataaattcagccacccatcataaattatgttaaacaagtaagtttaatcactaaaaatatctgttagagactttaaaaacgaggaaaatgaaaatcacagtttatttagcaagtttttaactggaatgcaggatataaaatactgtcgacacgcatcaagtgtaaaatacagtttataacaccactaacgcaccattaatacaaaaatattcacaatcaatgaaccacatgcaattgattttattattgaatatttttaattatcccgttaacctgataacgctattggcaaaatccaatagtcggggatttccaaccccgtaagttctccactggtaggatatttctaccagtgtgcctgcactcgcccgttctatggcagttcaggcaggggaggcttcggcctcgccggttgagaactccggtattggaaaccctgcttgaacagccaccctaaccatgaggcaagcaggcatgaataccaccgaagactggcactcctccgaagttatcgccgcattacgcaaacttggcaccaacatagcagagctttcccgcgaatccgggttaaaacacggaaccttaagtaacacactcaatcgcggttggcccaaaggcgaatggattattgcccaacgtctcaacttacacccctcacaaatctggccaagtcgttattttgatagttttggtaacctgaaaaaacgtattccccgtcgctctaaatgggctggaggcgaatcagtaaagatctttgataacttactcgccgcagcaagaaacccctcagataacgccaatcaaactgattccattacgggagaatgcatttttaaaggattacagttattacgccaagaactgaattttccgccaagagaagttgccgagctaatggatatcccactaacatccatgatgcagatagaacaattaggaaaagatgtaaaattatcgtccttaaaacgttatattgaagcaatcgacggaaaacttcgcttatgggttgaaatgcctaatggagatattagaacatttagaatatgagagaatttatcttaaaaacataaagaagttagacttaaataaatccactcatattcaaatatcgttttatctattcttcatttacctaaacccgtaaggggaaagagtggattaataggccaagatgtcgctgacaaaaaaacgaatatcactcacgggcaaattcctcatacgtgttaaagcaaaaaaaacggtcggttatttcaggggttaacgactggagacgcccgccaaccgtggcagcatcgaccgcataaaaaatccgtttaaccctgtcccgtaacagcggttcgggaaacaggtacaccactcccgcccagccatttttagcgatttggttcaggtaaatttccgtgatttcgcggtagcgtttcggggattttgccacccgctccacttccaccgcccaaattttcccgtccttgcgcatcaggccatcagggtatttctgccctttttccagtttgatatggctggttgatttccactgatagccacgatgacgcgcaacaaggcttaaccgctgcacatcaaaccggtgctccagcgtactgagggtgattttagacggctcaaacgctttcagcttaaacgggtcgtcatgctcctctaaggccataacagcaccgtgctgcgtaataccgtacacgttaaacggcctgtaaccgcctaaatccactttttcggtactcagtaaccctttggcacacatccgcttcaaaacagcgtacacggtgctgaccgccgtataatggagaacctgactcagtatctccgccgtggaataaatttcatctttcaggaatcgcaaaatggcctgttcgttatcctgtttttttgccatgcgctctttgtaggagcggataaaattatcgccagccatggttatcagtctcagggttaaaatcagcctgcgttgccggtgcgggcgcaatctctttacggagcgggttttcacttaaaggatcagggtatgacgtcacaggcccccccgctgaaaaatgaaaatctggccgtttgaggggcgggtaaccgcatcgttaaagtgacgcgcacactgggccagcgcacaacagcgggttccgccgaagaacccccaaaagtgacgattctgcggtcatgacttccagaatgcctgttttaagtgttgttccaacagctcagccagtgcagcaacatcaatggatgttttgctcgccttcttgaaactgtaacgaccagtaaagaacaagtgctgccaggcaatcggcgatattctcgcaaatttttccagtatttcttccggcacaccttcaaataccatctttttatacactcgatttaggatcatggcgttgtacgccacaatacagttggcgactaacctggcagcatgggcgctgactcggttatcggtgattttcctgcctttgaacacgttgttgtagattttacggataatgctttgtaattgatggtacgactccgtacggttcctggcagtccgtattgcttttcttagatgcatatcatcaatcagattgagcacatgggtgcttttgaatattctgttgtattcatacagggcagctctcaaccgggcatatccgtgatttgctggtaacggtgaaagataaaacacaatgcgtatagccattgctggtattttccgaggcgtcgaagccggtaggcggcatattgttccacgatatcagcataataacggatggcatttttggaaattttcaacgaaggcaaaaattcttcggcaaatcgatacagttcttccatgctttgcgctttctcgatttcgaatttcacggcggtatattgaaaatctttctgatcggccttgagtaaagtgagctggttgagtccatctttatgatcaatgagcgaggacagttgttcacgccaatagtcgggaatggattgaagaattggttttatcctggcttcctctacggcgaaggcatccgagaacatgtcctgaagtttgcgatatgtcggcgtaacaatacgttgtcgatccaggtaaaacagcaactgccgcaaggcgctatggcctttaggaaaataacggattaattcgcacaacttggcgaagacggtggattctaccgccgtagaccaatcctgatagtcgaacagatcgaggatggattgtttctgcgaccgaagtgaatcacgagaaagtcctccttgccattgaccattagtttggtcaaagaattttttcaggatgaattgcgtatcgtcggcgacatcctcgaaggtaaaccggaaaaattgctgtttggctttaaagtatccgagctgcaagatgaaatacacacgcgtgcgagcattgtaatacaggtccagtttttcttgctccagttggctgatcgcaaaaaatagttctcgctcatcaacagtgaagtctggcctgtcatagaggtccgatatttcagcctccgtgagaagctgaatgcgctttgtgctatccatctgaaattagtttcaccaacgtggttgaagaaagatcatttgaggtgtctattattttataatatttaagacaccttaaatgaggaatccgagggtgtctattaaatcgatatatgtaatataatagacaatctgtatagcagaatgtttataaatcgatttaggagacatttttactatgagaacctttggttatgcgcgcgtctctaccagtcagcaatcactagaagtgcaggtgaaggcacttaaagcggaaggggtcagagcagaccgtatatttacggataaggtgaccggcagtagcctggatcgagaaggtctccaaatgcttcggctaaagattgaagaaggggatgttattctggtgaaaaagctggatcggcttggtcgtgatactgccgatatgattcagctgatcaaagaatttgatgagaggggagtcgccatacgttttctggatgatgggatcagcacagaagggacaatgggcaagatggtggtcaccattttatctgcggttgctcaggcagaacgccaacgaatactggagcgaacaaacgaaggccgtctggaggctaaagctaaaggggttaaatttggccgtaaacccacaatagacaaagctcaagttcgccatcttcatgaacaaggtatcggagcaacaaacatatcgagacaattaaaaatagcgcgtgctacagtctataaaatcctcgctacggtgtaacggtactcagaatcgtcacttttgggggttcttcggcggaacccgaaagagattagaacgggtctgactcaattgcagcaataccatccagacttcagaccacaaattggataaaatttgttgatcatcaatcacattgtcattcaggcgggcgatatccggtgccaaaatcagggtaatctgtgtttctgcgctaatggcttcttgcaccgctttgctgcttagtgctgccatcagggtttccgcttccgtttgggtgatattttccgagggcatattcccttgcagcggtaaaacaaaagcctgttgcccaccattatcgaaatagtgcctgactgcaaatgccatcaaataattgtcgccaaagcgccgggtatattccaccagattgtcgatacgaactgtggtttttgcgtgttgttgattacggctggtataaccaataaatacaggcactgcactgggtatttcctgttgtcctgtggtaatgatactttctgttaatgttacgcccggttgaattctttccatcatcatctcctgtaaagtcgtgagataggcactatcaattctgttaatacagtgcctgagttttaatcacagagattaatgaacgatatcctgcgtaaattggaggacaataaattccgccggtcgcactggggccagaccctctttcatgatcattttgccttgtttgataatcgaggacgaggagtcgatctcgctcaattagatcctctagcatttgataagctgattatggactagcgggagcattcgcgcagaaacttacggtttaacctttttggggcgttatataacgtatgaaattttactgatctgaaactactttgttttcattctcaaaactctcatagagggaaagtaatcgagaatataatttcgagaatggattttgataattgtaatgcctgaacgaagcgtagtaaaaatccaactcaagcagttctcataatccaccgtttttgcgaaagaattacatggcatggagggtttaaaatcccaaaccgtaagtttctgcgcgaatgctcccgctagtccagaacgcttcatgaccgtattgttaaccgtctcaatatgttacaacgccagcggacaatgcagagtatggctgatttccgcccaggcgatgtggtgagtttccagactgatggcgatgaaattatcgggatactggtgcgcctgaacaaaaagtcggtcacagttcacactgagaacggcaaccactggaacgtcgctccacaattgctgacgctggtcaaacggccactgactctggaggatgaagtggaaaaaacaatcagtaaatcaattcattaaaacgacaggttacgttactcgtcattttcgagggttcttccactggacccctatgggtttaacagaattaccactcaaaattaaaccagtaaaatttccggacctcgtctttcaagaatacggagcattctaagagctgggccgcttggttttttttcttctcgttcccatttagaaatgctttcttttgacattcctaatgccattgccagtacagattgggacattccgtactgtgtacgaagttgctttatctcagcccctgtcatcatagtaacagttttaatctggtcattgattttacgtgcattgacggcttttttgagatcgttaaccaagctttttggtgcagcatcgactgcgtgtagttctttcgctaattcaagcatattgtttaatttattactcacaaatgatttcctccaagataccataggatattaactcattgatcttctgatcagtgtagctaaggaaaagtttggaaagctgtttatacgcttccaattcatcatcctcaatttcttttgctcctctagagctaacggtattctttgtccagccatcagcaaaaaatagatggtgattaaccttaaagaagatgataactcttacgccaccacttttaccttttctatcaactgctattcgctttttaatcactcccccacccagatcagcttcaaacttcccgtttttaacttcttctgcagcatttaataactgttgatcggaaatgttaattttctttgtgctttttttaaacgacgatattttatagaacgccacaaatgcctccgagtggtaatgagtactatagtaacaggtactgcttttaatgcaataattaagcgcaaagtgtttttacttttttgtggatcttatgagcgaagcgagtaaaaggcggctctcataaattaatgggaatgagggagctgaaccgccgaagccatagaggatcaatgggatctcgaaatccctcgtccctattaagctaaaagatttatcaagtggtttaggcttaataagttctgccaagggcacgcagtggtcacgccgttaggcgggacgtatctgcgcgttagcgggcgtttacgaccgcttacgggacgtaatcaaatttattttttccttgaacgaagtgaaaagaactagtattgagagttgtagcctttaggctcaactcgatttgtgattccttatttataaggcttgttttgttcaggaataaacgtcgaaactaattacatgtaaaaaaatttattcgaagtttatagcttatttttcactctttttttgtagatttcagttctagtaatctgttttaaatacaaaacagcagaaaaatatgggaaaatcatgtgtggaataagtgaaaaatgacttatggttgccacaaaaaaaacaccaaaaccgtgctaggcacggttattttgattattaatcaaagaaatctttagttaagtcaggatgatcccttcttgttcaagtaacaatcgataaaattgctccgaatattcgtttacgtgaggatactgtgcctttaatttagtttttgcataatagacagcaaccggtgttgttgttttttgccactcgacaaacatacaccagtaaattgaatctgatttatctttctttcgcaaattatcaaccgaacgttgcgttctatctagttcggcttccagattttttgattttttacgatctaacaactcaatactatcttcaatttgtttgagtacttcagctttctgttcctgtaaatccggagcaaccactgagcgtttaatctttttcagtagctgacgcagcgcgtgtttgctttctatatcaatgcctaatctcaccatattcaataaatgacgctggtattttttttccagattttcaagctgaccacttttaattgcccagttttggaagtcaatcaagctgcgccggatttcgtcacacggaatacctttagacataaaaaattccggtttcaaccaaatccgcacgggcttattttggccggcatcccggtctttatccctatgaacgacgatttgctccagttgctcaagaacagacaaagcatgaagtgccacatcatacgatttacggccgttatcatattcatgcagtactcccattgctttagcaataaattcaaagggcaccattacttcaaacagataatcatgaccggggaaaaaatccgcattcgccacgaatgccaacgacaacgaagttaatgcttcacggctctcagagcgtgtactgatacgcatgggttttggcacatagtgcggattttttcgctcggaatacggcgtatagcccttttgacgaagcgcgataagagccctatcccgccgccagtcatgactttttagggtacgagacaaccgagcaggcgttcctgttgggattttgatgtcctgtttcgggacattgcgccgatggattttaggctgcccccgacgtaaagcgttggattcaccacgccggctacgacgaactgagggatcaaatgttgattgggtgtgttgatttttaaacacatcccctgcacttatggcggagatcaaaaagttgcaatagaagtctcatcgttctatactcctatgcagaaaccacaaattgatttctgcaaatgagccccatatatctgatgcaagccgccaagtttgatgcagattgtggggtttcttcttttttagcggttagctaatcacattattaactgcccgcatttagtcacctttcggcgtgactgaccaacgaaaaaccctgataagctagcactgtgaaacaaaaaattcaataaacctttataattgcttttgttctcaccaatactctatctaaacttatcaaaaaaataaaatcagtaaacaaaaattaaacaatattcatactagcaccggaagaataaactctcaagaaagttatgacttaacatcattagtactgtgatccgcactggctctttcgattaagcgactaatcatctcaccttgagatactccctctactttgcacattttttgtaactgtagcttcagttcattagatacatatactctaatagatttatcatttgcagctttacgacgagcaataaaagcctgctgtctttcaatcccagttaatcggttaccttttctgtatgggcgttttgaagaagaagtagcagtacttgtttgtggcatagaacccccatgcatataattcaaaatctacttattggcgaataaatcagtatatatcataaccagttaatatgggttattcccgaacaatgcacaggtaaattgaggtaaaagtcacagcaacagtttgacgtcttctgacctaaccgttaatattttttctgcaaaaacgatccatcgcctatcaggatcgccttcgggtggcgaaataaaactcctgtagcctgaaagggagagcaaaatagcggtacatctgcacacttttggaagcagatatcgtctgacgatgaaagttatcctgtcactttatacaccagacaggcttatcacatacattgagcaatatcctgctacggtcaccataaccgttttaccttatacgacttttacctacgctttaagtcacgcacaataaacgtcccgaaaacttcgcggcgtcacttgcgtttaagcgaagcgattaccaagtgacgccgtcaggtgatcaacgtccagagcacgttcggtctggctttacgaccgatttgaaccccgtattactcagtgtcaccacttttcattggcatttttctgccttaattcacttatttcgtttgtttttcactcaccgccttgtaataggccgatgcagtaaagaaaggagatatcacacgtcacgaataatgaggcgttcatcctgattgaatcaggcactgaacggggagtaaaccatcgccgtgctgagcacgcagcgaactcctgcaaaaactcaacataaccctcgccctgctacacattatctgacgcaccacggaacggtgaacctaaccgacacgcagggaaaatgtttcgaaataagtaaaatgagtctgaaaacaaaggggaaatacggatagcgaagtgatcacgaacgagaataaataacaaagattgatttagccgtccgttttctcccctgagtttgtgcgcttttgagaggaattatagccgttaaacttagcggtttagttattgagtaagctaaaacaatcagttaaagtattcccgccattggcaaataccaatggtcagggatttgcaaccctgtggacacttcactggtaggatatttctaccagtgtgcctgcgttcgccttttctatggggattcaggcaggggaggtttcgacctcgccggatgagtgtcccggtattgcaaaccctgtctggatcgccaccatcaatattaattaatggaaaggggtagcaggaatgaataacaatgttagaaatgactggcatcaggccgatattattgctgcattacgtaaacgcggtacaaccttagccgcactctcccgagaaacgggactcagctcatcaacactcgcaaatgcattcagcagaccgtggcctaaaggtgaatggatcatcgcaaattatctcggcatccatccctcagagatttggcctagccgttattttgatcaacgtggtcaacttattgagcgtaaagttcgcaacaaaccacagaaataacccacctttgttttttagttttttagttttttagttttttagttttttagttttttagccagtttgtgaaaatgataaattttgatatgaagccgtgagatttaaatggcagcctgatttagccatttttaaactccacggcttttttggtttactttgactttgcgtgctatctaaaaccatatccccgtttctatgtttaccagctcacctttttcatgtggaattttatgatctctcaatagccctcctgataagcaggttaagctagaacacaaaattctatcccccctctgaaattgatgcgaaattctggcgatttcaccctgaaatttttcattaaaattaattaaaaacaataagataaaaatgaaatacctatggagaaaaataagcaaaataaagcgtttttcaattaaaaaattttacatttattattttatgtaggatatttaaataaaatcaaaaaacctacatatagagtaaagatatgaatgaaacctataaacaattagacaaggttgcgcaaaggtcagttcgtctactacagtcactcagtgatcaaatccaaagccaaaagcaggagctgagtaaaacaacctattaccaaacgtattcaaaagcggctctcgcaaaattaccaaagttaacgcgtgcaagcgtggattatgccgttaacgaaatggaaggccagggatatgtatttggcaagaagcaagcaggctcttcatccaagtacgcaatgaccattgagaacatcatagatctataccatcacagaggcgtacccaaataccggaatcgctatcacgaagctttgactttctttatcgggaatttgaagggcggagtatctaaaaccgtcagtacagtttccctggcacatgcattacgtacccacccacacctgattttcgaagaccttaggatcttggtcatcgaccttgacccacaggcatcggcaaccatgttcctcgatcataagcagtcgatcggctctgttgatacaacatcagcccaagccatgctgcaaaacgtttcacgcgaagagttactgtctgaatttatcacatcctcagttgttgctggcgtagacattatcccagcatccattgaagacgcattcattgcatcacgttgggaagaactttgtgcagaacacctgccaaaccagaacatctataccgttctgcgcgagaatatcatcgataaagtgaaacacgattacgacttcatctttattgacagcgggccacacttggactccttcctctctaacgcgatcgcagccgcagattttctgatgacgccaatcccacccgcacaagtggatttccacagtacgctgaaatatctggctcgcttgccggagctggtagatataatcgaatcgacaggcgcatcgactcgcctcagcggtaacatcggttttatgtccaagttagtgaataagaccgatcacaagctgtgtcatagcctggcaaaagaaatttttggtggtgacatgcttgattttgctatcccgagattggatggattcgagcgctgcggtgagtcttttgataccgttatttccgcaaaccctgccacgtatatcggcagtggggaagcattaaagaatgcgaaaggagcagcagaagactttgccaaagcagtttttgaccgtattgagttcatcagagctaacagaggcaacaatgcaaaataaaaaacgtccaactatcggaagaacgttcaattcagtatccttggaaacaccggcagtaaaccaaactacagaacagcgtttcacacttgcttccggacaaacagccatgtttcaactagagcacattccagccaataaactggagtctgaaacgaccgttaatttttgggtcaacggccgggatcaaagcgcactgacaaaagaatctgtcagcgacatcatacgtactatcaatcttcaacagttcttcccggcaataggccgtcgtattgatggcaagatagagattctggatggttctcgcagacgtgctgctgctattttctgtggtgtaggtttagatatcttagtcacgaacacaaacataagcaccgatgacgcaagacaacttgccgcagatatccagactgcaagagaacacaacattcgtgaagtcggtatgcgtctgatccgattacgggaaggggggatgacccaaaaagaaattgctgaatctaataatatgtcacaagccaaagtgactcgtgcaatccagtgtgcgtcagtacctagtaagattgttgctatgtttcctgtcatcgcagaattgagctactcagattataaaatacttttggacgttaccgttggcatcaagaaaaacagactttcgattgatgaagtcgtcagctgtgtgtgtgacgaaatccagcatatgaataaaaccaagctggttgctcccgatgaaatgaagtcgattatcatcaagctgtttaaagattttagccgcaacaaagcaaaaaaaaccgcacaagaaaagccgcagataatttctctttggaacttcaaagataagaattcatttgcccgtaaacggattaaagatagagctgtgagttttgaatttaaccgcgcaccaaaagaatttgaggaagaattggaaagaatgatccaaatgttaatgcaaaagcatttcaattcaaacgaataattagccaactaatttcacttataacaaactgaatttattatatttatttgaaaaatttcagtgtgaaatcgccaaaatttcatggcagaagagctacgtatcaaataccatttatattctcactttaaaggattctatcgcttaacaaagaatgtttgtgtgaaaactaattgattaatgcttatataacctgagcttcgtatatggtcttcccccaggggttacgcatgaaaatatttagtggataattccttcatttttagaggggtgcagatgaaagaattagtggagatcttttctgattttccagatccacgttgtcagggaaaggttaaacaccgttttattgataccttagtgatcgcagtatgcgctgtcattgccggggctagcagccggattagtcttgctgcctcatcgcatgggtttaaaacttcatcttagcaaaaaattcagggtgttagccatgtatggcgagaaaagtgacagaaaggaagcctgcgaagagagcaccgaaaaacaaaatatatcgggaagcctgcggggtctcgaaactcgacagcaagaagccgcgaccgcccttgaacatccttgtcacgcgcattactgccgccgaatatgccgaggtctttaacgtaagcctcgatacggcttacgaccagttgcaggccagcgccctgcgctcggcctattcatggaagcttctggaactcctcatgcgctttgaatcgacaggctgggcggaatatacgattgacgatttctccacttccatggatgcaacgcaaaaacagcgcgaaaatttcgcaaacatccgccgcaagatcattgagccggccgtgaaggagctgacggaaaaagacggatggatcatagagtggaagccggtcaaggccggacgcaaggtggctcgccttcggtttgatttcagggactagcgggagcattcgcgcagaaacttacggtttgggattttaaaccctccatgccatgtaattctttcgcaaaaacggtggattatgagaactgcttgagttggatttttactacgcttcgttcaggcattacaattatcaaaatccattctcgaaattatattctcgattactttccctctatgagagttttgagaatgaaaacaaagtagtttcagatcagtaaaatttcatacgttatataacgccccaaaaaggttaaaccgtaagtttctgcgcgaatgctcccgctagtccttcaggtgcgacccgcaaggcaagcttctttaaatgtgccttttttccggttcagtaagggtggtatgcctcagaatttcgtaaaatcgattttaattgcctaaaattgccctattttaatcaatatagcattgattggtcttaatctgccttttgcctataacctgccagaaagccgcgcgagcagatccatgcgttcgtgaagaatggccacgaccagtgccggttcgttaacgcgcggcaggcaaaaaacatggtgatggtcgcagcgcgccatgcgcaagcccggaaagagcgtctccatgtccctgaaagaaccttgccctgcggcaagccgtgccattgcgttttccagtttttcaacgtagcggcgcacctgcgcctcgccccagtgttggcgcgtatagctgatcacggcacgtaaatccgcttcggcggcttcggtgaggatataatccgtcaacggcgtttttcccttgcaagttcttcttcgagaatctcgttgacgctctttttggatacctttccgtccagcccgtcttggatacgtgtttccagcatggccttgagttccagccacgcctcgctatcctcgtcctgaccgggaaacaggcgttcgagcgcatattgccggatcgtcttgccttgcagggcggcggccgctttcaggctttggtgctgccgctcggtaatgtcaatgcttaaacggctcataaatcactcctgtttgaaaatgtacagacacacattagcacaaatgtagatttgtggctattttatgagccggacggtgaaggtgtgtgacgttcattttccgtctatcgcccaccgcgtttcatcccttgaatcgcgacattttcaccgaattcagcgttctttcctgcaatcgggacaggacatcggccagttcaagctcgcccgatgcaaagagattcaggtcttcaagcgtttgcctgtccggctcgatgccttcaagacgctggcttgcaagggcattggcgacatgataacggcgttcttcaatttcgcttttgcccaacacggcatgtttctcctgatcagtgtgtgatagacggaacgcggtgagtaatagacatttttacgattatacgattataatgtttcaagattttaagtcgaaaataaattataaatgtcgtgtatgatgaaaaggtaaaaagaatgtgatgaattatatcaccacatttttcattaagaatatcgtttaaggccgcttctctgtaatcacaccagatattcctataattcatctttccatgggtagaaggtttctgaacctatcgtaactataatcgagggatcaattggagatggtgttactaattcctgatcggctgtcagattattcggactcattactctactttcaactatttcataatttaagaattcataaatagtatcagttctagctgaaagtgctccgtactgggtgattgtatgtgggacaataatttcaatttgagtttctgattcatctgttacaaggggccctttataaatataacccatgagaccaagattatgtatgagtggaccatggggaacatcaatgtctagatcattaagaagagcatttacaacataagcgtatttttcatctttacttttctgtggatctgataattcctcgccttcaagtataacatattccagaggcctttctgttattggaaaattttctgcaatatttctatcaagatatatcgcgttaagaaaaactccactttcaccccaagtagcatgatcgggtaaatatccttccgctacttctattgtttgcccaacataaaaaccactccaattcgtatcatcattaatactccatatatccggaagagcgagttccacacgtgattggtgatattctttagatgctttatatccaataaaggtagcatttacaccttcggcaaattcaattttttctaatcttgcggataccgtcataacataaccctctttcgttaattccaaagtgggtataacacccaccttaaatgtattattttttgtgaaattcgttatctgctaaaatatgaggaaatatatttcactattacataataaaagagctatagatttaaattaaaacaattatccatcatgaatgcatctcaataaatatcatttaaaaacattaagttatatttttataattaaatgttataaatacagaaaatagatatacattaggctacgccagagcgcagcctatctacatgaacgttatgttaattgttttttatgtcaccgagggaaacgatatggttccatacaaaatacttataaggttttgctttgttatcgtatatcacgaacgtagcattatatatttgttcatataatccgcctgcctcaagcacttcagcagaccagtaatatccgggaatttcttgagcgacaatgtctattgggtctgtattgactacaataggtctaaggcgcttaaacttattcaggaccggtacttcaataagtggtgatgcgttatttgatttataattagataacattacggaatttggtgtgttgtattttgataacgaaaccgtacgccacattattttatcgccaacagctattccattgagggatagtttacttccaccctgatcgattacttgtccatcattattaaccaataacaaatggatgtaatcgtcttgtatcagcaatggtttgtctattgtagcagtcttaccatcatatttttttatcatctggtcaacatctaaagcaattaatacattgtagattgccattaaaacctccaattatattttatactttaattatcaaaaatcgaattgacctaatattaggatatattattacaatggcatttttactaaaataaaaatataaataaacattaaaaaacaagatcgttataatggtatttatgttacaaaattaatcgtgaacgaataattttaaatgtcacttctaaaagtcatatacgcacttcgcttttaggcagcaccccattgacgatatcctgatgagagatctttcagacattgctttgcctgctctatctcatccggcgcatccagcagcacaaagacgggttccgccgaagaacccccaaaagtgacgattctgcggtcatgacttccagaatgcctgttttaagtgttgttccaacagctcagccagtgcagcaacatcaatggatgttttgctcgccttcttgaaactgtaacgaccagtaaagaacaagtgctgccaggcaatcggcgatattctcgcaaatttttccagtatttcttccggcacaccttcaaataccatctttttatacactcgatttaggatcatggcgttgtacgccacaatacagttggcgactaacctggcagcatgggcgctgactcggttatcggtgattttcctgcctttgaacacgttgttgtagattttacggataatgctttgtaattgatggtacgactccgtacggttcctggcagtccgtattgcttttcttagatgcatatcatcaatcagattgagcacatgggtgcttttgaatattctgttgtattcatacagggcagctctcaaccgggcatatccgtgatttgctggtaacggtgaaagataaaacacaatgcgtatagccattgctggtattttccgaggcgtcgaagccggtaggcggcatattgttccacgatatcagcataataacggatggcatttttggaaattttcaacgaaggcaaaaattcttcggcaaatcgatacagttcttccatgctttgcgctttctcgatttcgaatttcacggcggtatattgaaaatctttctgatcggccttgagtaaagtgagctggttgagtccatctttatgatcaatgagcgaggacagttgttcacgccaatagtcgggaatggattgaagaattggttttatcctggcttcctctacggcgaaggcatccgagaacatgtcctgaagtttgcgatatgtcggcgtaacaatacgttgtcgatccaggtaaaacagcaactgccgcaaggcgctatggcctttaggaaaataacggattaattcgcacaacttggcgaagacggtggattctaccgccgtagaccaatcctgatagtcgaacagatcgaggatggattgtttctgcgaccgaagtgaatcacgagaaagtcctccttgccattgaccattagtttagtcaaagaattttttcaggatgaattgcgtatcgtcggcgacatccttgaaggtaaaccggaaaaaatggcggtttggctttaaagtatccgagaagcaaaatgaaatacacacgcgtgcgagca

SEQ ID NO: 303 - DNA, 24270 bp, Xenorhabdus sp.; identical to SEQ ID NO: 302
  CDS (16527)..(17726)

SEQ ID NO: 304 - DNA, 965 bp, Xenorhabdus sp.
  CDS (470)..(619)
  unsure (1)..(965): unsure at all n locations
nnnnnnnnnnnnnnnnnnnnnnnnnnnnnnnnnnnnnnnnnnnnnnnnnnnnnnnnnnnnnnnnnnnnnnnnnnnnnnnnnnnnnnnnnnnnnnnnnnnnnnnnnnnnnnnnnnnnnnnnnnnnnnnnnnnnnnnnnnnnnnnnnnnnnnnnnnnnnnnnnnnnnnnnnnnnnnnnnnnnnnnnnnnnnnnnnnnnnnnnnnnnnnnnnnnnnnnnnnnnnnnnnnnnnnnnnnnnnnnnnnnnnnnnnnnnnnnnnnnnnnnnnnnnnnnnnnnnnnnnnnnnnnnnnnnnnnnnnnnnnnnnnnnnnnnnnnnnnnnnnnnnnnnnnnnnnnnnnnnnnnnnnnnnnnnnnnnnnnnnnnnnnnnnnnnnnnnnnnnnnnnnnnnnnnnnnnnnnnnnnnnnnnnnnnnnnnnnnnnnnnnnnnnnnnnnnnnnnnnnncaaggtgtcccccacccagactgtcaaggatgacaactccatccgcgcgtccgctggtatcggcgtaatgtgggcttcgcccttcggcccgatccgtgtcgattacgccgtgccgatcgccaaggaagactacgacgaggaacagcgtttccggtttggcatgtccaacactttctgatatcggcagtccagaactgcaactttgaacgttctggagtttccggctgatggaatacaacgccttttttccgccccacgagggactgcgattgaaagatatcgcagaccgttttggggcggaactgtctgatgagacggcaggagaacggatcattcggtccgtttctccagtctatcgggcaaaacccgatcagctctgctatattctttcgcgcaagaaccgcgatgagctgcagacctgcgatgctggcgccgtcatttgtgacgcggcgcttgtagacatgcttccgtcccacatcnccgccctgatatcnnnnnnnnnnnnnnnnnnnnnnnnnnnnnnn

SEQ ID NO: 305 - DNA, 840 bp, Xenorhabdus sp.
  CDS (173)..(838)
ttactatagccatcgcactaaaattaaaagaaaatattaattttgaaggtgttttcatgcagttaacaatactataaattgcgatgtaacacgtcaaatacgtatccttgaacaggatggagtgctgaatcagcagataaaaaacagtgctattaatcaagtaaaaattattgatgctgaaggtaaagatatttctgtgctcttcaaagaatgggcaaaacacatttttactctgaatgacaaatcattacttgaagttgtcttactgcgcaatttgaaaaataaccagtcagctatttttattcgagcccatcatattgtttgtgatggttggggaataaatcagctaacaaaaaaaatcgccaaatattatcggaatactgatgataatacagagtcattatccctcaacactgaaaaatatatttcatcgatccttgaacaggaaaaaattctgtcacagccagaaaccgaacagcaaataacaaaactggctgatcttacacaacgtcatgaaccggttttttttaatcggaaaaagaaaacgcatcagtctcattttatacaacataggcacctattagcgcccgctaaagtagagaaaatgctttctcagggaatcaatccttatcaggttgttatggcttcagtggctatcttgttatcacgagtacacaataacacccgattaaccattggtattccattccttaaccgtcgtatgaatcagcttgatattgcaggggagtgggctaatacactgccactggctgttatggtcaacgcacaggatacgtttattgaactggcggcgcgtattaaagccgatatttctttagg

SEQ ID NO: 306 - DNA, 817 bp, Xenorhabdus sp.
  CDS (1)..(816)
agtgatcatatgacgctgaagttgatttttgcagagattgcattgttcctgacagggaatacgaaaatactgcctgctgttttgccctatcgcaactttatcgcccggacactgcacgtaccggaaccggaacacgaggcttatttccgcagccgacttgctgatatcgacgaaccaacggcgccgtttggtatcctgaaagttcagaccgacggcgaaactgtggctgaatcctgtctcactattgccccagaactggcagcggcgatccgcactcaggcgcgacatctgggagtcagtccgagtgtcctgttccatgtggcatgggcgcaggtactggcaaaaaccagcggtcgtgatgatgtggttttcggttccgtcctgctgggacggcttcagggaggtgcaggagccgagcaggtattagggatgtttatcaacaccctgccaatgcggatttctgtcggcgattgcaccgttcaggaagcggttcaggataccttccacaatttaatgctgctgctggagcacgagcaggcacctctggttctggcacaacaatgcagcggtgtaccacagtcaatgccgttgttcagcaccctgctgaattatcgccatagtcagacagctgaatcggttgacactgtatggacgggtattcgcattctgaccgcagaagagcgtaccaactacccggtcacgttgtcagtggacgatttaggcaccggattcaggctaatttcacaaacaataaccggcattgacccgaacagaatagccacttatctggtcaccgcaattaatgcctctttaaaag

SEQ ID NO: 307 - DNA, 715 bp, Xenorhabdus sp.
  CDS (36)..(713)
  unsure (1)..(715): unsure at all n locations
nnnnnnnnnnnnnnnnnnnnnnnnnttaaagttcactgggtgaactggaatatgccactgatctgttcgatgctgccaccattgaacgtatgatcgggtatcttaaacaggtcctgatggcaatgaccgcagatgccatgcaacccgttgccagattgccgatgctgtccgcttcagagcaacagcgattgttagtggagtttaatgcaacacaaacgcgccaaacagaaaaccctcaaaatgttctcatccacacgctttttgaagctcaggcagaacagcaccctgatactacagccatcatccacggggatcaggtaatcagctatgcagaactgaatcaatatgccaaccgtctggctcatcatctgattgccctgggtgtacgcacggatgaccgggttgctatctgtgtcgagcggggtccggaaatggtggtgggattactggctattcttaaggcgggtggtgcttatgtgccgcttgacccggcgtatccggccgaacgactggtttatatgctcaaagattccgctccggtcgcattattggttcagccgtcaacttgtcaggccattcattccgatacagtgcccgtcatcatgctcgatatncagaccccatttatggaagaacaaccagagcataatccagagatacccggcattacggatnnnnnnnnnnnnnnnnnnnnnnnnnnnnnnnnnnnnnnnnn

SEQ ID NO: 308 - DNA, 1676 bp, Xenorhabdus sp.
  CDS (1)..(519)
gaattgattattttcctgtgcactgatctgagagcatcgcattatccagcccgaagtgagttcatgtatggcgaatggctacgtcatcaatatgaagaagggaaaatgcttaaatctgtttgtgatccggaactaactttagtgttggctcagtcacgacaggaagcgatccctctgattggcccacccgtaagtgatctaattccagttattccaaagtcagagattcgtcgggctattaaagatgttctgccggggttaattgaaaccttacagggagatgaacgtaatgttttgttaacgttggcgcgtatgtggagaacgttagttaccggagagtttgttcctaagaatatcgctgctgactgggcggcggcacgtcttcccgttatacaatccacagtcttggctgatgcgcggaaggcttatttgagtgggaatgaagaagattggcagagtcgtcagcaggaactccatattacgataagttcgctgcgtgactgtgtgctgaagagttaataatgtaccaatggatcatgcaggcccaagacaggatagcatgtattatcttgcggaaagaagcataacgaaaattgtgagtttaattaaactggaatatgagccagaacggttaaaaaatataggtgagttactcatatctctagataaagataatatgttgtcataatttgtagtagttcaaacttgatctgacagtcacccattttgatttagtgcctgtcagattaaatgcgggttagatttttttcagcccaaattgtttttccttccaataatgtctctattggtgtgcgaccacaacatattttcccttggtgagtgcgatgataattgtagttatctatccattcatccagatccgtttgcaactcattgagtgacatgtacagtttctttctgaaggtgatttggtaaaactcgttcaaaatgctcttatggaaacgttcacagatgccgtttgtttggggggagcgggcctttgtttttgtgtggtcgatatcattgacggccaaataaagctgatagtcgtgatattcgacacgcccgcaatattctgtaccccgatctgtcaaaattcttagcatcggtaattgatgcgattcaaagaacggcagcactttgtcattcagtatatagcagaatcatattaatatgacataatagctggattcatatgacaaaggataaagtgagatgggctatagtctggattttcgaaagcgagtactggcatataaagacaagcattcgttgaccttcgaacaaacgtgtacccattttgagatttctatgcggaccttatttcggtggcgtcacaaaatagaaccctgtgtgacacggaataagccgcccacgaaaatcagtgatgaagcgcttctcactgatgtcaaaaattaccccgatgactatcaatgggaaagggcaaaacgcttgggtgtcgcgcaatctgctatccattacgccttgaaacggctgaaaataaccgtcaaaaaaaacgctaagacaccccaacgctgacgctcaggctcgtcaggcgtttgtcgaacgcatcagccactacgaacaggcgatgaaaccgattgtttatctggatgaaagcggtttttcgcagtctatgccccgcacacagggttattcggcgaaaggggtacgct

SEQ ID NO: 309 - DNA, 2096 bp, Xenorhabdus sp.
  CDS (51)..(656)
gtgctctaaagtattgcttggttaaatttgacaagaggacggacgggccaatggctcagctttatttttattattctgctatgaatgcaggaaaatcaacttcattattacagtcttcctataactataacgaaagaggaatgaggacgttgatttttacagcagaaatagatacacgatttggaaaagggaaggtaagttcccgtattgggctatctgctgatgccttactgttttcaccagacattaatattgctgagcttatcagacgtgaaaatgatgcagaaaagattcattgtattttgattgatgagtgtcagtttttaacaaaagaacatgttgagcagctttgtgaaattgttgattacgatgatattcctgttctctgttatggattaaggacagattttcagggtgaattatttaaaggcagccaatatcttcttgcctgggcggataaattagttgaactgaaaacaatctgccattgtggaagaaaagcaagccgtgtactgcgttttggcagcgatggtaatgttgtttatgatggggcacaggttgatattggcggtaacgaaaaatatgtctcagtgtgccgcaggcactattatgatgtcattcatgaagctaaagcgaaaaaatctgaacaggtatagtccgcttatatgggtcatacgattaaattagaaaaatgaattaataaaaaggcatcagatatactctgatgccttttagattacattagtttattatttcttattatttttcaattttagcgccttcctgtgatatgggcgattctatgaatttacgtccatagaaagaatccagcaacaattgttttaactcagcaattagcgggtaacgagggttcgcaccggtacattgatcatcaaaggaatcttctgcgagtttatcaatttttgccagaaaatcactttcctgaactccggccgcacggattgagtctggaatattaagttgagattttaattcttctaaccatgccagcagtttttcaattttagtagcggtgcggtcacccgttttacttaatcctaaatgttctgcaatttcagcgtaacggcgtcttgcttgagggcggtcatattgactgaatgcagtttgtttagttggattatcattggcgttataacgtattacattacagataagcagagcgtttgctaatccgtgtggaatatggaattcagaaccaagtttatgggccatagaatgacaaacacctaaaaaggcattggcgaaagcgattccggcgatagttgcagcattatggactcgttcacgagccacagggttttgagccccctgctggtagctggcagggagaaaatctttcagcagttttagcgcctgtaaagcctgcccatcagagtattcattggctaaaacagaaacataagcctccagcgcatgggttacagcatctaagccaccaaaagcacataatgatttgggcatatccatgacaaggtttgcatcgacgatagccatatccggtgtcagtgcataatctgccaatggatatttctggccggtgatatcatcagtcacaacagcaaaaggtgtgacttctgagccagtaccagaggtggttgtaatcgctaccatttttgcttttatacctattttagggaatttatagatacgtttccgaatatccataaagcgtaatgccaattcttcaaaatgagtttcaggatgctcattcattacccacatgattttggctgcatccatcggtgagccaccaccgagagcaataatgatatctggtttgaacaaacgcatctgttcagcaccttttcggacaatacttaaagtaggatcagcttcaacttcaaaaaatacttctgtttctacattatgagattttaagaccctgatgacttgatcggcataaccattattaaataagaaagaatctgtcacgataaaggctcgtttggcaccatcccttgccacttcttccaaagcgactggtaatgagccacgacggaaatagatagatttagggattttatgccacagcatattttcagctcttttcgcgccagttttggtatctttagagc

SEQ ID NO: 310 - DNA, 2088 bp, Xenorhabdus sp.
  CDS (2)..(2086)
aagtcacgttgtcacgtcctataccttagacaaggaaattgaacactggccggttctgccacctatcgggcgcccgatcgccaatgctcagatctatattcttgatgaatattgccgtcctgtgcctcttggtgtcgccggtgagatttatattgcgggcgtaaacattgcccggggttatctgaatcgtccggagcttaccgccgaacgcttcctgattgacccgttctcaacggaatcccatgcccgcatgtataaaaccggcgatcttgcccgctggttacccgacggcaatattgaatatctcaaccgtaatgattttcaggtgaaaatacgtggttttcgtatcgaactgggtgaaattgaggctcagctaatgttgtgccacggcgtacgggaagccgtcgttatcgcccgtgaagaagttattaatgaaaatagccagaaacggctggtcgcttatctgtgcccacaggaaggcgtgagtctgagccctgctgaattacgccagcagctggcccgacatcttgctgaatatatgctgcccacggcttttgtgatattagatgcgcttccgttaacgcctaacggcaaactggatcgcaaggcactccctgctccggattcatcggctattgctacccgtgattatgcggctccggttggtgaaacagaaactgttctggcgaaaatctggcaggagttactcgggctggaacaagttggacgatatgatcacttttttgagctgggcgggcattctctgctggccgttcaactggctgcccgcgtgcgtcaaatgctgaaacgcgagttacctctgcaacaattatttgcccagccagtcctgatggatttagcacaggctattgctgaggctgatacgactaaccaaactatgatagcagtggcagatcgcagccagaggctgcctttatcctttgcacaacaacggttatggtttcttggtcagctcgatcctgccgccagccttgcttaccatcttccggcagcattacgcctgaccggcagactgcatcgtcaggcgttatgctccgcgcttgataatcttgtagcccgtcatgagggattacgcactcggtttgtgtcaaatgaaaaccagccctatcagcatattgatgctgccgatatcggctttgacttatccagccatgacctgcgcctgcttgatacagccgagaaaaaccagcgggttgccgaaattgctgaacgtgaagcacagacgcctttcgattttgcctgtggaccacttatccgtggtcaattgctgcaactggcagatgaggaacacattctgctgatcaccttgcaccatattattaccgatggctggtcaatcgggatactggtacgggaattaggggttttctaccgtgccgcgctcaatggacagactgccgttttgccgccactccccattcaatacgctgactacgccgtctggcaacatcaatcattgcaggaaactgtccttgctgaacaacgtgatttctggcgtaggcaacttaaagatgctcccgtattactgacactaccgactgaccggcctcgcccgaaagtacaaacctatgttggtaatcaggttgctttccacctcgataaccgcgtgttgtcttcactgaaaacccttggaaagcgccataattctaccctgtttatgaccgtcctggctggctggagcattgtccttgcccgactcagtggtcaggatgatattgtcatcggcacacccgttgcgggtcgtccgtatcctgaactcgaaggattaatgggtatttttgtcaatacactggcattgcgtattcagtttgatgaaaaacttaatgtcgtggatttgctgactcaggtcagagaaagtgcgctggcagcctttgctcatcaggaattgccttttgaacaggtggtggaagccttacagcctgaacgcagactcagctatagccctgtttttcaggtcatgctggccttaaataacacaccagctcagcagctgatcttacctgagttacagttcactccatttgaacagacacagcacaccacccattttgatttaacgctatcact

SEQ ID NO: 311 - DNA, 2232 bp, Xenorhabdus sp.
  CDS (2081)..(2230)
tgctctaaagtcagctgatcaaagaatttgatgagaggggagtcgccatacgttttctggatgatgggatcagcacagaagggacaatgggcaagatggtggtcaccattttatctgcggttgctcaggcagaacgccaacgaatactggagcgaacaaacgaaggccgtctggaggctaaagctaaaggggttaaatttggccgtaaacccacaatagacaaagctcaagttcgccatcttcatgaacaaggtatcggagcaacaaacatatcgagacaattaaaaatagcgcgtgctacagtctataaaatcctcgctacggtgtaacggtactcagaatcgtcacttttgggggttcttcggcggaacccgtttatctttctgactattggccttctgccatacataacaagaacctagtgttggatgcccagcaaaaggcagttcgcccgcaggagtaaaaattctgactctgtaatctgcatcaggatgaagtggtttaagtaagaaagtggtttcactcagattggtccacttagcaaactgagccatttgctgttcagtcaggttatctgcaccaacaactacagccagtgggttaccctgtaattttttatcggaaaaaacattaacctgttcaaataataatttcattattcactctgtttataatttaaaccatcaacaagtggttctctattttttatagcgtggtataacctcaataaaaacacacattgagttacatatttttatgatattcaaaaataagataaaaaagacttgatctcaagttaacctgaggttttagagtatgacacactaattaatggagataaataaggagaatgataatgccattggatataattactgcctatcgtaaatcaaatgcattatttgcctttgttgacagtaaagcaccattatatttaagtacagagaagggtaaaacagtggaacaacttgctaggctatgcaatgtctatcaggatagatttcacagcctattgaattatatgaaaaaacttaacatcttaacaaaacaagaggataaattttatcttactgaacaatgggcatcactcaatgatcagaatagctttgaaacactgtatataaagttcgaattagatcccgtattctggaatacttggtcacaatacagttcgtctttaaaaaaaccgaataaaaaatccgctttcgaacttacccatcacgagtcattttttgactatctcaatcatgaaaacaataaagatattaaattaacttttgataacttaatgggagaaatgacgaataaaacaaataaccatattattgatcacattcctttagatgatattaagacatttattgatatcggaggtggtgtgggtagtttcgtgaaaaacataaaaactcaccatccacatattcagtgtcatgttatggatcaatataatttcaccagaaaagaatcagaagaaattacttttattaatggtgatttcttttctgagattccatccggctatgatgcttatagcataaaaaatgtattggatgactggccagatgatcaagctatcgatattttgaagaattgccatacagcaatgcgtgatgattcagttttatatcttatcgatataattaaagaaccacatgaagcaacctcatttgatttatacatagatacccttttgttagggagaagacggtatcaatccgactttgagtttatggtaaaacaagctgggttatctattaaaaatatctataatttgaattattccacagagaatggaaattactatctttttgaaattaaaaaataaatttacttttaatactgcgctccagccagggagatagctctgattaggttttgtttgtcccggagggatagtaataaagaccgtattactatgagacctccggcgtttaacgattggtattttttcgcttaaatgataatgtgactaccgttcaaaacataaaataaaggagtcattagatgtcatcaatccagacagagataattcccttctaattaattttattattaacatacttgattagaagggaaaaagatgaattacacaaaaatagatcttaacacgtggaatcgtggagagcactttgcgtattatcgccatagtgttaagtgtggctttagtctgacgacgaaaattgacattacagatctgcgcttatccttagcaaaaacacattttagagcaca

SEQ ID NO: 312 - DNA, 2729 bp, Xenorhabdus sp.
  CDS (3)..(2714)
cgggcataacggatcagcatctggcttatatcgtttacacctccggttcaacgggcgttcccaaaggcgtaatgagcagccaccatgcactgggcaatcggttgttgtggtttgtacgcgatatgtggtttgtggacgatatagtgaccttcccgcttatcacagcactgaaaaccagtatcagctttgtggattcggtaacagaaactctgagtacattactggcgggaggacggctggtggttttcgacaaccacgaagtgaaagatcctgcccgcttctgtgcaggtctacaacatcatggtgtgaattcactggtcgttgttccttcctttttacagctcttaatgcaggatcgtaatgaacatgccctgaaatcagtcaggatactgatttgcagcggagagcggctggcacccgaactggcacagcaggtcgtcaccaattatccgtggctccggctgtttaatttctatggttcagcagaaattaatggtgacgcaacctggtatgaatacgatgcagcgcgtggtgtgccggatgcctctgtcatcggacgcccaattgctaatacccgctgctatattctggatcctgacaggcaactggttccgtctggtgtcactggcgaaatttatattgccggagccggagtcgctcgtggatacctgaatctccccgaactgacggcagaacgtttccttgccgatccattttcctctattccgaatgcacgtatgtataaaaccggtgatctgggccgctggctaccagatggcaacattgagtatctcggtcgtaatgactttcaggtgaaaatacgtggtttccgcatcgagccgggagaaatcgaaacacaactgatgcagtgtcacggcgtacgcgaagctgtggttatcgcccgcgaaaaagcatctacggcggaaaaaacaggaagccagaaacaattagttgcttatctgctggctcaggatggtattgaactgactcctgcacaattacgccagcagcttgctcagcgtcttgctgattatatgctgcccagtgcctttgtcatccttgatgcctttccgctgacgcccaatggcaagctggatcgtcaggcgcttcccgttccggatcaatcagcggtaatcacccgaagctatgaagcccccgcaggcgaaatggaaatcgcgttagcccggatctggcagacattgctgggactggaaaaagttggtcggcatgatcactttttcgaactcggcgggcattctctgatgattgtcaacatgattgaccggttgcacaatattgggttacggcttgatgtacggaatgtatttgcagcccctatcctgagcgaactggcgcaggcgattttagtctatcagcgcgatactcccgcttttgtcgtcccccctaacctcattaccgcagactgcacagcaattactccggatatgctgtcactggtttccctgtcacaatcagagatagatgccattgccgcaacccttcccggcggagtcagcaatatacaggatatttacccactggcaccgctacaggaaggggttctgttccaccatttattgcagactcatggggatgattacctgctgcaaagcctgctggcctttgacagccgtgaacgccttgacacttttctggccgcattgcagcacatcatcgatcgtcatgatattctgcgcacctctgcttactggcaggatctggctcagcctgttcaggtagtctggcgtcgggcaccactgcatattcatcacttcataccgacaactgaaaacgaagtgctatcacagctaagtgctcacacggatccgcaccataatcgcctcaatctgaacctcgccccgttattctctgctgatattgcttatgatgcagcacaggatgaatggctgctgtctctgcgttttcaccatctggtcagcgaccatatgacactggagctgatttttgccgaaatcgctcaggtattgcaggggcagtcggaattactgccagtggctctaccttaccgagattttatcgcccgaattctaaatgtgccggtttcagtacatgagaactatttccgcacccagcttgccgattttactgaacccactgcgccattcagcatcgtcagaataccaaacgataaccgtgttattcatcagtctcatctagcagttgatccggctctggcaaagcatatccgtactcaggcccgccatctgggggtcagccccagcgtactgttccacgtcgcatgggctcaggtgctggcacataccagcggtcatgacgatgttgtctttggctctgtattactgggccgtttacagggtatatccggggttaagcgcatactggggatgtttatcaataccctaccagtccggatttccctgactgaccgcaatttgcagaaaacagcaagtgttcaggaagtcgtacaggccacttatcgcaatctgactaatctgctggaacatgaacaggctccgctggcactggcacaacaatgcagtggcgtggctcagcctatgcccctgttcagcgccttactgaattaccggcatagccagagtaatgaaacagaaacagtcagtacaacctgggaaggcatacgggttctggcagcagaagagcagactaactaccctgtcacactcaccgtggatgatttaagcgaagatttccagttgaaggcacagacgtaacggatcttagagcac

SEQ ID NO: 313 - DNA, 3287 bp, Xenorhabdus sp.; identical to SEQ ID NO: 32
  CDS (1313)..(1642)

SEQ ID NO: 314 - DNA, 1882 bp, Xenorhabdus sp.
  CDS (1)..(1707)
gcacaagatgaaattgatctgattgctgctggcattcccggtggagccaccaatattcaggatatctaccttcttgcgccattacaggaaggtatgttgttccatcatttgatgcaaacacagggagatgtttatctactacataccctgtttgcattcgataaccgcaaacgccttgatgattttctgaacgctttacaacaactcattaatcgccatgatatcctgcgcacagccatctgctgggaagggttaactcagccggtacaggttgtctggcgtcaggcatcgctgcatatcaaaacctttatgccggatacagatagtagcgaaggcatttcggctcagttgctagcgtacaccgagccttgtcagcgccgccttgatatcaatcaggcaccattattttccgccgatattgcctatgatccgcatcagggtgagtggctgctggctttctgctgtcaccacatacttaatgaccatatgtcgctggatcatatcatcgctgaaatcagggagctgctgcaccaacgcattgaaccactacctccggcactgccttaccgccactttatcgcccagtctctgcgtataccgatagcagatcacgaagccttcttccgtgaaatgcttgccgacgtggatacgcctaccgctcctttcgggatactggatatctacagtgaaaacaggcggataattgaggtcattaaaccactgagtgcatctctgtccagagccgtccgtaaacaggcaagccgtcagggagtcagccccggtgttctgttccacgttgcactggcacaggtactggcaaaaataagtgggcgggatgatgtggtcttcggtactgttttactgggacgaatgcagggaaataccggtattgaacaaacactggggctgtttattaacaccctgcctgtgcgtatccggctggaaaaaaacagtgtgcaggaaaccgtgaaagcagcctatcgcagcctgacacaattacttgaacacgaacaagcatcactggcacaagcacagcgctgtagcaacattgcccctcctctgccactttttaatacgctgctgaactatcgtcatagccagtcaaatgtcaccaacacgctatgggaaggcatacatctgatgaccggcaaggaaaggacgaattatcctctttatctggcagtagatgacttaagtaagggcttcctgctgagtgctcagtcagttgcgggaattgatcctgcttatctgattacctgtatgaccacaacgttgtccgacctggtacaagcactggaaaatgaaccacaaaaaccgatcatagatatttctactttgccgaccactgaacaccggaaattactggagaactttactaccgctcagactgacctgccaccagctatgcaaatttcagctcaatctgctgctgtagcctatcaggcaccacttggtaatgtagaaattgctctggcagaaatatggcaggaattattggaacagaaacaaataggtcgccatgataatttctttgcactgggaggccattcattaacagcagtgcaattattatcccgtatgcggaaacagaatatggaaatcccactcgcactgctgttttctcatccgacaatatgcgaattggctgaagttataaatcaacattattctgttggaattaaaaatagttcaggtggtaataattagcaaaatattattgaattaagtaaaaaataaattagctctacaaactgtggagctaatttaatataagaatatattttattgtttattatcacaaaaaagtgcataatcctgcgcttttggcagttttagtaggtaataaaagtgaaaatcaaattattatgcatctcagcaatcc

SEQ ID NO: 315 - DNA, 3366 bp, Xenorhabdus sp.
  CDS (1350)..(2477)
taaaggggctatttgtgctgccgatgaaatgggtttacgcgttcctcaggatatttccatcattggttatgacaatatccgtaatgcccgctatttcacaccagcactgacaaccattcaccaacctaaagagcggctggggcaaatggctttctccacgctacttgataggattatcaataaacgtgaagatgcccaaaccattgaggttcacccgcgtcttgtagagcgtcgctctgttgccgatggtccttttattgattatcgccgctaacagttagtcttcttgtagccattcagcattaagcgttgtgttatcaccaagatattcaagcaaccagcttaatgcaggtgaatggcttttttgcgaccatgtcagacagcacgggctatcaggtaatggctgctcaagttcaagcacacacaattttccctgacgaataagcggtaatgcccggtgtttaggtaccattcccacacacaatccctccattagacaggacaagcccgcttcccagtcaggaacaaccaatcgccgctgattatctaaagcccatgtatcacgcttaggcagggcacgtgatgtatcctcaagacataaactggcataaggccgcaattggtcatcatttaatttttccgttacgaacgccagctcatgctcagggctggcaacacacagccatggcataaaacccatatccctgaaactgtatcgctcgccaaccggagaagcgcgtgttgctccaatagcaacatcaacacgcccatccaccagcgcatcccatacaccgttaaaaacttcaggatagataaataactcaatatccggaaaatgacgatagaaatccagaataagctgacgtgtccgttctggtttaacaacctgatcaacagcgatactgagttgtccgcgccatccgtttgccacctgctgacattggtgccgggtatgattcatttttttgataacagaacgggcatccttaacaaaaatggctcctgcttcagttaactctacgtcacggtgacggcgttcgaacagagaaactgccagccattcttcaagttgctttatcgtataactgacagcagaaggcacacggtgaagttctgatgcagccgcactgaaacttcctgttcttgccaccgcatcaacaacttccagagaataatcagaccacatgtttcttccttttaatttttttcatagcatggtacaaataataccgtttcacaatcaaaaatcacgccatataaaataagctccatatttctttatcaattaccacaccgattgactaacgcgatttattaatacaatgacaacaaataaaaactctcttccatttatgttttatcttgctggcctgagtatgctcggctacttagccattgatatgtatctgcccgcctttgatgctatgagtaaagatttaaacacatcaaaaggtgccatcagtgcaagccttagcatttttctcggtggttttgccgttgctcagcttttatggggattactctctgatcgtctgggaagaaagcctgttctgattatcggcttatccctgttttgcctcagctgtctgggtatactttggataacagatgcaactcaattacttgtcctgagatttattcaggctgttggggtctgctctgctgccgtttcctggcaggctctggttgtcgacagatatgatgctgaacgcacgaaacgtgttttcgctatgattatgccattagttgcactttcccctgcccttgcaccattattaggcgcatggttactgtcacacacaagctggagggttatctttcttgttttgatggtggtaacgctgttactactgatacctacgctttttctgacgaacaaacgtgttcccattgataccagcgcaaataataatagtgcttctttcttcaccttattgaagtcatcagtttttagcggcaatgttttgatttatgcttcctgtagcgccggcttttttgcctggttaacgggttcaccaactattttgaatagtatgggttatgacgcgacagatatcggtttaagttatattccacaaactttggcatttatggtgggtgggtatggctgccgtattttgctggaaaaagttaaaagtgaaactatatttcctgtcttattggcaggttatgccataagcatggtacttatctatttagctgcttggttctatccttctttcatcgttattcttattcctttctgtgttatggcagcaatgaatggcgcctcttatcctattgctgtagcaaatgctctttccgtttatccgaaagacagtggtaaagctgccgcattgcaaaatgctttacaattaggcctttgctttattgccagtatgcttgttgctatgtttatgaaaaaccctctcatctcaacgacaacagtgatggtagccaccattatcccaatggtgataggttattatttacaaaagaaaaatgatgatattggtaactaattatcaatcaattaattgctctataatataatacctgagaatattctcaacgaaaggccatatgatgatatggcctttctcttgcttattgtttaaatattatttcactcatatactcatatggattcattattctaaaaactcggaatttgaggtttagaagagcaatgaagctctcttttatatcacggacgaacggcataactgcctttaagtcattttctgattagtttcaatattcctacggatttcaaaatgcagttcaacggcaaaaaaacaaatcccgggaagcataaataaccagtaataaagaggtacctcaaaattccaccacataaatgttggagagtatatgagttcatctttcgttgaagaaaataaaaaaatcactgaccagtggcataggattgcgaatgacctgcttcaggaagcaggtattcaaattaatggaaaacgcccttttgacatacaagtcaaaaaccctgatttttataaaagagtattgaaacagggatctttaggattaggcgaaagctatatggatggctggtgggattgtgagcgtttagatgttttcttttataaaatattacgggcgggtctggaacacaaaattccaaaaaattttaaggacattttgatggttgtgacttcccgcctgtttaatttacagtcccctaaacgggcgtggattgtaggggaagaacattacgatttgggtaatgacctatttacactcatgcttgatcccaatatgcaatattcatgcggctactggaaagatgcgaattcactggaagaagctcagtctaataaacttcggctgatttgcgaaaaattacagttatcgccgggctttagagca

SEQ ID NO: 316 - DNA, 3239 bp, Xenorhabdus sp.
  CDS (1976)..(2329)
aaagctgcccaaacttttggcgctattcttggtgctgtcgcaggtagtgttgttgggtataacgcaggttccggttctggcgcgggtactgccgcaggggctgtaggtggcggtgctcttggtgcagctgcaggttcagtggtgaaagataaagtcatcgttgaaggcgtatccctgacctacaaagaaaaaactaaaatctacacttctactcaggttggtcgcacctgccagttcactccgggattggctcttgtgattacaaccaaagcaaatgaaacacgtatccagccaaatgctgcttgcccggataaaaaataataatcaggtgaatcatggttaaaaaaattattatttcatccctgttgatctccttatccatccctgtttttgcttcatctcttcaggaccagctttccgcgattgctcaagctgaaaatgaaggtaaggccggagaacaaaagcaacaaactgaaagacaaatacagcgagaaaaagcagctaaagtagaaagagagagacaacagagggaagccgctgccagagcagaaaaaatcagaaagcaggaagctactcgtgaagcagaaaaacaaagagtactcgcagaagctaaagcagacaaaaaacgggatcaagattatgaggatgaactgcgtaaactcgaaattgagatgaaaaaactcgaaattgagaaacgttcagccagagtaaagcgtgaaaacgaatttattgatcaagaactgaaaacacaagctgcccagacggatgttattcaatcagaagcggatgttaaccgtaatttatcatctggagctaaatctctgctggaaagtgaaggcaaagcccgggaaaaacaatccagtggctggtttaagtaaaaattaactgggagtcgaccctgtttctaaatttgcgtaattacctgtttttgattctgttgatttattaactaaaacaggtgaaaagatggacgagaaacagttacaaagcctcggctactgagctggctaaaaatctcaaaactccagaagatttaagccagttctcctttttcctcaaaaaactgaccgttgaaacgctaataaaatcttggattgctaagggatttaacttggtaatggaacgttctcaccttgaagattacatatttattaatttcatgctgaagacggggtatatcaatgaatcacatcacagagcatatatgcaattatgggaagaaataaatcatattattcctgtaccagaccttatcgttttccttaattattccgcagaacattctcttaacgaattttctgatattattatcaataaaataaatatgctgcggaggtgatatgcgtcaaagaacaattgtctgtcctatcattcaaaataatggagaatacctgctttgtaagatggcatctgatcgtggtgtttttccgggtcagtgggcgttgtccggaggaggaatggagcccaatgaaacaatggaagcagcactgagacgagaaattagggaagaactgggtgaagctctggaaataacggaagttaaaccttgggcttttcgtgatgatatccggattaaaacgtatccggatggcaccaccgaagaaatttacatgatttacctcatctttgactgtatcagtaccaaccggaacattacattcaacgaagaatttcaggcaattgcgtgggtatcaccagaagccatgaaaaccatggacttgaatgaagcaacacgggttacctttaccctgaaaggaataatctgataaattccacgggctcatccctgctatccatgataaaggcagggtcaggccaaacagctctaacgttgcaatctacaggcctgagaggcatgctgtgtatcatcgccagaccggaatatggggccagagtcgcggttcacgtgctttcggcatttgctgccctgcatccgccactacgcatccagctcgtttcttcattaggagtatttatgactcagcttaccccgcttcattttttcaaatatctttcggatgaaacgcgcctccgtatcatgttgttgctacgtgagaccggcgagctgtgtgtttgcgatatctcaacggcacttcaggaaccgcagtctaaaacttcacgccatctggccatgcttcgcgaagccgggttgcttttagatcgacgtgaaggcaagtggatttactatcgtttgtctccacatctccctgtctgggcagctaatgtccttgaacaggcgtttcaatgtcagcaggctgaggtagctcagttgagtacgcgacttcagaagatcaactcgacaacaaacggtaaatccgtctgtcagtaacaagaaaaaaatttactcaaacaaattcgatttttcacatatgtatatttaggagaaaactatgtggcttgcaggggcaatttttattctgactctgattctggtgatatggcaaccaaaggggcttggcattggctggagtgccgtcattggtgccacacttgccttgatcacgggtgttgtccatatcagtgatattcaagtagtgtggcaaattgtctggaacgcaacggcagcctttatcgctgttattatcattagtctgttgcttgatgaatcgggcttttttgaatgggcagccctgcatgttgcacgctggggagggggcagaggacgctggcttttcacctacattattttgctcggagccagtgtttccgcgttgttcgcaaacgatggggcggcattgattctgactccgatagtgattgcgatgcttctggcgctcggtttcagccggggagccacgctggcattcgtcatggcagcgggatttattgccgatacggccagtttaccgttgatcgtttctaatctggtgaatatcgtctctgctgacttcttcaaactgggatttcatgattatgcctcagtaatggtaccggttgatattgccgctatcaccgctacacttgccatgttgcactggtttttccgcaaagatattccgaaggcctatgacgttgcgaaattgaaattaccgcgtgaggctattcgtgatatgcgcacattcaaaaccggttggattgtccttgccctgttattgatgggtttctttgcccttgagcctttaggcgtccctgtaagtttggttgctgctgtcgcctctcttgtcctctggctggttgctcgccgaagtcatgtgattaatacgggtaacgtactgaaaaaggcaccctgtttagagcac

SEQ ID NO: 317 - DNA, 4075 bp, Xenorhabdus sp.
  CDS (2)..(4009)
caatttaaccgttgccggattgaaggctttgaagcaacagcaattatggctggatttcaatcaaactcaggctcttttcctgccaacagacagcccacaaagtgcacttatccaccagctatttgaaaccaaagccatgcatcaccccgatgacattgcagtggtacacggtcagcaatcactcagttatggcgagctgaatcgccatgctaaccgcttagctcatcatttaattgcattgggtgtacgtccggatgaccgagttgctatctgtgtcgaacggggtctagaaatggtggtgggattactggctattctcaaagcgggtggggcttatgtgccgctcgacccggcctatccgtctgaacgactggcttatatgctcaaagactctgctccggtcgcattactggttcagctatcgacctgtcaggttattcactccgatatgctgcctaagtctgcggaatctttaccgaaagtcctgctcgatattcagatgccgtttatggaagaacaaccagagcacaatccggaaatatccggtatgacggatcaccatctggcctatgttgtgtacacatctggttcaacaggtgtgcctaaaggtgtcatgaacagccaccatgccctgagtaaccggctgttgtggtttgtacgcgatatatggtttgtggacgatatagtcaccttcccgcttatcacagcgctgaaaaccagcatcagctttgtggattcggtaacagaaacactgggaacattactggcaggaggacggctggtggttttcgacaaccctatggtcaaagatcctgcccgcttctgtgcaggtctacagcattatagtgtgaattcactggtcgttgttccttcctttttacagctcttaatgcatgatcgaaatgagcataccctgaaatcagtcaggatactgatttgcagcggagaacgactggcacccgaactggcacagcaggtagtgacaaattatccgtggctccgattgttcaatttttatggttcatctgaaattaatggtgacgcaacctggtatgaatataacgctgagcgtggcgtaccggatgtatcggtaatcgggcgtccaatcgccaacacccgctgctatattctgaaccctgacaggcaactggttccgtttggtgtcactggcgaaatctatatcgccggtgccggattagcccgtggttatctgaatcttccggaactgacggatgagcgtttcctgcccgatctcttttcttcccagccgaacgagctgatgtataaaaccggtgatctgggacgctggctgccggacggaaatatccagtacctcgggcgcaatgattttcaggttaagctgcgtggtttccgcattgaactgggtgaaatcgaaacgcagttattacagtgtcgcggcgtacgggaagccgtcgttctggtacgtgaagatgaacccaatcagcaacgtctggttgcttatctgcgctcacatgagggaaccgaactgatcccggctgaactgcgccagcagctttccctgcatcttgctgagtatatgttgcccggtgcttttgtcacgttagagacattcccactgacaccgaatggtaaactggatcgcaaagccttccctgcaccggatagtgccgcgattgtgactcagaattacgtggctccggttggtgaaactgaaactgttctggcgcaaatctggcaggaactgctggggctggaaagaatcggccgctatgaccatttttttgaactcggtggtcattccctgctggcaattcagcttgctggccgtattcgtcagatgctgggccgtgagttacccatacagaagatatttgaccagccagtgctggtggcattagcacatactcttgctgatgcggcaacgacaacacaagtcattatccccagtgccaacagtaatcagcttctgccgctctcttttgctcaacaacggctgtggtttctggggcaactcgatccggctgccagcctcgcctaccatcttccggcggcactgcgtcttaccggcttacttaatcggcaggcactgactagcgcactcaaccatctgattgcccgccatgaaagtctgcgtacccgctttatctccattgacgggcatccttaccagcatatcgatcccgctgatatcggtttttctctgccctgccatgacctgcgccagcttgattcggctttacagatccgccgggtcactgaacttgtcgatctcgaagcccggacaccttttgattttgcgcagggttctctgatacgtgggcagttacttcagctggctgatggcgagcatgtattgttactcaccctgcatcacatcattactgacggctggtcactgggcatactcgtgcgtgagctgggagatttttaccagtctgctcttgacggtagtgataaccccttactgccattgcctattcagtatgctgactatgctgtctggcagcgcgatcagcagcaacaagtggccctgaatgcacaacgcgacttctggtgtcgccagcttgctgacattccggctttattgacactgcctgttgattacccgcgtccggcagtacaatcctatgtgggcgggcaggttcctctccatcttgatgcccgcttactgacattgcttaaggaattaggtcagcgtcacaataccacactgtttatgaccctgctgagcgcatggagcatcgtactcgcccgcctgagcgggcaggatgatattgttatcggcacaccggttgccaaccgcccgcataaagaactggaaggcctgattggtttctttgcgaatacactggcattgcgtgtcaaattcagtcgcgaactcaaagtgacagatttgctggcgcaggttcgtgaacaatcgcttgcagcctatgccaatcagaacctgccgttcgaacaggtcgtggaggccttacagccggagcgtagcctcagttacagcccgatctttcaggtaatgctgacactgaataatacgcctcctcagaaattggtattgcccggtttacagctttcatcggttgagcagtctcatcatggcgcttattttgatttaaccctgtcgctgacagaaaccgaatccggtctggcaggcgctttaatctatgccgctgatttgtttgatcacaccacggctgaacgtatgacgggttatttcaccaatatactggcggcgatggtaagcgatgaaagcagaaccatcgctaccctgccgatcatatcggaaccggaaaaacggcagttactggtggattttaacgccacacaggtaagttacccacaaaatgcgttaattcatccgctggttgagactcaggcagaacaattccctgatgcaatcgcagtggaattcgaagatcaaaccctgagttatggagaactgaatcgccgtgccaatcagctggcacactatctgatgacacaaggtgttcgccctgatacacgcgtagcaatctatcttgaacgcagcccggagatggtagtgggattactcgctattctcaaggccggcggtgcttatgtcccccttgacccgacttatccggctgaacggctggcctatatgctgaaagattcagctccggtggttttactcacccaaacagttttactcacccgaacggcactggtggaaacattaaaccctgagtgtactatcgtgttgcttgatgagccgcagccttatctggctgggcagccggatcataatccagatacacaagcaatggggttgcagcctcaccatctggcttatgtgatttacacctcgggatcgaccggattacctaaaggggtggaaatgccactgatgactctgtcaaatttactacaatggcagcgtcaggctgattcatgcctctccagaaacggtaaaaccctgcaatttgcagcactgggatttgatgtcgcttttcaggaaatcttcactacgttaagtgaaggcggttgcctgatggtgaatgaataaaccctggggtgggaagatttggcaattcttggggttgattcagcaaaaccagattaccggcatttt

SEQ ID NO: 318 - DNA, 5332 bp, Xenorhabdus sp.
  CDS (4288)..(5331)
ctctaaagacgacgcgagtgtcagaaaacataaaaaaaacccgtttttataacgggttttcaaaatacgggattagaaattagatcgcgacaacgtttgcagcagatggacctttcgcaccctcggtgatttcaaattcaactttttggccttctgccagtgtcttgaaaccatttgattgaatggcggaaaagtgtacaaaaacatctttgctaccatcttctggagtgataaaaccaaatcctttagattcgttaaaccacttaacgttacctttaattttagacatcaaacttacctttaataaaaatgacacaaactccgtgctacatacagtacaacaaataatatagcttactgtctgcaacctagatcacgaaatatataacaaaatgcgaaaaacgcacgttttgtttaatttcattgatttattttatacgccaatcgccatttcacaaatcaattggcgtttcattttagttttgtttacttttttaccttttttttcttctcgtgctccagcagccattccttaatattcagcccccctgtatatccgactaacttaccatcatggccaattacccgatggcaggggacaatcagtgaaataggattacgtgagttcgccataccaacggcacgacaataatttaccgaacccagtgttagtgctaattgtttgtaactccacatctcaccaaatgggatattacagagctgcttccaaacccgctgctgaaattcagttccctgcatacttaaaggaaccgtaaatgtatctcgctttcctttaaaatattcttgtaactcttttacacactgcttagttatcgcatttttagattctaattctttcttttcattaacaaaataaatactagtaacgccttcatcattagcagtgacgtgcacataaggtttaggaaaaccttctggagtattcagataatggtgatacataaactacctccatttaatttattgttaataatttctgcactatttctatactagcctaaagctctccttcatcaatttgcaatgatgaattcagttacacatctgacaatttgataaagaaaccataccgcctactgataataaaaatcagaggattgccaataagatataataccttacttttaataacacacattcaaaaaagataaaaacaccatatattgacacaaaaaataaacacaaatccatatatagtatcgttctcataaagagattatcaaagtgtaatgcatcaatactcttttttattcttcaataagtgcccggatcaataaagaattttaccagaagagtgataatttatggcaaacaccattggatcccgggtagttatactcatcgaaaatcagatgcaaacacttttcatctggcagcgataacaaataaatctcaacgtatatcctcccccagaagagataaactcctgaggagttatttttcatcccagccatgacatcaatattttttctattaaatcacgctatctgcaatgaaagattcaaattaagtcttaaatgcaaacagttatctacaaaacagattatcttttgattaacaataataaacaataatttgtcagcatatctcaacgcttcggtatatagcttggaaaatttatctagattaagccattaaagagaatataccttttcacaaagctaaatatttattacatgacaattaaacccaaagttaagaatttatataacgtattcagttattgtccaaaacaagctgttaatttattgaaattcaactacgataaatctgaacatttgcaaaaaaagcaggatgtatgtcttcataatcgcctgataaaactgtttaaaagccagaaaaatatcaatagacaagataattgtataagttcagataactaatgacgggaaattctccacaataaaaacagtataatttccgatcaaaccaattttccctcgtgccatatttaaatgcggcaaagaatataatcagggtatatacattggtgagaaaatttagagcccgataaaaaaaccaccggaaaaaagagattcatggtgatgcagaaaaatgataactcagacagggatcctgttcagacaacattcaatacgctcttctccagagtaaccagaaaatccataaagcaaaaaccctttcctctgctcctgttcatagccacacataaatttattaacaaatcaacacccatatctctggttactccattttttcgatcaaaatcattgttctcaataatatttattaaataatttagacatttcacattttcacttttattatattttgtaaatgttgttttacctgttaacaaaaaaataaattaccctatgtcgatacctgatacacccgtgcccgatagcttaagttcagacacgccgataaatgaccacactataacaggcaaaagttcctcatttattgaaggtatttttgatagtctccccattgttatcggctatattcccatctcttttgctttcggtctaagtgcagtcaaactgggtttttctcctctcgaagccatatttttttcgtgtgttatctacgcaggtgccagccaattcgtcatcacagcattactcagtgcaggtacatctttatggattgcagccctgacggttatggcgatggatatccgccacattctgtatggcccggccttacgctatcggctcaagcaaaaattatcccaaaagaaaacagttatttgggcgttcggattaaccgatgaagttttcgctgctgctacaacgaaattaataaaagatcagcgcagctggagcgaaaactggatggtcgccattgccatgtgttcgtggctgtcatgggtattgggtacaatagcgggcgcattactgggtaatggttatctcgaatcataccccgctattgaagcagcaatgatatttatgctgccagccctatttttaagttttctgctctcttccttcaaaaaacaaaataattactgcgttattgcttctctggcaggcgcgttaataggtgtcatgtttttttctatcccggttgccattctggcaggaattattggtggctgcttaggtgctcttgtacaagctcacctaactcaagtgggggaaaaagcatctcatgattgatcataatatattcataattggaatggttgtaggaatagccaactttttgttccgctatctgccactgtgctttggctcgaatcgttctcccggagcaaaaatgggaaacatcgggatcatattggacagtattggagtggcatcaatttgttcgctcctcatcgttgcaggaattcctgaggtgatgcgggcacataacaagttttttcctacactgttgggctgtctggctatcggtatatgcttctataagacacgtagcattatcatatctacactgtccggagcagccatttttggattaacattcaaagtatttatgaattaggtatcaatattaaaagaaatatgatgataataaataactataattgctaaatttaacttttaatatagtatttgtatggtttttaacagaagttactttaccggttgaaactaataaggtatctaaacaatggaaagttcattcactcccacagaagagttgcttaattgccgtgttgcacagcaaaaagagttgaacaaaagtttgccctatcaagagatattactgactcgcttatcgatgcatgtccagagtaagatgctggaaaatagaaataacatgctgagagctcaaggaatcaacgaaaccttgtttatggcactgatgatcctggataccaaagaaagtcgcagcattcagccatcagaacttagtgcagcgttgggttcttttcgtacaaacgcaactcgaattgctgatgaattagagaagcaaggctggatagaaagaaaggagagccacaacgaccgccgttgtctccatcttcatctgacagaaaaaggtacaatttttttgaatagtttacttccgcctcagcatgagtgcttggttaaactttggtctgcccttgatctggaggaacagaaacaattagagaatttgatgagaaaattgctgacacagttggataatattggggattgtttgaaaaagtaattgtttctccctgaacagtactgagtcaaaaaatcacattatggcaatatgacctaaaaaaacttttccgctagccggtatcatttgatacttcatatggctaacgattatcctctgataataatcaatcccataagtctatcttttccagtagtgtcatctacactactggaattgaatggtttttataatatttatgtcgtacagcaacataaacaaaaattacggagattcactatgagttctagtgagggaaatccagtaccaccaacttcgaatcaacctcaaaaaaatatgagaaacaaaaaaccctctcgtcgcaatgcattgattttaatctctttattatttctcatcgtcggagttatttatgccatttactggtatctcttctcgcgccaccagcaagaaacggataacgcctatgtcacaggtaatcagattcagatcatgtctcaggtaagtggcagtgtcaccacggtctattttgataataccgatttcgtgaaaagtggcagtgttctggttcagctcgatcctacagatgcagaacttgcactaaaaaaagcacagaacggacttgccatggcggttcggaatactcagcaacagatcgttgatagtgaaaaatatcaggcagtcattacacagaaaaaaattgccctcagaaaagcacagaatgattttgaccgcaggaaaatactgggtagccgagaagtaattggtaaagaagagctacaacatgcttatgaaagtgtagcgcttgctcaggcagatttgaatgtcgcaattgaacagtacaatagtaatcaggctgttattttgcatacaccgctggaaaaacaacccgcagtggaaaaagcagcctccgatgtccgtgatgcctggctgaatttacagagaaccaaaattgtcagccctgtagacgggtatgtttcccgccgcaatgtacagataggctcccgcatcaatacaggaacgcctttaatggctatcgtacccgccaccggcatgtggattgaagctaacttcaaagaaacccagctcgtcaatatgcgcattggtcaaccagcaaaaatcgtcagtgatttttacggtgataagatcgtatatacaggaaaagttgttggccttgatatgggaacaggcagcgccttttctctgctacctgctcagaatgccagtggaaactggatca

SEQ ID NO: 319 - DNA, 3464 bp, Xenorhabdus sp.
  CDS (1)..(1521)
gtgccctatagactggcgttagtgaccatttctctcgcaatggctacttttatgctggtcttggattcaaccattgccaatgttgccataccaactattgcggggaatttaggggcatcaaactcccagggaacatgggttatcacctcgtttggggttgccaacgccatatccatccccattaccggctggctggcaaaacgcattggtgaagtcaggctgttcatctggtctaccgcactgtttaccctctcttcatggctgtgtgggatctcaggcagccttgagatgttaatcgcttttcgtattattcagggattagtagcaggcccagtgcttccgctttgccaaagcctgttattgaataactacccaccagccaagcgaaatatggcgctggcactctggtctgtcatggtggtggttgctcccatttgtggcccgatactgggcggttatatcagtgataactaccactggggctggattttctttatcaatgtccctcttggtatcggaattatctttgtcacaatgaaactcctgcggagccgggaaaccaaaacagaaattaaaccgattgatacagttggtttaattttactcatcgcaggtgtcggatgcttacagatcatgcttgataagggtaaggagctggattggtttaattcgactgaaattattattctcgcaactatcgctcttatttcattagtgcttttggtcatatgggagttaaccgacgataaccccattatcgacctttcattgttccgggagcgtaattttactatcggaacattgagtatcagcctcgcctttatgttgtatttcggcagcatcgttctgctaccgcagctactacaggaagtatttggctataccgcaacatgggccggttttgcagccgctccggtggggatactcccgctgttactgtcaccacttttcggtaaatatggtcataaagttgacatgcgtgtcctcatcaccttcagctttattgtttatgctatctgtttttactggcgggcatatacattcgaatcaggaatggattttgcggcggcggcatggccccaattcttacaagggcttgcgatggcctgcttcttcatgccactgacaaccatcactttgtcaggtttggggcctgaacgcatggcatccgcttccagcctgtcaaactttacccgtatattatcaggctcaattggtacatcgatcacaaccacactgtggacacaacgtgaatcgatgcatcatgcaaactttaccgagcagatcaccccgtataaccccaattatcagcaggttcatcagcaactctctcaattgggaatgaatgatcagcaaattgccgcctatctggcaaaagagatcactcatcaggggttgatcatttcagctaatgaaattttttggatttcagcaggtatattcttgatcctgatattacttatctggatggcaaaaccaccttttgtagcaggaaaacagggtagtggcggagcacactgagcagaccatatatttccgttcatagtttttccgacaactgcagctcattctctgactgaaagaacccgggatcattcgggttcttcagacagtgacgctaaaacaacgccaataaccgtctctttattttcatcaataaaaaaatgaccgccctgaacatattgtacggttacaccttcactggataattctgaccatgcatggagttcaattggtttaatgtccgggtcagcatctccgcttaaaacggttatcgggcttttcaacaatctccgttttatcgaataagtttctgccattttaaaatcagcccttaaaagcggcagcaagaaatccatcagctccctgtttaacaggacttcatccgtagcaccattcatttcccgtaatacacagataaattcatcatgcggtaagtcgtgagttacggggtaattatgtctcaaatgcggagctgtacagcctgatgcaaacaaatgcacaggaaccggataaccacgggattgaagtttgcaggcaagctcaaatgccacccgggagcccagactgtgtccgatgaaagcatatgggattgttgtaataaattccgcatgagccattaattcatcgatcagtaattgcaaatcttcatatggcgcttcatcaagccgggttgttctacccggcggctgtacggcaacaatttcaatatcatccgtaaaatatttagcccagtcatgatacgtcttggcagagccccccgcatagggaaaacagaatattctcagcctcgggttatggatcggcttagggataataaatagcttattactttccaaactcccctcctgtttttccataaattacctattaatatgcgtattgcgatagcgcagttgttcttccgctaacgcaatcaaatttgtcagagacgggcgctgataaaaggccttaagttttagctcaatgctaaaatgggcattaatttttgccaataggcgtacagccatcagagaatctcctcccagctcaaagaaattgtcctccggcgaaacagtgctgtgattgagagcctcactgaaatgggaacagagctgtctggcaatctcagagttaaattcacacgccacatgttcctctgccagtggagcatgttggttttgccctaatatcaataaagcggcagtatcaatcttattgtttatggtataaggaatagcatcgatcacccgccattgcgttgggatcatataatccggcaattggccttgcaggtgctgtttgaccaaatcaataagctgatgggagctatctataatccccgaagctggcaccagataaccacagagccgctcatagggctgtttttcaacgacgacgacagctttatcaatattcggcacttgcttaatccaggattcaatctcttccggctcgatccgatagccccggagtttgatttgcttatccttccgccccagacacaacagcgtgttatccagagtaaaacaacccagatcaccggttttataaagccgttcgccgctgatacgggagaaagtatcttcaataaacgcagccgcagttaagtcgggacgctgccagtaccctttcgcgacccccgcaccaccgataaataactcaccaaccactccggctggctgatggcagccccgttcattgagaacatacatctgtgtattggcaataggggagccaatcggtaacaccccttgacgcctttggaggtctgacccgatattcaatcgcccgacacagcaacccacaaccgtttctgtcgggccatactcattaaaacacacactttcaggcgcaatagcgctgagatactccagatgaatacgactcatctgctcgccaccgacaacgatcactttaacgtccagcgatgtctgtttctgtcccagactgagtgccaaactttagagcacacggaccgagca

SEQ ID NO: 320 - DNA, 6071 bp, Xenorhabdus sp.
  CDS (250)..(4962)
gctgctgggtattagtcagctcggtattcatgacaacttttttattctgggcggtcattccctccaggcaactcgccttatcagttcaatacgcaatgaactggatattgaaataccactaagcagcgtctttgaacatccgacacttgagcagttatcacagatagttgcaattcatctcctcaaagaaaagagaaagcattttcacactgaacaagaaataacagagaaactattggaaggtgatatatgaagaatgcagtacaaattatcaatgaagcgttaaatcaagggatcactctgtttgttattgataacaaactaaaatataaaacgaatcgtgacagtattcctcctgaattatttgaagaatggaaacagtacaaacaagaattgattgattttctgaatcagatagattcagaagacgatatggatactcaccgactgccagatattccgcgttatgagcgtgctgaacactatccactctcatttgctcagcaacggttgtggttaatagatcaattcactaatggcagcccgcaatataattgttcaggtgattttcgattgagggaatcgattaacttcaatgcttttgaagctgcaatcgctacattacttgaacgtcatgagtcattacgtacttatttcaaagtcattaatgacgaaccacggcagattatcgccacttcctatgatttgcctattacaatgcatgatctatcctcactttcagaatctgagaaagaacgtcaggttaaacaacggggtgaagaagagtggaaacagtctgtcaatctcagtactgacctgatgcttcgtattcagttactgaaactggcagaagatgactatattattctttatacaatccaccatattgcctgtgatggttggtcaatcgctatattctttagtgaactgcttaccttatatcgggcatattgccggggagaaagtaatcctcttcctccattaaaagctcaatataccgattatgcccagtggcagcgagagtggttacagggtgatattctcgagaaacaattagattactggcaaaaccagttatcaggtatctctccacttcatcgttttcctttggataatccacgtccggaaaaacaaaatcttgaaggaaacgtttacccacaacgaatttcaaagacgttgactcaggaaataagaactctatgtgccaaacataaagtcacgttatttatgtttctggaaaccgcttttgctgtgttgctaagtcgttacagcagcgaaaaagatattttggttgggatgccggttgcaggaagaagacatcgtgatgttgagtcgttaattgggttttttgtcaattcactggtgatccgaacagatttatcgggtcagccttcattcagtgaactcttaaagcagaacagccgaactattctggacgcttatgcacatcaggatctgccctttgagatggtagtggaaaaactcagcccagagagacaattaaaccataatcctatcttccagatcatatttgcggtacagaataaccagcgagatgcaacgctcgaacaggatattctcgttgaaacagaagaacactcattgttgacgacccgatttgatttggaagtccacatatatgaagagaaatatgaaggtgagctattcatacagtggattgcggattcaagcctattcaatcacgctactctcgacagactactggtcaattacgaaacgctgctgactaacattgttaatgtgatgaagcatcataccggtaacagcgaaccatcagtccatgatattccattactggcagactctgaacgaaacaccttacttcatgagtggggtgaaccacaggttccttatccaaccgggaaatgtttccacgaactcttcgaagatcaggtattaatacaccctgaaaagaatgcattgatctttggtactgattccctgagttatcagtcgttaaatgagcagtccaatcaattagcacattacttgattcagcagggtattaaaccggatacgctggttgcgctttgtgtaccaagatcattacaggcggttgtagcgctgctggggattcttaaagcgggtggggcttatgtacctttagaccctggctatccgaaagcccgtctccaatacatgctagagcacagtgaagttgaatttatcctgactgaaacgcaagaggtagaaaaactgcctatcacgcagcagaaagtcatttgtttagatactgatacgatacaattgcagctacaacaaatgcctggggttaatatcaccgagaatgagcgtccatatccactgacagaaaataatctggcttatgtcatttatacttctggctcaaccggcaaaccgaaaggcgttatgctggagcataaagggtgggtgaatctggctctctcacaggatgttttatttgacgttaactcaaatattcatgtattgcagttcgcctcctggagttttgacgccatgattctggaaatgtctatgacattagcctatggctcaacactgtatcttatttctgaaactcagcggcgttcccctgaattgatggatgaacttgttgaaaaacatcagataacccatgcagtcttgccatctgcgttgcttcctcatcttaattttgataaatggcattctgtttcaacattacttctggccggtgaagccgtactaccgcaaatcgctgttcaatggtcgcagaacagacaattgttcaatgtgtatggcccgacagaatgtacctctatcgttactacggctttattaactgacgaacgcattactattggaaaacctttacctaacgtagtcatgcgtattcttgatccagaaggtaatctggttcctatgggagttatcggagagttgcatatcggtggtgttcaattggcacggggttatcgtaactcaccggaaatcacagaaaaacaatttattcgcgatccattcagctcgcattcaactaatgagcaggaaaacagactgtatcgtactggcgatttagttcgctggacacacgatggtcaattggaatttatcggtcgcattgactctcaggttaaaattcgtagccatcgtatagagctaggggaaatagaatctgttttgagtaagcataacgccttaagtagtgctgctgtgatcgcttatggtcaggatgaagataaaaaactcattgcatatgtttgcccaagcacagagtggttaggtgaaaaagccattgaatttaacgcacacagtgttaataactggacagaaatttttgatgagcaataccgtcaacccataatggagagtacccagaaagaagatataagtgaggtagtgacagcagaaagtgatttcggtggctggatgaacagttacactgaacagccaattgccgttgaacaaatggaagaatggttagctgacataatgaagcggattgactccctgaatcctcaccgtttactggaaattggctgtggcagtggattattgttgtaccgctatgctaaacagtgtgaatcagtagttgctaccgatatatcggctgaggttttaaatcgtcaccagcatatcctgcaacagcgtggctggtcacatgtggaactcagaagaggggatgcgctcaattcaggaacactacatgcgggcgaatttgattctgtcgtaattaactccgttgtccagtatttccctaatgttcagtatctggaaaaaatgcttgagcaaataatacctgcattgacatcaggaggaaaaatactgctgggtgatatccgtaacttagatcttttaaccgcccacgctacagcaatagaacaaagtcgtctcaatggacaacgtattcaggtgggttcgctggcaaaccgtatccagcggcgtttacagcaggaaccagaatttttactcagcccaacttattttgcccagttgccggaacgttacccagaaatcagccgggttgatattctggtgaagcggggtgtgggtgacaatgaaatgatgcgttatcgctatgacgtcatattacataaaagagatgaaaatacaggatctctctgtgaacgttcgataaattggcacaattttgattctttggaaaacctgaaaaacagactacaggcaggaacagaagagacatttggtatttcaggtattcctaatgccagagttaaagatgagtttgtgttggcagaagggttacgccactggccagccaatcaggtaatcacacctccggaaaatgccagcggcttttctccacaagcattaaaacagattcaggaactcgaatccttactgcaatatgctgaacaatgcggttatcagtgtggcgttacatggtcacaacagcaacctgatttactggatattattttcagccgtggcgaattacctcctgtgctggcgcgtactgactacaatcaggtacatttggcgaattatccgcaaatctcggccatcaatggcgaactttcagaattactggaatcgaccctgaaacagcaattgccagagtatatggttcccagtctctatattcctctggaacgaatgccactttcgttaaataacaaagtggataaaaaagcgttgccagtcccaaatgaagatgatttacgtcggcaaacctatgtcgctccaagaagtgaaatggaaattaaaatcagtcagttgtggagaaaattacttaacgttaatcaggtcggcatttatgacaatttcttcactctaggagggcactcacttcaggcaactcgttttattagttcgatacgcaatgatttaggaatagaagtaccattaagaagtgtgtttgaacatccgactcttgaacaattatcgcaaattatcaccattcatctactcaaagaaaaaagaaaacattttcaggcagagcaagattcatctcaggaatatttaagaggtgaaatatgatatatgcagcacagattgtggatgaggcgttagagcaggggattactctatttgttgttaacaaccggttacaatacgaaaccagtcgtgacagcattcccactgaattgctcaataagtggaaacaacataaacaagagttgattgattttctgaaccagctgaattcagaagaacagactcaggcgagtcattttttgcaggatattcagcgtactgaaaaagcgaagcattatccgctttcattttctcaacagcgtttgtggtttatcgatcaactggctggtggcagtcttcagtataactgtatattcgatttcaggatgcgggaagccattagcataaaggcgtttgaaaacacagttaagtcgctgcttgaacgccatgaagtgttgcgtacctattttgagattattaataacgagccgcggcaatttattgccgctgattacgatataccgattacatattatgacttatctgcgttgtctgaggccgagaaaaacgaccagataaagcagtttagtaaggaagaagaaaatcaactctttgaccttagcacagacctgatgttgcgccttcggttaataaaattggcagaagatgattatcttattatttatacggtacatcatattgcctttgatggttggtccgcttcaatatttctcagtgagttttttacgttatatagagcttattgtcagggaaaggcaaatccgttattaccactaaaaattcagtacaccgattatgtccaatggcaacagagctggttacaaggcaatgtgttggaaaaacaattaacatattggcagaatcaattggctggaatctcacctgttcataatataccgctggataatccacgaacaggaaaacaaaatatcggaggacgttttcatatacagcacatttcctcacatctgacccaagcaatcaggggattatgtgctaagcataacgtgacgttatttatgtttctggaaacggcttttgcggtattacttagtcgttacagtaatgagaaagatattgttatcggaacaggacttgccggaagaagacattatgatattgagccgttaattggttttttcgtcaattcg

SEQ ID NO: 321 - DNA, 4317 bp, Xenorhabdus sp.
  CDS (1404)..(2540)
aaacgcgtggagtcaataaaggcgatccccgtagggtttccttttaattgagtcagatagctgcacagaggcactaaaacggaaggcgcgacactgataaaacgagtataactgagcaaggtgggaaaatcgtgatgatgatatcgccaaatatgctccagataaaaatttttaaaatcacgataatgcgacagatgaaagaggatcaggatggtcatgatttcactgggatacatgtgaccttttctacgacgtaggcgatatcccttattgagacaaaactgttcccattgtggaatgaaaaaacgacaaaagtcatcgacatcgatgaaaatttcaactaagttgttcatagcctgttcctccccggagctgtttcgacttgcaccaaaacacggctccttgaacaggcttctcgtcaatttcttatccagaattggggttaaattaactatttttaaataattcagagtacaaattaattgttaacctctatctgtcttcctttctgaacccgccatatactcccgtggcggtcttcccattattttacggaaaaaagtcacaaaagcactgtcactggtaaatcccagttcctgcgcaacataagataacgttttgccctgggccaataattctatcgctttaaccaatcgccattgctgacgccattgttgataattcattcccgtttcacgcttaaatatacgggtaatggttttttcactggctccaatataggttgaaatcacctgtagtgaaggtggcaattgctcaaaggataaactcgtaaaacggcgatcagaaggtaatggtaataacgttggttcccggtgcgcctcgccaatttcatcaagaaatactgccagtaaatttgcgttttttccctgctcccagtcagtatcaaacggagatattgcaatacgctccagaacagcctgtagcaacggagtggcttccagtatcgcacactgctccggcagacattgtacttcagaaatatcgagataaattgatcgatatccgatggaacctcgcatttctgcccgatgttgcgtctttggtgggatccatgccacccgggttggcggcaaaatcgagatctggctggctaatgtgattttgatacagccacgctgagtaaacaacaattgccccataccatgttgatgaaatccggaatcatgctgccccatttctgccgctatacccgcaacgagtacattcagattatcgggatcaaactgatcactctgcctcagccatgccatatctagtcctcaagtgtgaatgtccgattatataaatatattgtctttattatcataaacagacaatcactaaaatgttagccttctgctcataaatcattcactttcatgaagaaaaatactatgcaaatcaaaccaccactttggttagccattgctctgatgatgtttcctcagattgtagaaaccatctatagcccggcattaaccaacatttcccgtggattttccgccagcgtggaacaagcttctcaaaccttgtcactctactttttcgcttttgcgattggcatagtcgtatgggggcgattgtgtgatgttattggcaggcgccctacaattattgccggattattactttatagtagtgcctgtttgctggctctattaactgcacatttctggttactacttattgccagaatgttatctgcttttggtgcagcagtcgggtcaataggaacacagaccatgatgcgcgatagttatcgtggtgaagagctggccggtgttttctctattatgggcattgctctggctgccagcccagccatcggtatgatcagcggttccacgttgaatcattttggtaattatcaggcggtatttgcaggtctggcgattttagccgttatcctcactgtgtggtctatggcacgtttacctgaaacacgccctaccactattaccaaagttgttttatcagaaacagcccgtatgatgctgaaagatatttcaatctggcgaagtgcttttcttatcgctttatttaatatttgtctatttagctactatcaactggcacctttccgttttgatcaactcggaatatcaccaacactgttcggctacaccggcctgattcttgctttcggtgtcatgttaggctctgtattgaataagctgttgttgaaaaagaagtgggaaaccgaaaaactcacttttcttgcggcaagtcttaccctgtttagtggaatttttgtttatctactcgaaaatagctggctgtttatttttcccatgctgggaatagttatcgcctacggcgtcgctattccaaaccttctcgcatctgcgttaacttactatacagacagactgggcacagcaggcgctttattggggttattttactacatgctattggcgggaggtttgacaattgccggttggagtcaggctttgggtaatactctggcttattgtggattagccactgtgcttttatccctgccaggtattataccaagcagggagagtaaattttgaagttaatagcgccaagagagatattccaacagctgctatatatgaaaaatttttccattacctgtcggaaattctacagttaagctcaattttcctcccatagcttcaacgtagcgtttcagggtgactaactttatatcattaccccgttgttctatttgagtaatagctggctggctgatacctaaattatcagccagcttttgttgagaaatatttaactcttctcttaatagctgtaagccggtttctaaaatctgctcatcagccatttgttttatatctttacgatcttctactgaaaattcctgaatcttttctttgagagttttcactttttgtcctccaaattcgccaaatgcgcctcatattcagcatcagcaattgggatcatttctttataaaaacgcttattatttaaagccttatcacccgcacataagataatcgcctgtcttagcggatcaaatgcaaaaagtgctctgaatggccttcctttacattgaatccttagttctttcatattattgaattttgaaccatataaagaatcaactgcaggacggcccagttgaggaccaaagacttctaacacactcaggtctgctaatatcttcttctgtatactgatatcttgttcatcaagccactcttcaaagcgaggagtcaaaattacaatccacacgataacctcataagccataacttataatagcattatataagctataacttatatatcaattgtgtttcattgtagtacatcaagagtacatcaagccggattaggaatatcaacaaaagtgacatccagcccatgatgattagccagccattcaccgagtgttttaatgccatagcgctcagttgcatggtgccctgctgagtaaaaatgcatccccatttcacgggcaacatggatagtcttctctgatacttcacccgtcacaaaagcatcaacaccaaattcagcagcctgctcaataaaactctgccctcctccggtacaccatgcaatagtacggatctcttccggtgcattatcgccgcaatgcagcaccttacgttccagtctttgctcaagacgttcagttaattctgccggggtaatcggttgatcaaatacgccatggggtaataaagcgtcaatgtttcctatgatcttcactcccatctggcgggccagctgaacattattgcccagagtgggatgtgcatccagcggaagatggtagccatacaagttgatatcgttacagagtaaagtctgcaaacggcggcgtttcatgccacggatgacaggtgattcatttttccagaagtacccatgatgtacgatgatagcatccgcctccagacgaacagcttcatccagcaaagcctgacaggccgtcactcccgttataacacgctgaatatgggggcgtccttctacctgtaatccattaggggcataatcctgaaactcccgaacattcaattccgtattaattacatgttctaattcaacattattcattacacactccccattatttagcattttcacaatagaatccgcaccaatttacttgcctatagtgatattgtctgttagtagtaataacacatctgcagcaataagcgataaaagtaaaacaccctgccagcttaagcaggcagggtgcaagaatactatatccggaaaacgatatcaggcagaaaaacgaagaacaggactctgccaagtgggggaatttaggggtttagcgtatctgaagcaacttcctttagagcg

SEQ ID NO: 322 - DNA, 4740 bp, Xenorhabdus sp.
  CDS (4195)..(4740)
cgcgtcaaaatccttaatctgagcacttctatatccagcatatgatatcaggcaataaattttcctaatgtaacaatataaattatcgtccataaagacatagattaagcaaaaaggctattataaaatcgagcggatatttgcgattcatagataaatataccggaaaaataaaatgcagaaaatcagatggggtattattggttgtggtaatgtaacagaagtgaaaagtggccccgctttttataaactggaaaattcagaattaattgctgttatgcgccgaaattcagacttagcaaaagattttgctaacaggcacaatgtacccaaatggtattctgatgctgaatctctgattaacgatccggaaattgatgccgtttatattgcaacgcctccctctagtcataagaaatatactttattagctgccgcagccggtaaagctgtttatgtagaaaaaccgatggctctgacattttcagaatgtaatgaaatgattactgcctgccaacgccataatgtgccattatttgttgcttattaccgtagagcgttaccaagatttataaaaataaaagaactcattgattcaggtgcgattggcactccacttattgtcagttgccaattatcccgggaaatggaatcacgttatcttgatcccgaaaatcttccctggtttgtacaaccagaaatatccggtggggggttatttgttgatttagcctgccatacactggatatactagattttctgttgggcaaaattgtttccgtcaaagggcatgcgagctctcaggcaaaagcgtatccggcagaagattgtgtttcaatgtcattcatgttcgaaaatcaggtacagggtgtcggcatctggaattttgttgccagctctcgtgaagataaggtggaaataatggggacaaaaggcaaaataatttttgccacattcggggattctccaatttcatattacgatgacaaaaatacattacatcagtttaattttgaaaacccaaaacatattcaaatgccatttatacagacaattattcagcaattacgaggaaaagatatcagcccttctactggaatatctgcctcacgtaccagttgggttattgatgaagtgctgaaagaatatagagctgagctaaactcaaaatttaaataaacattatttatctagcatcttgtcattcaattacggagtcataaatatgaaaatattagtgataggagcaacaggaaatataggaaaacacattatcagcaacattaaaaaatatcatcctttgttagctgataaccctacagagcttgagattgttcaagccagccgtaactcacctgaaaattcgcttgatgtttttgacaatcaacaattagataattttttatctaaaaataaaatgtttgaagctattatatgtgcatttggtaaaactaactggacgaagccagaaaacctgcacgattatgaagaaagtatcaaaaataaagcatttggtcagatcaatgttgcgctccaagccttaaaatacattaaacccggtggttcaattactttaacatcgggtattgtcggcaaaataatgtcacctaatggttctcaaactgccgtaaccaatggggctattgaagcttttgtccgctcagcagcgacggaaatcacagatgcccgaattaacgtagtcagccccaaattattggatgaatcatttaccagttacgccaaattttttcccgggcaggaaacctgcacaggtgagcagatagccaaaggctatatacgcagtatttatggtaaagaaacaggtgtagtaattgaaatataggtgtgaaatatagattccgggtgattagcgattatacatatcgccaatcaccttttgtttatggctttagccagtttaagtcgcgttagcgtcttaaacataaaaccacccgctttgcgggtggagttcaaaggttataccaagaaaaacacctttccgttacgatatagatgttcaagctaatattcgtaactcaaataaggaaaggtgtttatgggcattaaagcacaaagctcagcgcatacaaagtggctgtgtaaataccatatcgtcttttcgtcgaaatatagacggaaagtgatttttaataatattcgttcaagtgtgggagagatcctcagagacctttgtaagtataaaggtgtggaaataatcgaaggtcatctcatgccagatcatgttcatatgttggtgagtattccaccaaagctaagcgtttcaagctttatgggatatttgaagggtaaaagttcgttgatgatctttgatagacacgccaatttaaaatataaatttggcaacagaaagttttgggcggaagggttctatgtcagtacggtagggctaaatgaagcgacaattcaaaagtatatcagagagcaagaaaagtcggatttaatctcggataaattgagtagtaaagagcatgtagaccccttcaaggggtgggccaaagcagcaaagacacttagtttgaacgaagagaaagcagcgtcatttaggcgcagtcggtaacaagcccttatagggcaagagcaaaccacccgttatacgggtggttatgatttattttattttcagggaatggattatatcaagtcccgaatttgttaatataattctcacaatcttgccctgaaacatcttctaacaaattattgctataatgtacgccattaaaactcttacctgatgatgttttaatactttgtttagctggtttatgactaatattttcatctttttgctggtctaacaaagaattcagtttgttagttaattcctcattttcctttttcagcttgacatatatactcccggcttctcgcatgcttttcttaaaccgaccacatactttaatgtattttttataaacttcctctgcttcttccttgtatttcccatatgaatcattaaatttttttcttaatttaatctcatgaaaactacgttctagcttttgatatgctttaaacactccaagtttattagaaaaagcagaaaatttaatgacaacgggtctatttttatcaattaaattaatgtgtattttttttccaagtaacaaaacatcatctatttcattgaaataacctgagaagataattttattacttttattttcttctatgattaaattatcttcagtgagattagtctttaatttaaaaatataattatcgaattcataactgtcacttttattaatttcattcataattactcctcatttatttcctgataccaatcaaatctattttctaaaaatcgatataaattagataggtattcactttgctttaaattagaaagtttaactatatgaatgatacttttagatataactggttgtaatgtatctaatagtatcgaaaggggcagcatatatctgaaaaatatttatatccgttgcgctatttgaccacccgttaccaaataaatcaatcaaaagctgtttgtcaaatattcagtaatagattgggtaatcacaagagctaaaatcggtaggtaatcaggatgttgtggagtaaaacaaatactctacagttcacaagagtggatttgcgtaataaaaacaaaaaaagcgcctttcggcgcttttttctatgacttgcagattattaaaatctaccgtcctgaatttggagcgggaaacgagactcgaactcgcgaccccaaccttggcaaggttgtgctctaccaactgagctattcccgcatagctgatccgctattttaaaaaccaaaacactcaacccattgattaggctaatgttttatctttaacggcatcaagatgggcgccattatgaacttctttagtaaagatggcaagtattttacaagccataaaacatcaagtgctcaaaatacatgctagtagacgcagtaaatcccactaatgccttcatcagcacgcaacatttgcatattttctctttaataaaaagcaaaaagacatgacttgtatagcctcttgactaaaatttgacatcacattaatctaatactcaattattaaattgaatgattgatatttatatcccacactgctctttatcaaacacaagctttcataccgaaaaaacacagtacagctacattgaggaaatccaccgtgaataacatggcatcagagaaaataaatataaaagcctcaccagaaatatcagataaaaaacatcgtgatatacctctctccatctatttgctcggattgacgatattcatcctgaatacttccgcatttatggttgtgggcatgatgccatcattaatggatgcgtttgccgttacagtcacagatatcggttacctgctttcactctacggagtaggaatgctcatcggcggaccgatattgacaacagtatttggtgtacttcgaattcccaacaagcaagcgctgctttggatattaacgctctatagtatcggagggatcatagctgcaattgccggaagttattatgttatggctatcgcccgtgttattaccggttttgcaggatctgcctgcatcggcatcgctttggcaatctgtggtgaagttgttaaaacagaaataagaggaagagcctcatcgattatattcacaggcatgatgctggcaaatgttctgggtgtccccgcagcaatcatgattgatcagtactttagagcacatggacgagct

SEQ ID NO: 323 - DNA, 5579 bp, Xenorhabdus sp.
  CDS (990)..(5183)
ggttcgtgaggatcctcagcgcgtctggcattttctggaagaacaatcggtaacgcaggcttgtctgacccctgcgttattacgggatggtgctgatttacctgcgctaacgataaagccgaccataatattaggtggtgaagcccccagtccaacactcgtccagacattgagccgtcaggcaactgtatttaatgcctatggcccgacagaaattaccgtatgtgccagccactggcgctgtccgttaaattataccgatacactagcccctattgggcgcccgacagcgaatacccggttttatctgctggatgatggtggtcaacccgtgcctttaggtgcagtgggggagctgtatattggtggtgacggtgtaacgcgtggttatctcaatcgccctgatctgactgatgaacgttttctggtagatccgtttactcatgctgttgatgcgcgcatgtatcgtactggcgatttagcccgttatttacctgatggtaatctggtgttcgttggccgcaatgatcaacaggtgaaaatccgtggttttcggattgagccgggtgagattgaagcccggttaaccgaatatccggctgtgcgcgaagcgtgggtactggcgcagggtgacgggcaggaaaaacgcctgatcgcttatgttgtaatggaagacattgaggcagaaaaagataacggattagctactcgcctgcgtgaatatctgagcactattttgcctgattatatggtgccggtggcctttgtgcgtctggatgctttcccgctgacaccgaatggtaaactggatcgccgggcattaccggctccggagcagagcgcatttcgcccgtcaggtttacgcagcaccacaaggggaaacagaaactacactggcggccatctggcgtgaattattaggtattgagcagatcagccgatatgacagtttctttgctcttggcggtcattcactgctgggtgtacggatgattgaacgcttgcacagtatgggattaaccctggctgccagtaatctgttccagtgtccggtgctgtcagaattggctcagactttggaaaaacatcagacggtagtgataccaccgaatgcgattactccgacgaccacgatgctgactccggcaatgttgccactgattgatcttagccagtctgagattgacctcattgctgggcaggtgccgggcgggatcgctaatattcaggatatttatgctctgtcaccattacaggacggtatcctgttccatcatttgttggcaaaggaaggtgacccttatttgctggcttatccgatgatttttgctgaccgagcgctgcttgatcgttatctggcggctgtacaaaaggtcgttgatcgccatgatatcctgcgaactgcttttatctggcagggattatctacaccagcacaggtagtctggcgtcatgggtctttatcggtcactgaactgacattatccccggctggcgggccagtcagtgagcaattggctcaccgttttgatccacgtcgatatcgttttgaactgaatcaggctccattgttacgctttgttgtatcacaagagattgatggtcgctggcatgtgttgcaattacagcatcacctgattggcgaccatacgacaatggaagtgatgcaccgcgaagtgcaggtttgtctggccgggcaggatgataatttgccggtaccggtaccattccgcaatctggtggcacaggccagactgaacagcaatcaggcagagcatacccgtttctttaccgacatgctggctgacgtcgatgagccgacgctgccgtttggcttaaccgaaatacatcgtgatggttcacaggtaacacaatcgcaccggatgttagcgccggaattaaataatcgtctccgtcagcaggcgaaacgtctgggtgtgagtgtggcaaccttgtgtcatctggcttgggcacaggtactggcgcgtaccagcgggcagagcaaagtggtgtttggtaccgtactgttcggacgcatggcggcgggggaaggggctgacaatggcatggggctgtttatcaacactttgccgctgcgactggatatcgatgatacttcggtacacaacagtatacggctggcacagtcccggctggctaagttactggattatgaacatgcctcactagcgcacgctcaacgttgtagtggcgttgcaggcggtacgccactatttagtgcgttgttaaactataggcataatgaacaaccgattattccgcatgaggtcttaccggggattgaatttttaggggaacaggagcggactaattatccacttgtactgtcagtggaagatggcggctctactctggggctgactgcgcaggtagtacagccgtttgagccggatcggatatgtggttatatgcaacaggcgctggaaagtctggcagaagcgctggaacgggcaccggaaacatcggtacgggcactgaatattttgcctgaaacggaacgtacgttattgctggaagactggaatgcaactgaaacagcctatcctgagcagttatgtattcatcagttatttgaacagcaggtagaaaaaacaccagatgctacggcgctggtacatgaagggcagacccttagctatgcggaattgaatgctcatgccaatcgattagcgcatcaactgattgcattggggatgacaccggaacaacgggtagcgatctgcatggctagctctctgacgcgagtggtgagcttactggcggtactgaaagcggggggcgcttatgtcccactggatcccgcttatccgggtgaacgtttgacacatatcctgaatgatgtagctccctcaatcgtattagctgatgcaaccggacgcattgcgttaggtgaggaagcacttatcgggctgactttgcttgaaccaaatatcttatccggtgctttacccgctcaaccagacaacaacccgcagaaattggcactaacatcacggcatctggcttatgtgatttacacttccggttcgacgggcatgccgaaaggcgtaatggttgaacatcgaggattcgttaaccttattcaggataaaatcagccagttcggtattcattctcatagccggatgttgcaattcgcttcatttggtttcgatgccagtgtctgggaaattatgatggcgttgtgtggtggcgctactctggatattcctgctgatgcagttcgtcaggatccgcatctcttttggcgttatctggaagaacaatcaataactcacgcctgtctgactccagcgctgttgcaggatggtgctgatttaccggagataaacatcaggccaaccttaatattgggcggtgaagcaccaaaccctgtgctaatccagacattgcgcaaccgggcaactgtattcaatgcctatggcccaacagaaatcacagtatgcgctactgtctggcgttgcccatcagactatcagaatggatttattcctatcgggcgtccgacagctaacactcagatttatctgctggataatgatggacagccagtcccattgggagtagtgggggagatatatatcggtggtgacggtgtaacgcgtggctacctcaatcgccctgatttgactgctgaacgttttctggttgatccgtttaatcaggcaccggatgcacggatgtaccgaaccggcgatttagcccgttatttgccagatggtaatctggtctttgttggccgcaacgatcaacaagttaaaattcgtgggttccggattgaaccgggtgaaatcgaagcccggctgacggaatacccgacagtgcgtgaagctatcgtattagcgctgggtgagggacagaataaacggctggtggcctatgttgtggcaggtaaggatagcgggctggttaattctctacgagaatatttgaatgcttcgctgcctgattatatggtacccgccgcctttgtatgtctggatgctttcccgctgacccctaacggtaagctggatcgccgatccctgccggaacctgatcagaatgcctttgctcaccaaacctatgaagcaccgcaaggagaggtggagataactttggctgctatctggcgtgaattgctgggggttaagaaaataggccggcatgacaatttctttgcgttgggagggcattcgttgctcgctatgcggatgataaaccttgccgcagatcgtggtttgatatgtacattgaataaccttttccaattccctgtgctggctgaacttgtatcaaaaatgacattagatccactgtctcagccgcaaagcagtgcgatacccgtgcgatcatccggaatggaaccaccactattttttgttcccagcggcatgaatgactactcctatgtttttggattatctcaatatattcatcccgactatccggtttatgtattaccctggccttccgtcaatgaagagcaggtatcaactattgaagcgttagccgacaaaatgattaccttcatgaaatcggttcaaccggaaggccgataccgtatctatggctactcttctggtggtgtattagcttatgccattgcacagcaacttttgaatgccggtgagactgtcgattttctggggttgattgatacgcctgctcctcactgctttaagcagcaaattattcagccaaaactccagttccttgctgaactggcaaaacagtcgggtggggagcatgaagagaagattgcgacattacatcaaaaaattgatcaattgggtttagtgcaatttattgccgcagcacagaagttagaactgtatccggcaaacctccgccctgacttgatcgcaaggcgttgggaacagatgggaaattatgtgcaaatgattaaagcatatgaaccagaagtactggagataatgctccaccaattctacgcaacggagccttacccgcaaattcctttcgttacggaaactctattaccttctttaagtatggagccatcgttaggctgggagcaggttgtacctgatactttactccagctgacacctgtaccgggcgaccattttagcctgatggaggacagtacgaataaagttattttggctaaaaccttaagcagggcactggaaatgaattgtgaagcggaggcggtgtaatttcggtatattgcagagagagtaaataattaccaataatatcaaagccacctgaatatcaggtggctgtttacttttaatgatgagaagaatcagaaatgtttgtggtgactagggcgtgttgacgtttgctcgaagggaattgggtggcatgataatttggtctcttattttcgccaaaaaactcgttacccgaactatcatgccacgacctatgttatcagatcctgtgtgggataagctatttgtcttcatgcaacaaaatcggcttacctatcataaaaaaacgcatcgcctcatcatggaaggtattctttttcgaatgagaaccgggataccctggcgggaactacctgctgaatatgggaaatggaatacggtcctttaagagcacat

SEQ ID NO: 324 - DNA, 8918 bp, Xenorhabdus sp.
  CDS (3965)..(5149)
gaaaccccgtgtttaaatccatagggtggcaaggggctggtagccctttactgggctaaaagaaaccgagttccatgggatacaagaatttgaaaataagtacgtccgcccaggtgtggcaattgtggggatggcaaataaactggcgcgaacaatatgggcaatagctgctcatgcccgtaaatacgaaaaaaatcatgtcagtatcaggccatattaatcgcggatacggataaatattaactcgttagaaaagggtgaatgctaaaaagttgctatggcagccagagtgatgacaaagacggtaagaccgtgacctgagaaacctgaataattgccagggcataaagcccgccagaggaataaggatcaggtcagcgaatctcatagtggcccgcagcgctggctgcaataaggccggatacagagctgcaactactcgtcaatgttaaaacaacggaagccttgcaaacggggaggcgttcatacagcaataatgaactatagtcatgtcgtacctcattctcagcaaattttgactacttcaactgaaaactggattgactggcgctggcagcaaaaaaatgccatccgtgatgaagaagctttacgtttagcctgtggcggatggagcgaagaaataacccagcgtattcaacataatctacaggggcaaaagatgcagatcaccccttattatctgcgtcgtattttagccaccagtcaatctgacgatatcaccgcaagcccactctggcggcaagttgttccattctggagtgaagaaaagttgaatggttatgatggggaatcagaaaactgggaactgaatcatgaaatgaaaacccctatttgccagcataaatatgacaatcgagtcattttgcgcatggtgaatgcctgtaattcctactgtcagttctgttttgaagccctgcgaacattgaaagttgattcagaaaaatccaacgcaggtcgtagttccttccagcagtccatagaatacatcaagaatacgccttcaatcgaagaagttatcctgagcggtggtgatccgctgatgctgacggataataaattagctgaatccctcgcggctatcagagaaatcagggatgacctgttgattcgtgttcattcccgtgctctcacttttaatccttaccgtattaccgataatctgttagacgctctggaaaaatatcgtgttaatgcgtttggtgtgcatatttgtcacccattggaaattagtgaggaattccagtctgcggtgcgtcgcatccaacaagttgtgccgattgttttttccaatatgccttttttacgtggaattaatgatagtgaagaaaccctgcataagttatttatagcgctttatcgtattggcgtgaaaccttattatctctatcactttatgcctttctcaccgggttcttcggaatataaagcttcaatcaatgatggcatcgccataatgaaaaggctcaaacgccgggtttctaacattgctttgccggaatatgttttgccacatatgaaggggaaatttactgttccactgttcacggatcctgatgaaatcccttatttcgaaacgcgtggcagtcaacattattatcgttttattaactggaaaaatgaaccatgtgaatggttagataattaatcccatttattgttttatcaacggttaatttaataaataaaaaataaacttatacccgatagatttcagataactgacggctgaaagtcagttgctcgctcagcgatctgaaatactaagggtatatagcccgtgtattacgaggatttcacatgaaaccaactgcaattctatttgttgatattgatgaagcggatgtaacacgttattactaccgagaacctcattttgcagaagcaaaaaagatgggaatctcttgtctgacggtggcgcataaaggccgtcagaatacagaacggctttttgctgacagtgatgaagtttttttcttagcatcgttatcggctgaatccttgcaggcgtttgttattagtttgcaacagacttacaacctgtgcgcaattctctgctatgcggggcaggcttctgcctatgggcagctgggctgtattattgccgaaattgccaaaaaatcgggatacctcactcttcttccgcttctattgctgcctgtaacaacaaatttcttatgcgtcaggcattacaaaagtgcggaattagatcaataaattatgccttgtgtaatagtgaagaggaattatataagcaggcagaaataattggttatccggttatagcaaaaccgccttttggcgcagggtcagtttttattaataaatgcaataactggcctgaattacaatctcattatcaattattcaaaatacaatacatatctaccgattccattcatttgatgggaatgactgagacctattatacctctgaaggtgtatcactccttaatcagcccgggcaaagtatgctgctggaagaatatattgagggtattgaaggtacaattgaatgtgtaatgactcagaatgaaacttatccgattttaataaatgaaaaactgattctgactgaaaaaaacaatacgatattagagaatctacttatttctccacctgtttcatttaccgaagcagaacagcaacaaatcagagattatgccattgcctgtatacatgctgtcgggttgaactatgctattgctcatcttgaattccgaatgacgtcagatggcccgatagttattgaaattaatccgcggcttggtggtttatttgtaagtaccgcatttcgtgatgttgcaggattaaatccttaccagctttatctttctattcttttacatgagcaagatattgatgctcagattaaacaaggccaacaaaaggcgatgacaggcaaacagcattattctatgttagctatttatccggaaaatagcggttattttcatgggatagaaaatattgagtacatcaaaaacaatgcttgtgtcatcgaatgccggactcagccggctggctgttatattgatgcggaaacagaagaacattacctgataaggtgctgggcaaaagttgataatgctttccatgcctatgcattacacgatgaaataatacagcatgtaaaacccattattacaccaattttataagggctgtcactcatgcgaattgcagaaatttcggcacaattaatggatgagcattattgccatattcctcattttgatgaactgatttcatattatgaagaagatgccagaacatttaaaaattattggaataatttagcgttagatcagaatttcaaaagctatacgcatagggaaaggcgaattctgcgctaccattattatcccggcatggaaaatcctttacaacttaaccgagatagtgaatatcgttcatcagtaatctataacgttgaatatacaaaaggagttaaccaacttagctatgcggaagaagggtttattaaccatcctattatgcaacatattctttcaacgaatattgctattttaggcgaacgattagtaaaaggttatcgttattcgattgatatccaccaattccgggtgaaagcttcgtcaggaaaagagagtccgacaacttccggtattcatcaggatgggcaggagtggatctttatgcattttattcagggtaataatattgctcctgtgatttctgaggttcatgtaagtagcgatgaagctccgcctttactgcaaacagcgatgactaactttctggaaacgctcgcaatagatgacaaacaactttatcatcgggcaagcaatgttcggcaaatatctcctacctctgaggcatttcgggatttattgttggtcaccttccggcagtttcctgaataataagagagctaataataatgttaagtcaggaaaatagtttgaatgtgcgttggtctggccgtaatgcgttatttatcgtgagtgcgaggtttatctctgattttggcgcatttctgaatatggtggcgttatccacctacgtttacctgctgagtaacagtgtcatgcacgtcagtatttttctggcttgtcgtgttgctggtggggttattgccagtttaattggaaccccttttttccggcgatatgcaaggcgatggccgctggtttgtttcgatttattgcgggttttattgctgtgtttgttactgataattccggttgcgcagcaattattgatcttaccggcgattgcttttgggattggccttggtaactcaatgtttgccatcgggttaaacagccagcttccgcattgggtaagtgcttcacaacgtatatcaacgaattcctggctgacttccgttgcggccaccggcgcagtgcttggcagcctgatatccggtttactggttgccggcagtggttacgaaatggtgtttattgtcaacatcattacctatctggtggcggcaatattgattatgccattgcgttttctcaccaaacctgagtctcagggaacacgggccttagggaacgaatggcgagaattacgtcttgggttacgcggagcaccgatactggcgggaatgttatttctcagtctggcggatacactgggcagtgctgcccataacgtcggttttcctatcatttccaagctcctgaacccagataatgccagtacggtaatgggcctgttattggcaacatgggcggtgggaaaattcagtggtgcgcgtttagccagttatttactacgcagtcgcaacttattgaaaatggaaaaactgttttttctcggtgttgcattgatgtcaacgggcttcatcctgactttccaacaaactgacccgctttggttgctggtgtttgcagtctgggcagggattggggatggaattgccgaagtgagtttaatttcccgggcacaaagtgaaccggaaagcctgcggttgcccattttcagtctgctgaccctactgcaaatgacaggatttggtgtaggaatgctattggtcgcaccgttctacgtctggctgccaccttccagcgtcattatcatattccacggtttgccactggctgtgttagttatgattttgatatgggcatggcgttttactgtcagtaaggtgtgaatttcatctatctgccactttcgaaattcttaccttattggctgcactgaatacttttaattcatggggcgtataatgccccaaatatccccgcaaattccgcagtgttcccgccattgaatttcgtcgcttttgtcatgcttagcaatattttatttgccctttgctgaagcttgttaaggacaaatttcctgcatgcaataacgaatgctcaccaaggaaagctgtggctgaagatagcgatctcgaaaaaaccgaagaacccacgccccataaacgggaaaaagctcgaaaagaggggcagatagcgcgttcgaaggaactcacttctatcctgatgttagcgggaggtgtcagtttgctctggatgagcggacaatcactcactcacgaactttcattgatggtattcgaaggatttaattttgaccataacatggtcagtaatgataaacagatggtgcaacaggtgggtcgcttgttgaaacaggctgtctgggcagtattacctgtgtttaccggattggttttgattgcccttagcgcaccaacgttaatgggcgggctgatattcagttcgaaatccatcaaatttgatctgactaaactgaacccgattgctggtctgaaaaaaatcttctccatgaatgcgttggcagagttgttcaaggcaattctgaaagcgtcattggtaggaggaggagccgcactatttatctgggcaaactggcctgccatgctgaacctgacaactcaaccaccgctggtggcgttgagtgatgccatgatgatgctgatttttgcaggctacattgtcctgtttatgctgataccaatggtggcgtttgacgtgctttatcagatccgcagccacctgaaaaaactgagaatgacccgtcaggagatcaaggatgaatttaaggagcaggaaggggatccacatgtaaaggcgcggattcgtcaacagcagcgtgcggctgcacgtaagcgcatgatggcggatgtgccgaaagcggatgtcattgtcacaaacccgactcactacgcagtagctttacagtatgacagtaacaaaatgggcgcacctaaagtactggcaaaaggagctgggcttattgctttgcgtatcaaagagattggtgcggaaaatcgaattccgttattggaagcgcctccattagcaagggcgttattccgtcatgctgaagtggggggctttattccggcagcactttatgctgccgttgctgaagtgcttgcctgggtttaccaattgaaacgttggaaacgggaaggtggcctgaaaccaaaaacacctgaaaatctgccagtgccgccagcactggattttgctggagaaaataatcgtcatggctaatctggcctcattattacgtttatcagggaatcgtttaccggggaatatgaaaggttccgagtggcaaatgcttgcggggcctgtcctgatcctcatgatcctgtcgatgatggtactaccgttaccaccattcctgctcgatctcctgttcacattcaacattgctctttccatcatggttttgctggtagcgatgtttacgcgtcggacactggattttgctgcttttccgacgatcctactgttttcgactttattgcgtctgtcactgaacgtagcttctacgcgtatcattctgatggaaggacataccggatcagcggcggcagggcaggtggtagaagccttcggccacttccttgtcggtggtaactttgccattggtattgttgtgttcgtcattttgatcctgattaactttatggtcatcaccaaaggtgcagggcgtatcgccgaagtcggtgcgcgctttgtacttgatggaatgcccggcaaacagatggcgattgatgctgatttgaatgccggattgattggtgaagatgaagcgaaaaaacgtcgtgcagaagtgacacaagaagcggatttctacggttcaatggatggtgcgagtaaattcgtgcgtggagatgccattgccggattaatgattctggtaatcaatatcatcggtggcttaattgttggtgttgcccagcacaatatgagtttgggtgatgctgcggaagcctatacgctgttgaccattggtgacggtctggttgcccagttaccggcgctgatcatctctactgctgcgggtgttatcgttactcgcgtagcgactgacgaagatgttggtcagcagatggtgactcagcttttcaacaaccctaaagttttaatgttgagtgctggtgtattaggtttacttggtttagtgccgggaatgcctaactttgttttcctgttgttcactgctgcattagcgggagtcggttatttcctgttgcgtaaggataaagatccgcttacggcacaacatgcagagatgaaagcggtggaagagcaacagcaaaccgcggaagcttcatggtctgatgtccaactggaagacccactgggaatggaagtcggttatcgtttgatcccgatggttgattttcgtcagaatggcgagttgcttggtcgtatcagtggtatccgtaaaaaattcgcacaggaagtgggttatttaccacctgttgtccatatccgtgacaaccttgaacttgcccctgcaagctatcgcattatgatgaaaggggtagaaattggtcgtggtgaagcccatccgggacgttggctggcaattaatccgggcggagcagtcggtgatttacagggtgacctgacgaaagatcctgctttcggtctgcctgctgtctggattgatgacagtttaagggaacaggctcaggtacagggttataccgtggtagcggcaagtacggttgtggcgacacatcttaaccatctattgtctcagcactccagtgagctgttcggcagacatgaagcacagcaactgttcgaacgagtgagtcaggaaatgccgaaactgacagaaaactttatccctgatgttgtcagcctgacgaccttacataaggttctacaaaatctgttagcggaacaagtgccaatccgtgatatgcgaaccgttattgaaacgctggcggaacatgcaccggtacagactgacccttacgaactgacagctgccatccgaattgcactgggtagagcaatcgctcagcaatggttcccgggtgtggatgaaattaaagtgattggtctggatgcaaaccttgagcgtattctgcttcaggcattacagggtggtggcggactggagccgggattggctgaaagtctggagcgtcaggcggcagaagcactggagcgtcaggaaatgctgggagcaccaccggtactgttggtcaaccatgcgctgcgcccattactgtcacgcttcctgcgccgcatattgcctcggttggttgtactttccaatcttgaaattaccgataatcgccagataagaatgacggcgacaattggtggtgctaggtagtattagttgttggaataataaggtgatcatctcaatgatcaccttactataaagtcattaatcttcaggtcctttccattctaatttatttctcatttcatctggcaccaactcaaataacattttgattctctttttatgatagttatagttagaacacattctgtcatttgcattttctagataatatctggcttgactatttaaaaaataaatatcgtgctcacaaatttctgtctcttttagataagaaacaatattatgtaataattccgcctcttgatactttagagcac

SEQ ID NO: 325 - DNA, 6350 bp, Xenorhabdus sp.; identical to SEQ ID NO: 130
  CDS (4925)..(6349)

SEQ ID NO: 326 - DNA, 8311 bp, Xenorhabdus sp.
  CDS (3)..(7853)
ttaagacccctaataacccatcaacgggtcagccgaaaggcgtgatggttgagcatcatagcctgtgtaatctggtaaccacccaacaaaatgtccttgccctcacgcctgtgagtcgggttctgcaatttgcttccggcagttttgatgcctctgtctgggaatgcgctatggcgctactgacgggagccagcctctatctggcaaaacgtgccgatcttctacccggtgcgatcctgtcagattatctggaaacccatgctatcagccatgtactcctgtcacctactgcgctgacggcaatggattctctgcccgatacccttcagacattactggtcggcggggaagcctgtccagcgggtttagtcaaacgctggtcagcgggacggcagatgctcaatgcctacgggccaacggaaattaccgtttgtgcaacgctttatccgtgtgatagtcaggaaaacacaccaccaccgattggtcgtcccattaccaatacacaggtttatattcttgacgccaatgctcagcctgttcctgtgggtgtcaccggagagatttatatcgctggtgccggcgttgcccgtggttatctgaaccgacctgaactaacagccgaacgtttcctgctcgatctattttcttctgagccaaatgcgcgtatgtacaaaacgggggatctgggtcgctggcgttctgacggcaatatcgaatatctcggtcgcaatgattctcaggtcaaattacgcggttttcgtatcgaactgggggaaattgaagccagactggtacagtgtcatggtgtacgcgaagctgtggtgctgatccgggaagacgaacacaatcagaaacggctggttgcctacctgaaaccagaagaaggcactgaactggttccgactgaactacgtcagcaactggctcagcacctcgctgactatatgctgcccagcgcttttattatccttgatacattcccgctgacgcccaatggcaaactggatcgccaggcactgcctgcgcctgatctgtccgctctggcaatacagggctataaagcccccgttggcgaaatagaaataacgctggctcaaatctggcaacaactactaggtctggaacaggtcagccgttatgacaacttctttgcgctgggcgggcattcactgctgattgtcagtctgattgcagaactgcataaccacggctggcggcttgatgtccgcaatgtgttcgctacgcctatgcttaccgatatggcacaagccgctcagcgtgatgcagagttttttgtcgtcccacctaaccttattccaaatggctgtcaggctattacaccggatatgttgccgctggtttcactgtcccagtcagagattgacgctatcactgccagtgtttctgacagagcgggtaatgtgcaagatatctatgcgctggcaccgttacaggaaggcattctgttccatcatctgttacagacacagggtgacgactatttattacatacccttattgcctttgatacccgaactcaccttgataatttcctgagcgttatgcagcaggtaatcgaccgtcacgatattctgcgcacctcggtttactggcaggatctggcacagcccgttcaggtggtatggcgtcaggcaccgttatgtatcaaagaatttacgccagaaacagaagacgatatatcggcccaattacgcactcacaccgatccgcgctggcaccgcattgacctgactcgtgcgcccctgttcacggctgatattgcacacgatacggcacaaaatgagtggttactggcactgcgtttccatcatctggtcagtgaccatatgacactcgatctgatcttcgccgaaattgtccggatacggcagggaaatgcagatgcactgcctgtttcagtgccctatcgcaattttatcgcccaaacgttgaatgtaccggtttcagtacacgaagattatttccgcgagcaactggcagatatcgacgaacctacggcaccctttaatgtgcttaaaatgccgaagatcagcgccttacctgatcatcgtcaattgcgggatagcagcaatcccgtcgccaaagcccgtattttactggataacgatctggcaaacactatccgttctcaggcacgtcgtctgggcgtcactcccggcgtcctgttccatgttgcctgggcacaagtactggcacacaccagcggtcgtgatgatgtggtttttggctccgtgctgctgggtcgtttgcagggtatcaccggggcagagcaaatgctgggaatgtttgttaatactctgccaatccgcatttctctggccggtcgtcgtgtgcaggaaaccgtgctggacacctatcaccgcctgaccgcgctattagaacacgagcaggctccgctggcactggcacaacagtgcagtggtgtggcacagccgatgccgttgttcggtgccttactgaattatcgccatagtcagatgactcaggctgaaatggataccatctgggcgggtatgcgtgtggtcgcagccgaagagcgaactaactaccctattaccctgtccgtggatgacttaggtgacggttttcagctcacagcgctgactgttactgaaatttcacctgatcaggtcacaagctatctgataactgcgattcaagggctggttgaagctttaattgatcatcctcagcaaccgattctgaatattccgattttatcgggatcagagcggcaacggctgttggtggagtttaatgctcctgaaacgcaaagcgcattcccggaaaatgcgctaattcaccagctagtcgaaattcaggcattacaacgccctgatgctattgccgtcacctatgaaaatcagacgctgagctatcgtgaactgaatcagcgagccaatcgtctggcacatcacctgctgacactcggcatacgcccggatgatcgggtcgctatttgtattgaacgctgtccggaaatggttattgggttgctggccattctcaaagccggtggcgcttatctgccacttgatcctaactatccggctgagcggcttaactttatgcttgaggatgcttccccggttgccttactgacacaggctcagtggcatgaaaaactgaacagcgccttacctgttatcttgctggacgataagtcagacagtttcgcatcgttcccaacgcgtaaccctgacattcagacttcagggctgacatcacatcatctggcctatgttatttatacctccggttcaaccggtcagccgaaaggtgtcatggttgaacactggaatgtcatttccctgcttatcaataacggctttgctgatatcgggccggatgactgcattgcccattgttccaacgtctcatttgatgcggcgacatgggaagtttgggctgcgctgacacatggcgcacgacttctgctaattccagaaaaagtgctgttacaacctgaccaattcgcgcaatctctgtcagcagagaaagtcagtgcactgttcctgactacggcactgtttaatcagtatgtcagcctgatcgcctctacgttatcgggtctgcgttacctcctgttcggcggtgagcaagccaacgcccataccgccattcgtttccgggcggaatatcctgtgcagcatttgctgcatgcctatgggccaacagaagccacaacgattgccactgtttatgaaataccgctcatgccagaaaaaaccggtgaaggtgaaatcaaaattccgattggtcgccctatcggtaaccggagaatctatattctggacaaacaggctcaacctgttcctgtcggagtttccggtgagatctatatcgccggtgcaggtattgcccgtggttatctgaatcgcccggaactgaacgcagagcgttttctgcccgatccgttctcttcagaacctgatgcacgtatgtacaagtccggggatttggggcgctggttgccggacggcaatatcgaatacctcggtcgcaatgactttcaggtcaaactgcggggctttcgtatcgaactgggggaaatcgaggccagactgatacagtgcgatggggtacgtgaagcggtagttctgatacgggaggacgaacccaatcagaaacggatggttgcctatctgcgaccagaggaagacgctgaactcgagccagcagaactccggcgccagcttgcccaacatcttgctgattatatgctgcccggtgcgtttattatgctggaaactttcccgctgacacctaatggcaaattagatcgtcaggcacttcctgcaccggattcatcggcagtagcaacccgtgactatgcagcgcctgtcggtgaaacggaaatcacattagcccggatctggcaggatctgctgggactggagcaagtcgggcgctatgaccacttctttgaactgggcgggcattcgctgctggctattcagcttacagcccgtgtccgtcaggtactgaagcgggaattaccgctgcaacaactatttgatcagccacgtctgatggatttagctcaggttctgactgatgttgcagcaacctctcaaatgacaataccggttactgaccgcagccagccgctgccgctttcctttgctcaacagagactgtggtttttagaccgactcgatccggctgccagtctggcttaccatattccactggtattgcgtctgagcggagaactcagtcaccaagccctgcgccaaacattcgacaatctggtcgcccgacatgagatcctgcgtacccgttttgtactggtggcaggccagccccgccagcaaattgcaacggctgacagcagatttgcgctgtcttatcaggatctgcgcacattaactgccgatgaacaaacccagcgaatgacagaaattgctaccaccgaaaccggaataccgtttgattttactcagggttcactgatccgtggtcaattactgcaactggctgatgatgaacatgtattactgatcacccagcaccatattatttccgatggctggtctgtcggtgtgctaatacgtgagctgagcattctctatcgggctgctcttgaaaatcaggaaaacccgttactacccctgcccattcagtatgccgattatgctgtctggcagcgtgacaatctgcatgaagccgcgcttaacagacaacgggagttctggtgtcaccagctccgcgatgcgcctgctttgctgacacttccgacagaccggcctcgtcccgcatcacaaacttttaccggaggaagagttcccgttcattttaatgcggaattactggcttcgctgaaaacactcggacaacgccataacaacaccctgtttatgaccctgctgacagcatggagtatcgtgctggcgcggctgagcgggcaggatgatattgtcatcggtacaccggttgccaaccgtcagcatcgcgaactggaagagctgatcggcttctttgtgaatacgctggccctgcgtgtcaggctgaatggttctgcccgtgttgccgatttgttcagacagattcgggaacagacactggcggcctatgccaatcaggatctacccttcgagcaggtagtggaagcgttacaacctgagcgcagcctgagttacagcccgatatttcaggttatgctggcgttaaataacacaccagcacagacactgacattaccggatttacaattaacggtgatggaaccgatacaccacagtgcccacttcgatttaaccctgtcattaaccgaaaccgatgccggtctgacaggcgagctgacctatgccagtgcgttatttgatgcagcaaccattgaacgaatggtgggttatctcaccaatgtactgaacgcaatggtggcagatgaatcacaactggttgccactgtgcctatgttgtcgcaatcagagcagcaacaattgctgatggacttcaatgcgcatcaggctgatttccccgataatgcgttgctccaccagctgtttgaggctcaggcagagcaatctcctgatacagttgccgtggtatttgaagggcagacactcagctatggtgaactcaaccaacgtgccaattatctggctcatcagctgattacgcagggtgtatgtcaggatgatcgggtagcaatttgtgtcgagcggagtctggaaatggtggtcggtctgctggctatcctcaaggccggaggagcctatatcccgcttgacccggcgtatcctgccgaacgactggcctatatgctggaggattcaaatccggtggtcatagtgactcaggcaacactggccgaaaaactcaccagtcccctgccagtagttatattggataatgttatgttggataatttattatccggcgacttattacccgatcatgcacagttcgaaaatcccgatgtgcaaaagtcagcgctgaacccccatcatctggcgtatgtgatttatacttccggctctaccggtaaacccaaaggtgtgatggttgaacatgccaatgtcacccgcctgctggcggcgacacaggcgcggttccagtttgataacaacgatgtctggacactgttccactcttttgctttcgacttctcggtatgggaattgtggggagcgctggcttacgggggcaagctggtggtgatcccgactgaatgtgcccgctcacctcagatgttctatgagctgctttgccggaagcaagtcactattctgaaccagacccccagcgccttccgacagctcatagccgctcaggagatgatgccacatgagcagcacacactgcgctgcattatattcggcggtgaagcattagaactgcatacccttgccccgtgggttgaacgcaatcctactaaacagacccgtctggtgaatatgtatggcatcacggaaattaccgtacatgcgacttatcgtgaactgacggaagcggatatccacgcaaggcgtggcagcctgattgggcagcctctggatgatttacgcatctatattcttgatgcttatggtcagcctgtgccactgggcgttgcaggcgaactctatattgcaggagcaggtattgcccgtggctatctgaaccgccctgagctgaccgcagagcgtttcctgtctgatcccttctccgataaacccgatacacgcatgtataaaaccggtgatttagggcgctggctacctgatggcaatatcgaatatctcggccgtaatgattttcaggtcaaaatacgcggtttccgcattgaactgggggaaattgaagccagacttgaacagtgcgccggagtccgtgaagctgttgtgatcgcccgtgaagatggaacacatcaaaaacaactcgtggcctatctgctgccacagcctgatgccaggctgaatccgacagaattgcgtcagcaactggcacaacaccttgccgactatatgctgcccagtgcgtttgtcacactggatgctttcccgttgacagcaaatgggaaactcgaccagcgggcattgcctgcccctgattcatcagccgtggtatcacatcgctatgtgtcgccaatgggtgaaacagaaatcgcactggcacaaatctggcaacgcctgttaaagctggagcgtgtgggtcgtcacgaccatttctttgaattaggcgggcattccctgatgattgtcagcctgatcgaggagttacgtctcatcggctggcaactagatgtgcgcagcgtatttatttctcctgtccttgccgatatggcacagactattcagcgtgatactgacgatacatttatcgtgccgcctaacgggcattcctgaaaattgtcggctgatcacaccagacatgctgcctttggttgcgctgtcccagacagaaatagatgccattgtcgctaccgtgcccggcggcgctgccaatgtacaggatatctatccgttgtcaccgttgcaggaagggatcctgttccaccatctgttacagatacagggtgacaattatctgctgcaaagcctgctcgcttttgactcccgcgaacgtcttgatgcgtttctgtccgcactgcaacaggttatcgatcgccatgatattctgcgaacagcggcatactggcaggatttagttcagccggttcaggttgtctggcgtcaggcgtctctgaatatcaatattttcacgccagccactgaaatcgatattgttacccaactcagagcgcataccgatccacgccgataccgtatcaatctggatcgtgcaccgctgtttaccgcagata

SEQ ID NO: 327 - DNA, 7711 bp, Xenorhabdus sp.
  CDS (289)..(7707)
gtgctctaaaggatagcttttgcggggaaaatcagtgcgcagcgtaatgaggtaagggataacttatccgacataattccggtatcccgtgaccgtaataataatagccctttaccgctgtcatttgctcagcagcgtttatggtttttggcgcagtttgatggtgtcagtgatacctatcatattccgctggcactgtacttgcgggggcagcttaatataaccgcctggcaacaggctctgaatcatctgtttgcccgccatgaagcactgcgttctgttttcatcatggttaacggtcagcctcaggttgagctgttgccagcggagttgactctgccggtgaaacaatacgacctgcgtaatctgcctgatgtcgataagcaacttaatattttgtgtgcacaggaagcagaaacaccgtttgatcttgcccgtggccctttaatccgttgtgcactaatacagcgggccgatgaggattatgtcttcttactgactcagcatcacattgtgtctgatggctggtcgttagagatactgaaatcagaactgagtgccctttattcggcttgcctgaataaacagcctgatccattacctcctttagtaattcaatatcctgattatgccgcttggcagcgtaaggtattctccgatgaaaaaatgcggacgcacagtgattattggcgccgtacgctggctgatgcgccagtattactggaattaccaacagatcgcccccgtccttcccggcagtcatttagtggtggccggataccggtacagattgatgctacgttggttcaggaactgaaacaactgggacagcatcatgacagcactctattcatggtattgctgactgcctgggcggcattattgtcgcgtctatccggacaggatgatctggtgattggtataccgagtgccaaccgcaatcggcgggatatcgaaccactgatcggtttttttgttaatacgctggcattgcgtattgatttatccggtacggattcattcggcacattggacatggagacgctgcttcgacgtgtacggcagacgacactgagtgcacaggagcatcaggatctgccttttgagcaagtggttgagatcgtacaaccgccacgcagaccagaacatactccgttatttcaggtcatgtttgcctggcaggagaatgacacgcaggagtggcaactgccgggcttagcggtgactcccgtagtgcagggatacgatatcgctaaatttgatctacagctggaactgacggaaaaggcgggagaggttgttggggaactgaattattcttctgctttgtttgaccctgaaacaattgaaaggcaggtcggctatttacagaccttattacgggcgatggtaagccatcctcaacaatccatcactaccgtagatattttatcacctgctgagcgcactctattgctggaaacctggaatgcgcctgtagcgccatatcctgaacagttgtgcatccatcaactggttgaacagcaggtcgaacaaactccggatgccatcgcggtaaggtatgaaaaccagacagtgagttatgctgaattaaatgcccgatctaatcgattagcgcatcaattaattgcattaggtgtaattccagatcagcctgttgcgatttgtgtgacacgttcaccagagagaatagtgagtttgttggcggtgttgaaagcgggtggggcttatgtgccactcgatcccgcttatccgggtgagcgtttggcttatctgctcactgatgctgcacccactattttactggcggatgatatcggtcggtcggctttgggtgaagaaaccctgaaaacactgactgtactcgatccaaatattcagccaaatcagcctgacagtaatccgagtgtccctgaactgacctctaagcatctggcgtatgtgatctatacctctggctctacgggtaagccgaaaggagtaatgattgagcatcagggggtggttaacctgacgctggagcaaagtgcccggcttaatattagtgaaaccagtcgggtattacagtttgcttcatttggttttgatgccagtgtctgggaaatcatgatggcgctgagtagtggggctatgctggttattccgacagaaactatccggcaggatgcacatcgtctctggcattatctggaagagcaatcggtaacgcacgcgtgtctgactccggctatgttccatgatggtgctggtttgccggaaatagccataaaacccacattaatcttcgcaggagaaacaccggcttctgccttatttaaggcattatacggtcgggctaatttgttcaatgcgtatggcccgacagaaatcaccgtcggtgccaccatctggaactgcccgtcagattatgcgggaagattaattcctatcggcaaaccaaccgttaacaaacgcatttatttgttggacaaatatggccagccagtaccgcagggtgcggtaggtgagttatatatcagcggcgtaggtgtggcccgtggttatctcaatcgccctgatttgaccgccgaacgtttcttaccggatccgtttagcgatgatgctaatgctcgtatgtatcgctcaggggatttagtccgttatctaccggatggcaatctggtctttgttggccgcaatgaccaacaggtgaaaattcgcggattccggattgagccgggagaaatcgaggcgcatttaaccgaacatccggcagtcagtgaagcgctggtattggcactgggggatggtcaggataagcgtctggttgcctatatagtggcaaacagaacggataacgaactggccaccagcttacgtaaatatctgagtgctatttcacctgattatatggtgccagcagcttttgtgcgtctggatgccttcccgttgactcctaacggtaaactggatcgacaggcgttaccagcccctgatcaacatgcttttgcccgtcaggtttatgaagccccgcaaggtgaagctgaatgtgcacttgccactatctggagtgaattgctggaggttgaacagataagccggcatgacagtttctttgcattgggcggtcactctttgctcgctgtacggatgattgaacgcttgcgaaatagggggctgggcttatcgattcaaacactattcgaatccccgacactctgcattctggctcagtctctggcgcaacatagtgaaatcacaatacctgaaaatagtattacaccggatactatgacgctgacgccggaaatgttgccgctgattgatctgactcaatctgaaattgactgtatagctgaacaagttccgggcggagttgccaatattcaggatatctatgctttgtcaccgttacaggatggcattttattccaccatttgttggcaaaagaaggcgatccctacctcctgataacccaacaggcttttgcggatcggtctttgctgaaccgttatctgagtgccgtgcaacaagtcgttgaccgccatgatattctgcgtaccgctttcatttgggaaggattatccgttccggctcaggtcgtttgtcgtcaggctcctttattcatcacagagctgacactcgatccggctgacgggccaatcagtaaccaattggctcaacgctttgatccgcgccagcaccgtattgaactgaataaagcgccgttgttgcgctttgttattgctcagaataccgatggtcgctggatactgctacagttgctgcatcacctgattggcgaccataccacgctggaggtgatgaacagtgaagtacaggcgtatctggccggtcggggagacagtctgccggcttcgacaccattccgacatttagtggcacaagcccggttaggaaccagccagcaggaacatacccgtttctttaccgatatgctgaaggcagtggatgagccaacgttgccgttcggatgggcggaagtacatcatgacggctcgaaagtggccgaatcacatagaacactaacgtctgcactgaatcgtcgtttgcgtcatcaggcccggcgtttgggcgtcagtgtggcggcattatgccatctggcctgggcgcaggtgttgtcgcgcaccagcggtcagaagcaagtggtgtttggcacggtattattcgggcgcatggctgccggtgaaggtgccgacaatggcatggggctgtttatcaataccttaccattacgtttggatatggatgaaactcctgtgctggagagtgtacaagtcgcccatacccgattagcgggattattagcgcatgaacatgcttcactagctttggcccagcgttgtagtggagtcgccagtggcacaccgttgtttaatgcgctgctgaattatcggcataatacacaaccggttatgctggatgaaaccaccagcggaattgagtttcttgatgctcaggaacggacgaactacccgtttgtgttgtcagtagaggatggtagctctgatttggggctgacagcgcaggtagtacagccatttgatccggaaaggttgtgtgattatatgcaacaggcgttggagagcctgactgaagctcttgagcaaacaccggaaatgccagtacagatgttggaaatcctgcctgagtcagaacggactttattgctgcaaacatggaacgcgacggaagccgcataccctgaccagttgtgtgtccatcaactgtttgagcaacaagttgaaagtgctccagaagctatagccttggtttatgaagatcaatctgttagctatgcggaattgaatgttcgggctaaccggctggcccaccagcttatcgagctgggtgttgtaccggatcagcgggtggctatttgcatggcaagttcaccggcgcggatagtcgggttactggcagtattaaaagcgggtggagcctacgtacctctggatccggcttatccgggcgaacgcctgaaccatattttatgcgatgctgaaccggctattttattggccgataataccggacgttcagcgttatcaggccaggcacaagatgagcaatcagcacaaatgattgcgcagttaattgtactcgacccgaattcattacccgaacaaccggataataatccgcaaatcgctggattaagctccaatcatctggcgtatgtgatctatacctctggctctacgggtaagccgaaaggcgtaatggtcgaacatcgaggattcgtcaaccttatccgcgataaaatcagccagttcggtattcactcccatagccggatgttgcaattcgcttcatttggtttcgatgccagtacctgggaaattatgatggcactgggaagcggcgcaagtctggttattccggataatactgttcgtcaggacccgcgtcgtctctggtattatctggaagaacaggcagtcactcacgcttgcctgacaccggctctattgcaggacggtgttgatttaccggcactgaagataaaaccgactattattttaggcggtgaagcacccaacccgttacttatccggacactgagccgtcaggcagccgtatttaatgcttatggcccgacagaaattaccatttgcgctactgcctggcactgtccgccagactatcagggggagctgacgcctattggacgcccaaccgctaacacccggctctatctgttggatacctgccaccagccagttcctttaggcgcggtgggtgagttgtatattggtggtgacggtgtaacgcgcggctacctcaatcgtcctgaattgacggctgaatacttcattacagatccatttagcaataaaccgaatgcacgtatgtaccgaaccggggatttggttcgttacctgccggacggtaatctggtctttgttggtcgcaacgatcaacagattaaaatccgtggattccggattgaaccgggggaaattgaagcccggttgaccgaacactccgcagtacgggaagcattagttttggcattaggccatgaacaggataaacgactggtggcttatgtcgtggcagaagcgaatgatggactggtgagcctgctgcgtgaacatttgagcacgttattgcctgattatatggtgccatcggcctttgtacgtctggatgccttcccgttgacccctaacggtaaactggatcgccgggcgttaccgatgccaggagaggacgcatttgcgcgtcaggtttacgcggagccacagggggaaacagaaatcgcacttgccgctatctggcatgacttactgggcgttgagcaaatcagccgatatgacagtttcttcgcattgggtggtcattcattgctcgcggtgcgcatggtcgaacggttgcggagtctgggattaacgctggcggtgcgtgatttgtttcagtctcctgtgctgtctgaacttgcacaaaccctgacacaaaatcagggtgaaggtgtaccggctaatgttattacaccggaaacgacaaaattaactcccgaaatgttaccgttaattgatctcactcagcctgagattgatcacatcatcgaacagataccgggcgggattgccaatattcaggatatctatgcgttgtcgccattacaggatggcattttgttccaccatttattggcaaacgaaggtgacccgtatttactggctggccagatggcttttgcgaaccggactttgctggatcgttatctgagtgcggtgcaacaagttattaatcggcatgatatcttacgtaccgcttttatctgggaaggactatccgttcctgctcaggtggtttgtcgtcatgcacgattatcagtgactgaactgacactcgattccgtgaatgggccagtgagtaaacagttagctcaacgttttgatcctcgtcactatcgtcttgatttggggcaagcgccattgctacgttttgttgtggcacaagaaacggatggtcgctggattgcactgcaactgatgcatcatctgattggtgaccataccgcattggatgtgatgagtcatgaagtgcaggcctatattgacggacaagaaaacaatttgcccgtaccgccacctttccgcaatctggttgctcaggctcgattgggagtcagtcaggagcagcatgttcgtttctttaccgatatgctggctgaggtgaatgagccaacgttgccattcggactggcagaagttcaccatgatggttcgcaaatcacagaatttcaccggatgttgaccgctgaattgaataaccgtttgcgcaatcaggcccggcaacggggtgtcagtctggctgccttgtgtcatttagcctgggcgcaggtgctggcgcgtaccagtgggcaggaaaaagtcgtattcggtacggtgttattcgggcgcatggccgccggcgaaggtgccgacaatggcatggggctgtttatcaatactctgccgctgcgactggatatggatgaaactccggtacaggatagcgtacagatggcacatcgctggctggcagggttattgacgcatgaacatgcgtcactggcactggctcagcgttgcagtggagtgcagggcggaaccccattattcagtaccttgctgaactaccgccataacgcattgccggtgacttcgaatgaaattcatggagcggtgttgaattccttggagcacaggatttagagca

SEQ ID NO: 328 - DNA, 11295 bp, Xenorhabdus sp.
  CDS (9069)..(10199)
gactaatcaacatcaataacttcattccttaccaatataatttttcactataaaaaaacaatgtcttttataaattcaattatgtgtattagttcagatgagatctgacacttcgatttgaaaagaagagagttacccgctttgattaaaggtgctgaatcttaaatcaaagaaactaagaggtcactctcatgctacatactagcaatcccatcattaaacacaaagcaggtcttctcaatcttgctagggagctgggcaatgtttcccaagcctgcaaagtcatgggcgtatcacgagacacgttttaccgttatcaagaattggttgaagccggtggtattgatgcacttattaaccagagtagaagaacacccaacctcaaaaacagggtcgatccaaaaacagagcaagcggtggtcaaatatgcgattgattacccagcatacggacaagtgagaaccagtaacgaactgcgtaaagtcgggatatttgtttcacccagcggggtgcgttctatttggctcaggcacgatcttgaaaactttaaaaagcgcttacgggcgctcgaaaagcacgtggctgagaccgggtttatcctgacagaagcccaagtggtggctctggagagaaagaaactggatgatgaagtctgcggtgaaatcgatactgtccatcctggctatctggggtctcaagatacgttctatgtggggacgttgaaaggcgtaggtcggatttaccagcagacgtttgtcgatacctacagtaaggtggcgtttgccaaactctatacgaccaagacaccaattacggcggcagatatagctgaatcaaaataattagacatatttcacatgcgtcataaacagttcatcaattgaacacctttctcgtcttcttatcgctttgacttcagcccatttcggttcgatggggttcaaatccgggctgtaaggaggtaaccattccaacaggcaaccgtggtctgctatcgcttttattgtgtcatgccgtttatggaatggggcattatccatcacaatcacggctccgctggggagcttgggcagcaaatcttgtgtcatccaggcatgaaagacatccgcattaatgtttcccgaaaataaacttaaggtcacgaaggtctttttgaggatcgcgccaatgacattaatgcggcctttggcctgccaatcgtgtgtgccgaagccagcgtaaccctttcgccgaataaccctgtgtgcggggcatagactgcgaaaaaccgctttcatccagataaacaatcggtttcatcgcctgttcgtagtggctgatgcgttcgacaaacgcctgacgagcctgagcgtcagcgttggggtgtcttagcgttttttttgacggttattttcagccgtttcaaggcgtaatggatagcagattgcgcgacacccaagcgttttgccctttcccattgatagtcatcggggtaatttttgacatcagtgagaagcgcttcatcactgattttcgtgggcggcttattccgtgtcacacagggttctattttgtgacgccaccgaaataaggtccgcatagaaatctcaaaatgggtacacgtttgttcgaaggtcaacgaatgcttgtctttatatgccagtactcgctttcgaaaatccagactatagcccatctcactttatcctttgtcatatgaatccagctattatgtcatattaatatgattctgctatatatgcgcaattaggtgaggagcaatccaaagggaaaacgattgtcgcggataaaaatggttatccgatagcggttgaacagcccccaacgccagcgcatcaatggaatggagacgagtgggtcgccgatgaagcagaggcgaagcagtggtatatccgacaggccacagaatataaacagacgctgatgaatgaatcccgagacaggattgcgcccttacaggacgccgttgacctcgacatggcgacgaaggaagagaaagccgcactccttgtctggaaaaaataccgtgtcctgctcaaccgggtggattgttccactgcccccgatatcgtctggcctgaacagccggagtgaggtaaagcaatagaaaaattaaactgatgaccattcatcgcaattgtaaagcacaaaagttagggaatagataggtggggaaatttgagtgaggagataatcaaaatatgattgccttcatttcaaaaaagaggctttttttattaagggttattccctagtttttcccccattattcccctcgaaattctacccataaaaaaaccaaccctaacaggttggtttttctagggaaatttggtcggcatgataggatttgaacctacgacccccgacaccccatgacggtgcgctaccaggctgcgctacatgccgatgactttgcttatagtacctttttttattcgcaaagcaagtcccttctttagtgagtgattgatttttcggcaattagtttgctaaaaatcgtttgatttcagtcagtatttgtaatagttgggtaaggttcggttttgcgttctggatttcattgtcatctgagtcgtacagatggtaatccccatctttggaaagataaattgtgttttcagtcgttgtcacgatcagtgaaccgttctcaccggtaatgagccacggaatatttctttgacctctgaacaggtcttctccctgagagtaatcatcaggtgagttgcttacgtgcaataaacgttgcatcaatgtagtcataacatcctgatgaccggtcagtttgttgataacttgtgcaggtgttcccggccagtgaatgatcaatggaacgtgcatttgcttacgattaaatttatcaccgataaaccaccttggatcgctgtttgtgatggtgctgccatgcttagcagtaataacaacaatagtgttgtccagaatatctttatttttcagcgtatctaaaacgtgattgatttcagtatccagtgttttcttatcaacctgaattgacgaaggagaaataccattaaggtttaaaaatgagaaccacggagtagtattattacgcgaatttagccattgctgccattgctctacagtcaggttgtcatttgggttagcttcgtagggaagcgagtaatcggttaaaatagcctgcctataaagaggtgtctggaatccatctgatgaatacagaccaaactgatacttttggtgagttaaggcatcaataagtgctgagggttttcggctattaagaatactatccagatagcttgatgatataccgtagaataaaccgaacagtgcagtgtcgtttttcataccggtactaaaatgctgagtaaactgaatgttactctttgtgaagcgctcaagaaatggcattttatttgctgtaatgtcaccattatccagactatccacaaccagcaataataaattataaccgcggccgctatcgcggtaagacagattattcaatggatactcaatggtcagtgcagcagggtttccctgttgacttatacggcgttgatattcgttcttatccagcaaaccatgtttttcaagaaatttacgcgctgtcatcgggtatgaaagcggtaggtttgagcgttgcatggtgatagggcgatagaaattagcatctgcccatatatacatcatatgggaggccacaaaagccgtgataaaaatagccgccacaggtttaccgagtttttgccgattcaggctgcgtaatttttgccagctccaggttccgtatagcatctgcaccagaaaaataagcggaatgcagatgaacatcaattgccattctcttgcccgttcaccctgctcgggattagtaaccaaatcccataccaatggtgtcaggtgcaggtgaaaacgcacataaatggaagagtcaaatatcagtaatgttaaccctgctgttgccagagctgcggaaagaaatcgcagtaaacgctgtgacatcacaataaatgtcagcggaaataacaccagtaaataagcggcaaaaacaataaagctaaaatgaccgagccaactgaccagcgcataaatgcgaccaaacagtgaacccggccagtcagatgcgaataaatagcgactgcccagcacaagactgaacacgatattgaacagagcgaaccagtgcccccaactgatcatttgagaaactttttcgcgatagtgctggcggttagtcaccatattttcttacgttaatttttaaatggaaaaattaatgcgctttatcttcgttaattgaagattgtaacgcgtgtgcaaacgagtttgcgatatgtttgcgttgggctggtgcaatactcgtgttgatcaaattcgtgaccatgttgcctaaaaccatcaatgaaagatcggttggcacgtggtttttttcgaaaacacttactagttcagctaataaatgttcaactttttcatcgctgtagcgagatgactgtggcatgactcaaatatcctgaatgtacaaagcccaatatattaccgtatagaggggttattttctgcttttttatgacaatttaatttccttattgtacaaattgttgccattcttgtgtctgctgcctcattttagcctgtgatatggggaacgcgaataattaaattgtgaacacttttccatcattgggttttttggttgcagcagagaaggaacagtgtttgaatacgccgctaactgcaatacccagaaggtcaatgctgtaaaaggagtagaaataatgagtctggaaattacccagatcgcgttacatcagttgattaaacgtgacgaacaaacactggaagtgattttgcgggattctctgctggataccaatcaggtagtcgaagagatgatggctgaattacatcgcgtgtatagcgctaaaagcaaggcttatggtgtgttcagtgataaaagtgagctggctgaatcacttcgccatcagcgcaagggaaatgaagattttttaggtttcagccgggcggcgaccgttcgtctgaaagatgaactgataaaatacccgtttgcagaaggtggcacggtattattttgccaatatcgatatttggctgtggagtatttgttaatcgcagtgctgaatagctgtagtagtacttcagtcgatgaggctctggatgtcaatacgacacaatatcttgatatcccacatgccgatatcgttgccagaattgatttgacggaatgggaaactaatcctgaatcctgccgctatctgactttcctgaaaggtcgggtagggcgcaaggtatctgactttttcatggattttctggccgccagtgaagggatgaatgctaaggtgcagaataaaggattattgcaggcagtggatgattattgcgaatctgctcagcttgataaaaatgagcgacaggcttatcgccaacaagtttacagttactgcaatgagcagttacaggcgggcgaagagattaaactgcaagaattatcgcaggaattaccaccattaggtgaacagagctttcagcagttttcccaagatcaaaactacgacttggaagagagcttcccggcagatcgcagtacattgcgccaattgactaaatttgccggtagtggtggcgggttaacgattaactttgatgccatgttgcttggagaaagaattttctgggatccggcgacggatacattgacgattaagggaacgccaccaaatctgcgggatcagttgcaacgccgtggcagtaataatcactaatgttgtcggttttaaggttaaagttttcgtaaaagacagaaataaataacgccgcaaatgcggcgttatttactcggcgtcccgataaaagctcgattctggctaattaagcacgcaggaaatcaatgtgcgtcagtttaggtttaaacggatgacgctgtactgcctgcactttaactttagtttctttaccatcaacgaccagagtcagaatttcgtagaattctggcttgctttcgtggttgataactgcatcgtgatccagttcgatagaaactggctcttggttaccaccataaatgattgctggaaacttgttagctctgcgcaggcggcggctcgcacccttaccctgctctttacgtacttctgcattaatagttaacatcattttttctctataaaagaagaaaataaatcctgctacaggcgacccagcagcaggttcgatatttggcttaacattatgtattacgctaagcgggcggcattttaacgaaaaacaggtatgacagcaaatataaagtactctgctgtcagtaattgtgtcatttaatacagatcatctgcccggcggaagcggccctgataatcaaatattttttccctaatctgccagaattgtccttttttccgggctacaacaaagtcaggatgtcgcagtaaaggaagctgttgtgcgatatcgcccgcagttttccagacgaaaggaatacccggagcacgctgatggtggcgtataaattgaagctcaaacacttttttctgggctggagtggttaaacgaaatagctcagagacatttgcgccgtcttcatcataataagtaatcttgagccattcgcctttgttgtcattaccgggcgtcagctgcatacccccgcaacgcagtaccagagcatctttgagtttaagtgccgcttttagcatatcatcaggatccaccagtacttcctgacagtgatgacaacgtcgggctgctatgtcattttctgtgccgcaatgcggacacgatttaaaacgaaagcgaaaatcacattgatgccgttttccattctcgtcttcttcccatccctgacagcggcgtccaaagtgctcaattatgtcaccttctgcggtacattttccccagaaggtattggcaaattggcagagagggcagaatacctgcaccggctgattttgtgagtcgggcttatggcttccgacttctggtgtatagaggtcatgaggattgcctgcataatctaggattaaacactcttttttatcagggaataaacgcagcccccgcccaacgatttgttgataaagactcacggactccgtcgggcgtaatatcgcaatgagatcaacatggggggcgtcaaatcccgttgtcagaacagcaacattgaccatataacgtaactgttgctttttgaatgcgttgatcaagagatctcgctcatggcctggtgtatcggcactgactaatgcagcttgttctgccgggagtaatagggatatttctttagcatgctcaactgtggctgcgaaaatcatgacgcctttccgatcttctgcatacttaataatttgcctgacaatatgtggagtgatgcgtttttgtcgcttaatttcccgattcaattcagctgtattgaaaataccctgctggctggtgcgtacctgactgaaatcatactgcatcacgggcatatccagtctttccggaggaacgagaaaatgatgctttatcatatagcgcaacggaagctcataaatacagtcacgaaagaagcaattttcatcgccgcggatcataccgtggtagtgatactgatatatccagccagtacctaaacggtaaggagtggcggttaaacccagaatgcgcagccttggattatttttttggagttgttggataatttgttgatattggctattttcgtcatcgctgatccgatgacattcatcgatgattagcagtgaaaattgatggttaaaacgatctaagttacgggcaatagactgaatactaccaaaaacaactttcctttcgctctgtttttggtgcagtccggcagaaaaaatatcagccgttaggttatatgaacaatatttactatggttttgtgcaacaagttctttaacatgtgccagaaccaaaacccgaccatgagccagctttgccagctcagcaataacaagactcttacctgctccagtaggtaagacaatcactgcgggttctttatgttggcggaaatggcggatggtcgcatctaccgcttcttgctgataagggcgtaaggtaaaagccattgtttattactgccacggatatcgggtaaaaatcgttgacagagagaatagcacttttgtctgttctatttattgattttacaattacgtcataaattatctgtttaatcttgtcattcagtagtaggcttaaagtcatttttgcgatttttttagattattttttgttaggtatagctatacatgcgattggataaatttttatcacaacaattaggtatcagccgtaacgatgttgggcgtgaattacgagctggacgggttactgtcaataatgaaattattaaaacaggggcatataaactgaaacctgagcaaactgttgcttatgaaggaacggtactggagcaattagatggcccacgttattttatgctgaataagccacagggatatgtgtgctcgactgatgatcccgccaatccgacaattttatattttattgatgagcctgttgcccataaattacactcagcaggacggttggatattgatacaacaggcttagttttattgactgacgatgggcagtggtcacatcgcatcacgtcacctaaacatcattgtgaaaaaacttatcttgtgacattggagaacccgatttcaggggatactgaagaaaaatttctctcaggtattctgttgaatggggaaaaaacgctgacgaagcccgccaaattagagattatcgagcctcagcttgtacgtctgactatcagcgaagggcggtatcatcaggtaaaaagaatgtttgctgctgttggaaaccatgtcgttgaactccatcgtgagcgcatcggtgatatttatctggatcctgatttagagcccggtgaatacaggatgctgacagagaatgaaatcaagagcataaacatgccaacagcttaaattttgtctattttatcaagttgttttgggaaaaaaagcgtgcaacaacaacgattatcttatttagggttagtccttattcttgggctaatttctatgctgatgccactggcaattgatatgtatttgccgagtatgccaacaatagcctctgatttcggcgtcagtgatggcaaagtacaaatgaccctgaacagctatattttagggtttgctattggtcagatagtttatgggccaatgtctgacagtttggggcgtaagcctgttattttgggtggagtgactgtttttgcaatatcttctgccgcatgtgctctggctcaaaatattgacacttttatttccatgcggtttttgcacggttttgcagccgccgctgccagcgttgtgatcaatgctttaatgcgtgacatattcaccaaagatgaattttctcgcagtatgtcatttgtgacgctggttatgatcattgctccgctactggctcctatgctgggtggaataatgatggtgtggtttaactggcatgctattttctggtccattgcaattgcggctgtcatagcggcattgctagtagcggtttttatcagggaaacattacctaaagagagaaggctgcgttttaacttaaaagttactctagggcagtttgtgatgctgtttaggcagcgtcaggtcttgtgctatattttggcaagtggtttttcttttgccgggatgttttcttttctcagagctggctcatttgtttatattcaactgaatggtgtccctgtgcagcattttggctattatttcgggttgaacattatttttatgtttgttatgacaactatcaatagccaatttgtccgtaaatatggtgcattgaatatgctgaaatttggcgtgttcgtgcaatttcttatggggttatggttgttattcagcacgatgctggatttgggctttatttctttggtattgggtgttgcaatttatattagttgtatttctttgattacatctaactcaatggcggttgttttggatggctatccccatatggccggaacggtcgcatcattatcaggtactttacgttttagtattgctgctttggttggagcaattttatcttctgctcctgaaaaaagtgcttggccgatggttggctcaatggctttatgcgtgatattagcaatggcattgattgtctatgcgagcaaagcaataaaataatcacataattaatagaaaccaccggttgtacaaggtggtttcttatttccatagatttcacctttcaagttgcttctttgttggctgtgctcgttcacctcagtcactgtttttatcaatatacggttatctatattcccggagattactgagagtcttgcttttagctggataaattcgttcctgacgaaattgtctctcttttgtcgtcgcgacgcaccttgaaatccgttgtgtatataactgtatctactgtttcttaaatcacattttcatggtctgttcatgaaatcgagctgttatatcagtatctgagtttttcgttctaaagcagatagttcttcactcagaagcaaaaatattccaagaatctggctatatgttaatttttatttattagataagcagagctatcgaatgaaaagatagtcaaatatggctgggcgttaattttatgatgccaaatcgctctattttgtttgttttttgttaatctaaaaatgttaaatatatgactctatatggtaaacattttgttctttactaaccatatgtaatgaaaggatattatgaaagtgccatcgtgttttatcgttagaaaaaatatcggtttgtaaacaaatcttgaataaaaagttgctgtcttacataaaaataagttgaattttttaccaaaacagtataaatatatacaaagtgcgagtttgatctcatttttttctaaataaaagacgaaaaaagtgtgatgttataatttttgttttaactttttatttacttttttgttgggtggttactcggctttgagaggtcggtagccaacagctggtggttagatgtattaatgttgtttctgataggaataatacgtgaataatattcaactttcggtagtacacagactgccgcaaagttatcggtggtcatctggttttgtcgggacaagagttgaaatcttgccagaagaagaggcagatataggaaataccctgatggggctgaaattgttaagccatgaaggcgaacatgcatggagtatcttgcatgatatacatcagtctatttctgatatgcaaataataagtctttagagcac

SEQ ID NO: 329 - DNA, 11182 bp, Xenorhabdus sp.
  CDS (1818)..(9263)
agtgtcctctaaaggctggcccatgctctgattgccgcgggtgtacaaccggatgatcgggtagctatttgtgtcgaacgtggtctggatatggtgataggtttatacggtattttaaaatccggtgcgggatatgtacctctggatacggattaccctaccgaacgactgaactatattttgtcagattgtgcaccgaagttattactgacgcagcagcacttacatagccgcttatcgactgatacgcctgtatggatgctggatgataacagccatatcgagtgtatagcccggcagccaatccataaccctgatccgcaacaactgggactggcagcgcatcatctggcttatatcatctatacttccggctctaccggacagccaaaaggggtgatgattgagcatcacaacgtggttaattttgtccatgttcagcgtcagaccaatgaactgacgccgtctgaccgtgtacttcagttcacttcggtagcgttcgataccactgtatcggatatcttcgccacccttgccgcaggtgcaaccttaattatgcgcccgtcagaactgcgtgttcccgacagagcttttgctcaattcctgcaacaacagcaaatcacggtgactgatttacctaccgctttctggcacttatgggtacaggaaatggccgcaggacgttgtagcttcagcccttctctgcgtctggtgattgtcggcggagaaaaagcggaactgcgtcacctgatgacctggcagacactaccggaaacccgttcatgccgatggattaactcttacggcccgacggaaacgacggtgattgccactgttctgaaagtggacagtcatccggactatagcgcagaaacactaccaatcggttatccgctcgccaacagccgtatctatatacttgatacgcgcggaaaacctgttcctatcggtgtttccggtgaaattcacattgcaggtgccggcgtggcgcggggttatctgaaccagcctgagctgactgatgagcgttttattccggatacgttcagtgaacaaccgaatgccagaatgtacaaaaccggggatttaggtcgctggttaccggatggaacgattgaatacctcggacggaatgattttcaggtcaaaatccgcggattccgcattgagctgggagaaatagaaactcagctggcagcctgtgaaggggtcaaagatgctattgctatggtgcgtgaagacgaaaccggtgataagcgactggtggcttatttagttccacagcctgatgctcagctggatatcgctgatttacgtgaacagctcagtactcatctgctggattatatgatccccagcgcctttgtcgtaatggaagccttcccgctgaatccgaacggcaagctggatcgcaaatcactgccggttcctgaccgctctgcaaccgctacgcgggcgtatgaagcaccagagggagaaacagaacagcagctggcggctatctggcaaaccttactggggctggagcaagtcggtcgtcatgatgatttctttgagctgggaggaaactcattatcaatcatgcaattatcggcaagattacaagaagagttccatctggaaatttcaattacggatattttccgtcattcggcattagccaaactggctgagcttatcttatcaaagcaagtggaaacctttttcgatcaggatattgaagatatgcaaaaagagctggagaacctatctgaagatgagttgcttgccatgttaaatggagaacaactagagggaaataaactatgagcaaaaatgaacagacactgaatcaattaaggcaggctgtactccagaagaaactgaaagagcgtatgcaaaatagcctgacaaccgaaaaagcaccgatatctgcccgtgatccgcagcaggagatcccgctatcctgggcgcaacagcgcctgtggttcctcgctcagttagatccggctgccctgacggcataccacattcctgccgcccttcatctgaagggccaattgaacatcgcggccttacagggccgcgcctggacagaatttgtcgcccgccatgaaattctgcgcaccactattgggctggcagaagacggaggagaaggaacggcgcggcaaattgttcatgggaaagatttcggtttctctttaagtatgcaggatttgcgtctattagccgatgatgatcgacaaaatgctatccagaacgccatcaaatctgaagccagccatcctttcgattttgaaaacggccccttaattcggggccagttattcagactggcagaagatgaaaatattctgttactcacccagcaccatattatttctgatggctggtcagttaacgtcatgatgcaggagttttctactctgtacctgagcttctgccacgaacagcctgacccattaccgccattaaaaattcagtacgcagattatactctctggcaacggaaagaattacagggtaaggcactggaaaagcagctggattattggcgtaatacgctacaggatgcgccgacacttctgacactccccactgaccgcccgcgtccggcgcggcaaacttatgccggtggagaagctctggttaccctgtcaccggatttaaccggaaaattaaaagcctttgcgcaacgtcacggcattacgttatttatgacgctgctgaccggatggtcaatactgctttcccgtcttagcgggcaacatgatttagttatcggtacgccagtcgctaaccgtaaatatcgcgatctggagccgttaatcggcttttttgtcaatacattagcactgcgggttcagttacaggataaccctaccgtcagtgaattgctggcacacgtgaaagctcatactgtcacggcttttgaaaatcaggatctcccgtttgaacaattagttgaagcgttaaaaccaccgcgcagtctgagttatagcccggtttttcaggttatgatgtctctggataatactcccggacaacagcagttcgaattaccgggattaacgatcagcgaactggatttatccgaaaacagctcccactttgatctctccctgtcactgcatgacacggatgaaggcttaatcggtgaactggaatatgccagcgatttgtttgatcaggcgacgatggaccggatggcggggtatctgcaaacactgttaacggttatggtggctgatgatactcagcgtgtcgctgatttaccgttactgacaccgaatgaacgtaatcagttattggccggctttaatgccagaacagcctcttatccgcaggaaatattactccagcaactgttcgagcaacaggtcgcccattcccccaccagcccggccttaatcagtgaagaacagcagctcacctatcatgaactgaaccagcaggcgaaccagcttgcccatgccctgattgctgccggagtgcaaccggatgatcgggtagcaatttgcgtcgaacggggcgcagatatgatcatcgggctgtttggcattctgaaagccggagccggttatgtaccgttagacccggaatatccgactgaacggctggcctatattctgtcagactgtaagccgaagctattactgactcaggagcacttacagaaccgcctgaatactgaagttcccgtctggataatggacaacgatcactatctggataatgtggcacaacaatctaccgacaaccctgaaccacatcaattggggctgaaaccgcatcatctggcttatatcatctacacttccggctctacaggtcaaccgaagggggtgatgattgagcaccgtcaggtcgtgaattttgtttatgtccagcgtgaaacgaatgaactgacaccttctgatcgggtgctgcaatttacctctgttgcctttgataccaccgtgtccgatatttttgccacactggccgccggagcaacattagtactgagatcggcctcgctgcgcatacccgataaaaacttcagccagttcttacaggaacaggcaattaccgtttccgatctgcccaccgctttctggcacttatgggttcaggaaatggctgccgggcgctgtggtttcagcccttctttacggctggtgattgtcggtggtgaaaaagctgaactgcgtcatttcaatacatggcagactttacctgagactcagtcctgtcgctggataaactcctatggcccgacggaaaccaccgttatcgccacggtatggaaaccagacaaccaggaatccggcctcaccaataccgttcctatcggtagcccactcaccaatactcaaatttatatccttgatactcagggacagccggttcctatcggcgttgcgggtgaaattcatatcggtggtgcaggtgtcgcccgggggtatctgaatcgtcctgatctcactgatgaacgatttattgccgatccgttcagccaacaagccaatgcccgcatgtataaaaccggtgatctcggacgctggctaccggacggtacgattgaatatctggaacgcaatgatttccaggtcaaaatacgtggattccgtattgaactgggagaaattgaagcacaactggctcagtgtgatggagtcaaagatgttgtagtgactgcccatgaagatgaaagcggcaataaacgtctggtcgcttacctgataccgcagccggagacaatactggatatcctccagttacgtgaacaactaagcgcgcaattgatggagtatatgctgcccggtgcttacgtcgttctggatgctttcccactaacacccaacgggaaagtcgatcgcaaagcattgccggctcctgaccataccgccatcatcagccgggaatatcaggcaccggaaggggaagcagaacaacaactggcaagtatctggcaggagctgttggggctggaacaagtcggacgccatgacaatttcttcgagctgggcggacattcactactagtcgtcagcctgattgagaaactccgtcaacacagcctagccattgatgtcagtgcggtattcgcatccccgacactggcagctatggcaaccaatttaactcagcaaaccgaatctgatacaaacaacacgcctgtgccaccaaacctgatcccggataactgtcaggcaattacaccggatatgctgccactggtaacactgtctcaggcgaatatcgaccagatagcctcacaagtgacaggcggtgtcagtaacattcaggacatctatccactcgggccattacagcaaggtattctgttccaccatttgctggaaacaaccggtgatacgtatctggacaacctgctgatgactttcgacagtcgttcacgtctggatacattcctgcaaacagtacaacaggtcattgagcgccacgatattctgcgcactgccgtccattgggagaatctgccagagccggtgcaggtcgttcatcgccatgcccccatgcctgtcacagagctggaactgtcgcctgaaatcaatgcggaacaacaaattcagagctataccgaccctgatatcgtccggatgaatatcaacaaagcgccgttattatctgccagcattgccagagaaccaaatagtgataaatggtacttatccttacttcaccaccatctggtttgcgataatttatcgctgaaactggtatttgatgaagtcaatgccatgttacagggccagcatgaacaactgccaacagcattgccttatcgtaatttcattgcccagactaaaaatattccccttgaacaacaccagtcctatttccgtcagctgctgggagacgtagaagagccgaccctgccattcggcctgcttgatgctaaggacagtggcgataaagttgtggaaaatgttctgacactggatagtgatctttcccggatggttcagcaatgcgcccgtcaacagggtgtcagtaccgcagttctgtttcatgttgcctgggcacaggtactggctcagtgtagtggccgtgacgatgtcgtcttcggtaccgttttaatggggcggttacaaggcggtaaagaaacagaaaaaataatggggatgtttatcaatacattacccattcgggttattctgcaagggcgcaatgttcagcaaacagttcaggaaacttaccggcaactcagcacattactggtacatgaacagacacctctggtcattgctcagcgttgcagcggtattcccgcttctctgcccctgtttaacagtctgcttaattttcgtcatggttcagatgaaacggaggaagatgagcaggaactcgcagcaatctgggaaggcattgaaacgtttaacactaaagattcccgcagcaattatcctttatcactggatgttgatgcctatgatgaccaatttgaactcactatccaatgcagccaacagattgacccgagtcgcattaatgcctatgtggcaaccgcactaaaaggtctggttacttcattattacaaaacgcgcctgcacaaaatattcaggcaatctctgttctgccaccagcggaaaagacacaattactggtggattttaacggtgctgaaatcgcttatccgcagaatattctgctccaccagctcttcgaacagcaggtttctttcacaccagattccattgcgctggtgagtggtgatgagcaactcagctacgctgaactgaaccaacgggccaaccaactggcacatgctctgattgccgcgggtgtacaaccggatgatcgggtagcaatttgcgttgagcgcagcccggatatgattatcggcctgttcgggatcctgaaagccggtgcaggctatgttcctctggatacagattatccgacggaaagactggcttacatcctgtccgactgtaaaccgaagctattactgactcaaaaacatttacagaaccggctggcaacagaagtccctgtctggttaatggatagtgaagcgcatcggagcaatgtggcacagcaaccgacccacaatcctgaacatctacaatcggggctggcaccacatcatctggcctatatcatctatacctccggctccaccgggcagcccaaaggcgtgatgatagagcatcgtaatgtggttaacttcgttcacgtccagcgtcagacgaacgaactaaccccttctgaccgtgtgctgcaatttacttctgttgctttcgacaccaccgtgtcggatatttttgcaacactggcaaccggcgcaaccctgatcctgcgacctgccgatctccgtgtaccggacagtaacttcggtcgtttcctgcgggagcagaaaattaccgtcaccgatctccccaccgctttctggcatcagtgggtacaggagctggtctcaggacgatgtgatttcagcccttcgctgcgtctggttatcgttgggggcgaaaaagcggagcttcaccatctgactctctggaaatcactggctgaaacgcaacattgccgctggattaactcctatggtccaactgaaaccaccgtcattgcaaccgtattaaaagtggatggtcattccctgtataccgaaccaacactgcctattggttatccattaaccaatacccgcctatatattctcgatagacagggacaaccggctcctctcggtgtttccggggaaattcatatcggcggtgcaagcgttgctcggggttatctcaaccagcctgagctgacagcagaacgctttattcctgacccattcagccatcaaactgatgcacgtatgtataaaacaggtgatttgggatgctggttgccggacggtacgattgagtacctcggacgcaatgattttcaggttaagatccgcgggttccgcattgaactgggagaaattgaagccagactctttgcttatcccggaattaaagacgcgattgttatcgtgcgggaagatactccgggtgataaacgtctggtggcctatctggtgccacagccgggtacaactctcgatctggaagacctgcgtcactctttgcacgtaaacttagccagctatatgatccccagtgcttttgtgattctggatacattcccgctgacacctaatggcaaactggatcgtcgggcattaccggcaccggataaatcttccgttatcagtcgcaactatgaagctcctgtcggtgaaacagaagagcttattgcagcgatatggcaggacgtactccggctggaacaaataggacgccatgatcacttccttgagcttggtggtcattccctattaaccctgcaggttgctacccgtctgaatcaggctttagctaaagatatcagtatccgcgatctgctggtttactcgacaatcagtgaactggcaacatatattcagtcagacgcgccactgccgcaacagcagaatatagtgactgtccgtcaggggaatggcaatacttcactgttcctcattcacgcagtcaatggcgatgttcactatgcctacgatcttgagccatatatggataatgacgaattatcaatttatggtgttattgccagcgatacccttgcagaagaaggcatacaacccaccatcaacaacatggctcaggaatatattaaatgcattcgccagatacaagcacatggcccttatcatctggctggatggtcatcaggcggaacgattgcttatgaaatgtcccgccaattaattgccgatggtgaaacagtaaactttatcgggttactggacagcgcttctaattatctggatttctattcagctgaagagaaacagtccggaatgatgtttgagaaaagtgccacactgctcgaactactcccgtacgatatcccagaagacattaacgatgaattcaataagctagctaatgaacgtgattacgacgcgatgttaatattagctgagaagctcaatttattaccaccgaaggtcacgcgggaaaatgtcagtgatcttgtgcaaatgcgctataacatctctgtggcagctaactgttacataccacaggcgataaacacgaacgttactctgttcagagcaatggatgaagtcgccgaaggagaaacaatggcgctaaaatgggatcaaattctacccagtgagcaactgactattatcccgattaaaggagatcatgactctatgatgctgcagcccaatattcaggatacgggcaaagcattacttcaggcggtaatgaataatcaataaagcagcaaaaagaatgaaccaccttttataaaggtggttccggaacgctcatataaataacgcccataaaattgggcgttattttttaagtttcaattattgatatatacgtcatctttcagattgatgctttgttggttacacttggtcatcccacatcccattcacatagtcatctatgcgcctgaggatgaacgcccttaccgcggagacacaacctttaaaatcatgagtaaaaataataaatacaaaatcaaattttataacaacaacttcagaattcattatttaaaataattatttttacattagttccctggtgagcaaaacaaataataacaattacagcctgaatattatattctatataattacacgctaataaaatagaaaacataatttattcacatgatacatttctggtatgtaactgaaagcctaccctgtttcttatttttacctcctgcattataatatatacaatcataaggtaaattcataacacactaaatcttataagatgatatcaacgagacaacataatgcaagagacgaacaataaaaaaatcgactaaaatcgatatttctccttcacatatttcaaaaaaaatttaagctttaataaaaaaatatcaattcatccatttcaggttaattaaattttcatctccaatatctttatcgtgacttttaaatccagccattaatatagcctaattaaacatcgggatatttaatataacacgagttaaattaccaattgtaaattatgaggtcgctataagaataacaaatcagaatctgctgatgtagacgattaaaaaatatcatataatccgtctatttttgggaggtaagaaaaaatgaaagccattcagataaccgatatccacctgacacagagcagagaacatcaattatttaatgcaaacctgtatgacaattttgatactatctgtgaggaaatatgccgcataaagggaattactgaaatagatttaatcattgtttccggtgatataacaaatgatggtgatatcgatgcttaccgatatttcttcaaaagaatggattcatgtcagactccctatatgacaatagccggaaatcatgacctgaaaaataatattgataccgtaattacagagataaaaccaaaatataacatcacttccggtgagtataatgataaaaattggttcattacttatgttgatactgtcgttaaaggtgaggattatggctttattacacaaaataaccttgctgaattagaaaaaagaattattttaaacaagaaatttaatactgcggtatttatgcatcaccacatcataccggttggtacacccattgtggacagttgtatgctggaaaatgccgcggatttattaacattatgtaaaaaacataaggtgaaatttattggttgtggtcatgctcacacttcgcgtatctggcatcagaatgatataacaatcagtgttgcacccgcagtttcattccagtggttattaggtacaactaccgttaaaacaacaaaaatttctggttttaatattattgatttttcagaaaatatatcagtaacttcatgtaattactaaagtccttctcaagttgcagcataagcaacttgagagtgtattgcggcccagtatatgacttaattatcagaaatcggctttaatttagccataaagtggcgcaacactggtggctcataattaaatgttaatccacaaatatcagcagcatgctgttttaattcaataaaggcttcaacgacataatccatatgatcattggtatagacgcggcgaggaatagccagtctcatcaattccatcggtgattctttttgtttaccggtatctgggtcgcgcccaagcagtaaagaaccaatttctacacttctg

SEQ ID NO: 330 - DNA, 12710 bp, Xenorhabdus sp.
  CDS (5467)..(5895)
  unsure (1)..(12710): unsure at all n locations
ctcggaccaatgtgctctaagaggtgaaggtgacccggaaagaggcggtaaaaaaccgctgacagtagtcaatattctggcggaacaggctaagcctattagcctgaatgctgatggagaaggggagattacgttaccgatccctgactttaatggcgaactcaggctaatggcgcaggcatggagcgatgacgaattcggaaacagtgaacgcaaagttactgtagccgcgccagtggttgcgcagatgtcattaccgcgttttatggctggtggtgatcagtcacaactggcattagatctcactaatctcactgagcagccacataaactgacattgaattttgctacaaccgggctgataaaattacaggaatctgcgaataacagcatcacgctggaaacaggaaaaagggtaacgattcaaattccggttaaagctgactatggatttggacaaggcgaaattttcctgaccgttgatggcctgaaggtatccaacgaggtacagcaatacaaaaacagttggaaaattggtgttcgtccggcattccctgctatcaccagacagttcgcggatgttatccggcaagatgaagaatggctgttaccgccggatgcgatcacaggtctggccccggatacactggaaggccaacttttgctgaccagtaggccaccactccaaattgcccgttatatccgcgaattatatgcttatccatatggctgtctggaacagacaatcagcgggctttatccgtctctctactccaatgaagctgaactgaaaaaactgggcattaagacacaaagtgatgaaaaacgccgggcagccattgaagacggtattacgcatctgctgagtatacaacgtcatgatggcagtttttctctttgggatcgtaatggtgaagaagaattctggctcaccgcatatgcggcagatttcctgttccgtgccaatcagcaaggctacagtattccggttgatgccctgaaaaatgccaataaccggctattgcgttacttgcaggataaaaacatcatcaacgatcgctatagcggttcgcacagtgcaacacagttttccgtgcgggcttacgccggtctggtgttagccagccagcagaaagcgccattaagtagcttgagacaactctacgagcagcgggatcaggctgatagtggattatctctggtgcaattaggcatagcattaagcatgatgggagatgataaccgtggcaatgaagctattcactccggtgtatctaaatcccgtaaacagggttatgggctgaatgattatggcagtaccatacgtgacgacgcattgattgtctctttgttgactgaaaataacattttgcagaaagagcgggatgaaaagctgcttgcgttatccaatgaactctcgtcccgaaagtacttttcaacacaggaaagtaatgcgctttatctggccggacgttattttattgatgccagtgagcagccctggaacgctgtcattaaccgacaaataccaccgattaaccgcaatactgcgctgaataacgccttgtctgcaaaacagattctgaatggcattgagataagtaatcggggggataattccctgtattcacggctgaatgtggtgggttaccctctgaaaaaaccagagccttattcaaacatactgaatattaagcgtacctatcttgatttgacgggtaaaacttacactccggatcgcctgaacagcggcgagctgatgattgtaaaactggaaatcagtgcgacccagcctgtttcagatgctctggttgtcgatctcctgcccgcaggattggagcttgaaaaccaaaatctggcatacagcagcgccagcctgagtgaaagcgcaacagatttacaggatatgatttacagaatgcaaagagcgaatattcgtcatatggaataccgggatgatcgttttgttgctgctgtttctgtagagccttaccagccagtaaccctgttatatttagcccgtgctgttgcaccgggggtttatcaaatcccggctccacaggttgaatccatgtacgtaccttactggcgtgccgtcggtgtaacaggcgaaaaactggaagttgtccgttaatcgggactgattttcaatcatgatttctggtcagcccttatgtctagtgataagggctgttttttcggattctgttttaatgaaaagatttttctaccgcattggtctgatcactccggctatcttattcacattgttttcctctttatggctggcagacaaaatctggcctttgccactgaaaaacatcaccgccgcacgagttgtggtaggcgctgacggttcacctctatggcgctttgctgatagtgaagggatctggcgttatcccgtgactctagagcaggtttctcctgaatacattcaggcactcttaacctatgaggaccgctggttttaccagcatccgggggtgaatcctctttcattgttacgggcagcttggcaggatatccgggccggtaaaattgtatcaggcggaagtacgatctctatgcaggttgcccgtttgattgatccccactcacgtacttttggcggtaagttcaaacagctttggcgaactctgcaattagagtggcactattcgaaagacgagattctggagatgtatctgaaccgggcaccatttggcggcactttgcaggggattggggcggcaagttgggcttatctgggaaagtcaccgtcagatttgtcatccggtgaagcggcattattggcagtgttaccacaggctccaagccgtttaaggccggatcgctatcctgagcgtgctcaggctgcccgtgacaaggtattgcagcgattgaagcaatatggtgtctggtcagcagaaaaagtggcggatattgaggaagaaaatctgtggctggctccccgtcaggttcctcaacttgcccctttgttggcaaggagaatggctctcaataatcagcaggaaatcatccgaactactattgataccggcttgcagcgccaactggaagatatggtgcttaactggaaatatcagttagcggaaaaaacatcaattggtgtgctggtggtcgatcatacggatatgacagtgaaggcttatattggttcggctgattttcaggataatagccgttttggtcatgttgatatggtcagtgcatggcgttctccggggtcgacattaaaaccgtttctgtatgcaatggcattggatgatggcctgatccatgcggaatctcttttacaggatgttccccgccgttttgataattatcggccgggaaattttgatagtgggtttaatggcccggtcagtgccagtgaggcactgactcgttcactaaatttgccggtagtgcagcttctggaagcctatggcgcgaaacggcttactgccaatttgcgtaatgcaggcatgacgctgcgtttccctctgggaagtgagccgaatctggcgctgattttaggaggaacttcggttcgtatggatcagctggtttctgtttacagtgcgtttgcccgtcagggaaaagtttctccgttacgctttacagcacagcaggaactgcgggacagacagctttttactccgggagccgcctggattgtcaggcggattatggcaggggaaagccgcccgctaccggataatgtcttacccgccgaagtgccactggcatggaaaacaggcacgagttatggctatcgtgacgcatgggcaatcggtttaaatgcccgatacaccatcggtgtctgggtcggcaggccggatgggacacctgtagcagggcagtctggttatgcgactgcaattcctatcatgaaccagattcatggattattgatggctgatctgcactatggttcgcaacctattcctgttgatccgcggccggagaatgttagtcaggcagttatttgctggccgagtggtacggcattccggtcggaagacagcaactgccgtcagcgccgtttgagctggattctggataacactatcccgccgacgctgccatctacggggcaggaatcgatttcgggtatccatgaacagatatggatcgataaaaacggtttacgtgttgctgccgattgcactgatgcccgacctgaaacaatctctttatggcctattgcactggaagcatggctgccagagaaagagcgccgcgtgaatcggctacctccaattaatcctcagtgcccgccaataaaaacagatgacgcaccgttattgattaccggtatccgagaaggggatgttctgactcgcttgcccggtcaacggacgttggatctgcgggtagcaacacagggcggtcagggacagcaatggtggtttttgaatggtgagcaggttaccgtgactgaaaataaccagtcgtggacgaaaacattgtcacagtcaggaaaatatcagcttagtgttttagatctgagtgggcaaatcagcataatcaattttgtattaaaatgatccggttacgaattgtggaataggtcaaatatttcgtcatagacaaaaaattaaacgtattttttgttttaaagtaaacttattgctgttctattcggaatatattgagattttaagatgtcgattcagtaagtttctatttatttaataggtgtatgttaattcaaccagtgaggaaataaagatgaaagttgtttcatatgctttgttgctggggttattttatgtacccgtttctttagcagatacatcagcaaaagatattgataataaaatagtaattaaagaagtggttaatcagggcgcattgaaaaaatgcacacatttattacctgaaggacataaatataccattagcattatcggcacttctgataagacaacaaaagacagtaatgaacagtttaaaggacaatttgaagtttctgatgaaactaaaaaaccactggatgagaaaagacaagagcaggttaagccttttattcagtgtgtgaaagatacggttttgtaactgaaattgtttaaataatgatataacgcgcgaagtcaatgatcttggtcagaatgcctatgcgggaaattatcgcctgcatagacattattttataaaatgaatcaataagacagtgcatatcgatagaaaagtaagatatctgaaataggagttagtgctgaaaatgtgtttaactcgtattgtctttaattggtttgtactgcaaaaatgtgatttgtgctaaaaaattatcattttcgctaagaatgttttaataaaatgttgtgttttttgtaggcaagccgaaagtctcctcctataatcaacgcctatttttattcctgtcaggaaaacaggataaattctgtccttctgagttatcagggggaatataaaattaaaatgaatcatcgctgaaagtgccaaaggggttatccaatgacgattgaacgtactttttccattattaaacctaatgctgtgaagaaagatgttatcggttccatctatgctcgttttgaaagtgccggttttaaaatcatcgctgctaaaatgctgcatttaactcgtgaacaggctgaaggtttttatgccgagcacaaaggccgccctttctttgatggtctggtagagttcatgacatctggcccaatcatggtacaggttctggaaggtgaaaatgcagttcagcgtcaccgtgatctgatgggtgcaactaacccggacaacgcgctggctggtactctgcgtgctgattatgccgacagttttactgaaaatgcggtacacggctcagattccattgaatctgcaaaccgtgaaattgcttacttcttcagtgatgacgaagttttctctcgcagctgatattcaataagtttcgagccgcttcaaaaagacgacctgaaagatggtcgggatgtttagttctcgtagcatctgaacagtaaagtttgtacaatgtcgcgccccgctgatttgacttagcggggcgtttattatttcatttcaattaacgattaacgctggatatgttttcgcaaaagagaccatgtattgcgttatatttattgaatatgaagtctgtttactgaatcagtagtcaccgcatgaaaacttagtgctgaaatacaatcagcacagagccgaaagtgtaacaacgaggcgatgtaacaatatgtcccagacaatgtcccaacccaatacagccgaacaatgttcaacttctgccacttctttcacacctgataagacttttacgcgggataagacaagcggcaaaattaatctgcttgatctcaaccgcaaacaaatgcgtcagtttttcattgaaatgggggaaaaaccgtttcgtgccgatcaggtcatgaaatggatgtaccactattgctatgacgactttgagcaaatgactgacatcaataaagtgctcagggcaaaactacaacaggttgctgaaatcagagcacctgaagttgcagaagaacaacgttcttcggatggtactatcaagtgggcaattactgttggcgatcaacaggtcgaaacagtttatattccggaagatgaccgggcgacactgtgtgtctcatctcaggtagggtgcgctttagaatgtaagttttgctctactgcccagcaggggtttaaccgcaacctgcgggtttctgaaattattggtcaggtctggcgcgccgctaaaattattggctcgctgaaatccagtggtcgccgcccaatcaccaatgtggtgatgatgggcatgggagagccgttgctgaacctgaacaatgtggtgccagccatggaaatcatgatggatgattttggatttggcctgtcaaaacgtcgcgtaaccttgtcaacatccggcgtagtgcctgcactggataaattgggtgatatgatcgacgtcgctctggcaatttctcttcatgcaccaaccgacgatatccgtgatgaaattgtaccgattaaccgtaagtacaatatcgaagagtttctggctggtgtccgccgctatctgacgaagtcgaatgctaatcaggggcgggtcacggtagagtatgtgatgctcgatcacgttaatgacagcgtggaacaggcccaccaattggcagaatgtctgaaagatacaccaagtaaaatcaacctgatcccctggaacccgttccccggagcaccttacgggcgtagctccaacagccggattgaccgtttctccaaggtactgatgggatatggctttactaccatcgtgcgtaaaacgagaggtgatgatatcgatgctgcctgtggacagcttgctggcgatgttatcgacagaaccaagcggactatgagaaagcgtctggcaggtgaacctattcaggtaaaaacagtctaattttttgttcaattcttgtaattggctaaaaatctggcgaagtttgacatatccttataaatgaaaatgatatgatacggaaatcaataatttggtctatagtttgtttgagtctggtagcaggttgtgcggagcatccacagaaccgggctcatcatgctgttgcagtagatacccgattacagttagggaaagcatatctggcagaacggaatttatcggctgccagatttcattttcagaaagttttactggctgaaccccgtcatccgcaagctcatttggggatggcgctgcatgaacaatatgcgggtcagcctgaatccgcagaccgtcactacagaatggcaatgcagtacggagcaggagatgatactgtaataggtcattattacgtttttctctgtgaacaaagacggtataaagaagctaaaaatttggtctcggacaatttggtcacagataatttggttataaagagtaacatcggcttctatacccattgcggtgaataactgcaattagtaggagttgtgataaatgattacctacgttttatgcagtatgaaatgatttcgctacacaagttaaattgtgtctgatagtcaattaacttgtgtgaatattttaacctgaacagtaccagtgtccttagataatgaagactgaaactcatccagaagaagctaatctgacagcgggtcagatcttgcgtcaagctcgtgaaaaacatgagctttctcagcagactgtggcagatcgcttgtgtcttaaagtgtccactgttcgtgatattgaagaagataacgttcctgacaatatcgtacccacattttttcgcggttatatccgtgcttatgcgaaacttgttcaggtgcctgagtctgagatcttagccaagatagatgtacagatgcagcataaggcagtaaaaacatctcagatgcagagcttttctgcccaaaaaatacgtaagaaacgtgatggctggctgatgaaattcacatggcttgtcattattgtgttattgggcatgacgggtgtgtggtggtggcagaattataatgttcagcaaaaagagttggtttcaatggctgagcagtctgatatacaggaccaaaagtctgccagtgaactgactgatactcaatctgtgacagccagttccaccctaaatacgacagaagtacaatctggtacagctcaaacagagaaaaatgtacaagtaccattaaatagtgccgctacagacagtaaggtgccattatcttccggcgctccttcatcaactcagactggtttagtgccacagtcgggtagccagccgctgacagcttctggtaatactgcctccaccggtgtttctcctgtaaatcagggagcagagaattcagttacaacgaatataacgccagacgctgtgtcatcaacgaatcctgtatcaacaacccctttatcaacaactgaaaatcaatccagtgtcgcgaacagcaatgaactggtatttaatttcaaaggcagatgctggctggaaattaaagatgccaacggtaagaaactgtttagtggtaccaaaagtaagggcgatagcctgaaattatcaggtgctttaccttattcacttaatatcggggcacctgctcaggttgaggtagagtttcagggaaaacgtgtgaatatggatgcgtttattaagaaaggcaccaatgccagactgacactgccataagcggatttatggttttgacacgtttactgggcacatactttgagacgaatgttgagctggggttcaggttcgtctatgtgtattattcaccacagcatagttgtaatttttataaataaaatacagggatgtaggggagtaatgtaaaaatgcataatgaatcaccgataacaagacgtaaatccacacgtatctatgtcggtaatgtacctattggagatagtgcacctattgcggtgcagtcaatgacgaacacacggacaacagatgttgaagcgactgttaatcagataaaatcgctggagcgtgtaggtgttgatattgtccgtgtttcggtgccaaccatggatgcggcggaagcctttaaactcatcaagcagcaagtcaatgtcccgttagttgccgatatccattttgattaccgtatcgcattaaaagttgccgaatacggtgttgactgtttgcgtattaatcccggaaatattggtaatgaagagcgaatccgtcaggttgtagattgcgctcgccatcataatataccaatccgtattggggttaatggcggctctttggaaaaagatttacaggaaaaatacggagaaccgacaccagaagcattggtggaatcggctatgcgtcatgtggatattcttgaccgccttaactttgatcagttcaaggtcagtgttaaagcatctgacgtctttcttgctgtaggtgcctatcgtttgctggcgcagaaaattgatcagccgctgcatttaggcattaccgaagcaggtggtgcccgtgctggtgcggtgaaatcttcaatcggtttgggaatgctgttatccgaaggtattggagacactttgcgtatctctctggcggcagatccggtagaagaggttaaagttggcttcgatattctgaaagcactgcgcattcgttcaagaggtatcaatttcattgcctgcccgacctgctcacgtcaggaatttgacgttatcggtacagtcaatgcgcttgaacaacgccttgaagatttgatcacgccgatggatgtttccatcatcggctgtgttgtcaatggtcccggagaagctgaagtttctacattaggcgtgaccggcgcaaaaacaaaaagtggtttttatgaagatggcgtccgtcagaaagtacgtctcgataataatgatttgattgaccagcttgaagcgaaaatccgggccaaggctgcgatccttgatgccagtaaacggatcagtatcaatctgctcgaaaagtaaaattcaataccggctcatgttatttgagtcggtattattttgtttgctgattgaaccttgagaatattcgcttttataatcgactctattgtaaaaatattaataagagataaaacatggcaaaaaacatttcggctattcgtggcatgaacgactgccttcctgctgaaacagcgatttggcaacgtgttgagtctacaataaaacgtgtgctggctggttatggcttcagtgaaatcagaacaccggttgtagagcagaccccgttattcaagcgagctatcggggaagtgactgatgtggtcgaaaaagaaatgtatacatttaatgaccgcaacggagaaagcctgaccctgcgcccggaaaacactgctggttgtgttcgtgccggtatcgaacatggcctgctgtacaatcaggaacagcgtttatggtacatcggccagatgttccgttatgagcgcccgcaaaaaggccgttatcgtcagtttcatcaattgggcgctgaagtgtttggtcttcaggggccggatattgatgctgaaatgatcctgatgactgcgcgctggtggcgggaattgggcattgctgagcatgtgacactagagttgaattccatcggttcgctggaagcgcgggcaaactatcgtgatgcgctggttgccttccttgagcagcataaagataaattggacgaagattgtctgcgtcgcatgtatactaacccattgcgcgtactggattctaaaaatccggaggttcaggcacttcttaacgatgccccggctttgtttgattatcttgatgcagaatcaaaagaacactttgacggcttgtgccggaatctggatgctgcgggtattcagtatcgtattaaccagcgtctggtacgcggtcttgactattataaccgcacagtatttgaatgggtcacttctgctttgggtgctcagggtacggtttgtgccggtgggcgttatgatggtctggttgaacaactgggtgggaaatcaacacctgcggtcggctttgccatgggtatggaacgcatgatcctgttggttcaggaagtgaatcctgaatttgttgccgatctcacggttgcagatgtttacctttcttccttcggggaaggcagtcaacaggcagcactgattctggcagagaaaatccgtgatgaattaccggaattacgcctgatgaccaatcacggtggcggtaactttaagaaacaactggggcgtgcaggtaagcacggtgccaaaattgccctgctcttaggggaagatgaaatgagtacaggtaatgtcaccgtgaaagatttacgaaatggtgagcaacaaacattaccacaacaaacgatcgcagcacgtttgagcgaactgttaggctaaggagagactctgtggaagtctataccactgaaactgaacaagttgatgcaataaagcgttttttcgttaacaacggtaaatatattgctgttggcttagtactggggattggggcaattgttggctggcgttactggcaatctcatcaaacaaatcagttacaagatactgcaacagcatttgagcaaatgaaccagtcattggcatcaggttcgaaagaaggtatctcggccgcagagaaattcgctaacgaaacgaataatatctacggtgtgatggcagatatggaactggcaaaacatgtggctgataagaatgatctggcgcaggcagagaaatatttactgactgcttcaggtaaagctaaagatcaggatatacaggctttgtcagatattcgtctggcccgcattcagttagccgaagataaaactgatgcagcattaaaaacgctggagcaggtaaaaagcaaaggatggcaagtcattactgaggatatccggggtgatattctggcgaagaaaggcgatatagcaggtgcgcgtgaagcatactccagagggttggaatctcagggagctcatgctttgaaagagagaatgcaagttaaactagataatttatccaactaagggagccaactctaatgcaactgcgtaaaacacttctggttgggctggttgcttctgttctgctggcgggttgctcaaatgaacaggatacggtcataatgtccccgctgccaaaggttgaaaaccaattcaatcctcgtgtggtgtgggataagtcagttggaagtggangtggtcattactactctcacttatcacctgcatggcaaggctctgctgtttatgttgcccgatcgtaatggtattatcaaagcatttgatatagatagc

SEQ ID NO: 331 - DNA, 18490 bp, Xenorhabdus sp.
  CDS (917)..(3616)
aaaatgtttgctcccctgtgttgtggttttgtgggccccggaaaaattttatttaaattcacttcccaaataggcctttttcccaagttaaattccgcggcactaataaaacgacattcaacattggtggttgctcgcggtatcggtttggaaagaaaagtatttccccctacaaaagggccgttggtctcaataccgcgaatactcggtgcctctgtattactggtataaagcacattgggtgtaccctgcaacataccaccgatggttgtcgcttcgggcttatttcgtatctcctgtctggagataacggtaactgaacttgccgttctttgtagtgatcttgccgttttttcaccggttacagtgatgatatcggcttcatcgttcctcgttttatttttctctgcttgatcagacgcaatcgcttgtcctcctaaggaggataaagaaagcaaaattgcactgttaagtaacatttttttgcgtgaaaaaatctgatttcctgccttgatagctaggggagttactgtctttttcgggatgattatcattatcattatcattatcattactgttcacaggcaggtaatattatgttaaccttctaatttgtcaattacatatttgttagtatttcttcaaatacgggccgttacagcacatattctgcgggtaacatctggctttccgatgcagtatttaatgactgtcagcccgtattaatacatttaaaaaaacaactaattagtttgataaagcgggattttttatgttgaacattgattcaggaaagttattgcacgtagccgtatcccgttatgaagaacatatctggttactccagcaacagaatcctgaccgcgtacttaaacagctctcagcatggcagcttcataatgatgttaatatttcaatgatggtacaggctgtccaatctgttattgaggcaataccggatttgaacgtacgttatgagttaaatgatgacggtgaattgtataaaaccccagcgacaagctggcaatcgtgccttgagtttttccatgccggttcacattcagacatgctcaagaaaatactgactgtgcaagcatctgcctggatccctgaacagaactcccctttcaatatattgataatacaaagaaatgataaagttattttagcgcttatcttgcacgagatactggcgcaaacttgtcatgaaaccgaaattatcgaaatgctgatccgcgcttatgctggtcacttagtaaaacttccacctctaaaacgtgtttctttattaccttacgatggaaaggcaacttctgctgtttccttgttatgctgccgcaatcatgagaatgcctccattcactcctcttttggtgaagaaactgacctgaataaagacaggctcgcactgcgttggaaaaccgggcttaaaattaatgaactggaagaattccttcctcgcgacaaattacctcactgtgtgtcggctcttatttcagcccgatttgcccggttcatcgctttgctcgggggccagaaaaaacttgcactttgtctgttacagccggacgggttccgtcgccttattatcgaacctgatatggcggaaacacagattatcagctccatcatggataaacttcaggctcaaccagacgaagacaattttttctccggtgctcctgtaacagaggatgatgaaccggaggtatatgttcggttgttatctcgcccgaacgatctggttgaacaacagagattactgagtcagtcaattctgttacccacctatgaaatgcgacccgattttgagctggcaatggagtatgaaagtacagaggaaattagtcttatattaacaaccggccagtcggtttccagccatgccggcgagttcttgatgagccgttttgtgtcttttctgaaaggtactgaagatgccatgatgagcttagccacaaaatctgtgtctgactcagatataccttctacgcatgatgccaccagcaaagagatctccgctgacactgatgaaatagcaacaataatcctgtcagaattccgtgaagcgttggcgattacagatatgacactggaggatgatttctttgattgtggcggtcattccctgctggcaacacgtattatcggtaaattgcttggtacgcacggtctggaagtacactttggtgatttcttcagccatccttcagctactgctttggcatcccgtgcaatcagaaaaaatcagcatacaggctccatctcttcggcacagaacgatcatttaacggccccattggcacttgcccaaacctcgctttgggatgcctataaggcctatgaatttggcactattttcaatttaccatttgctctggattttcttgatgaggttgatgaaacaatccttgaacaggttttttctgatctgatagaacgccattccagtctgcgtaccctgttctatgttcaaaatggaaaggtttatcaacagattgtcacgatgtcggacatgagtgattataaatggttctggttcagtcacgaaaaccagggtgtacaccttgatgacgaagcggcttatacgttcgatctttcccgtgaattgccaatcagaatacgactactccgcaatccggaaaccggacgtcagatattatcgcttctggtccatcatatggttattgatgaatggtcgctaaatgttctgatggatgaactctcccaggcttatttatcacgttcttccggtgtggcccctatctggaaaaaacccgtattatcattccatcaatttgccctgcaacagcaggcgaacggctttaatcaaaaacatctcgattactggacgaacatgttgcgtgatgcaactcgcggattagaacttaccttatctgacaaccagaaaacggttgcagcgcatgaaagttcatcgaaagccggctggatcgagtacaaacccaaacctgaaaccactcatcatctttattcctttgcccggaaaaataacgcatccctgttcagtatcgtctacgcggcaattgcgctttctctgcataagctcggtaatctgaaggatatcgtgataggtacttctgcatcgggtagaaccgaacatgatacttatgaaacagtcggctattttaccaccatggttgcacaccggctgcaattctatcctgagaaacccgtcggtacactgatcgaagacaccagagatacaatcaataattcaatgccgtatgcagatgtgccgctcgaccttattcagcaatcgttggggatgtcacctgaggaggggctaatcttcgacgtttatattcagatccatgccaataatgcactgaacggtgtacttaaaacctcgcttggtaacgatatacgctatcgacaaattgatcccgataaaaaggaatccatgttcggtcttcagttcgagattatggaagatgtcattgatggcgaaaggatcatgcggctggtcattacttaccgtaaggagcgttaccctgaagaacttgtccaacgtctctgtgaaacaatagagaaagttttctcattcttcaccacacctggggccttaagcctcccccttgctcaagtgactgtgtgatatctatagcaaccatgattaacgtgagtcggtcagtgttagctgactgattcatataaccctgatccgttctgaaagagaaaacattatgcgatctgctattactgtaatattaatgtgcctgatgggaacatcggcctttgccgcatcacggcaggttacggatatcctggggcgggatgtcgttattcctgaagatccacagcgtattgtggttatgagcgagccagctatcggcctgcccttaatggagctgggtgttgaacctgtaggcagttacgggcgcacggaagatggtatctatcagcttgggacagatttcgtcgatactgtactgggtgaagggcgcacaaaaccaaaaggcatcggagctggccgggagattgatctggaaaaactctacgcgctgaagcccgacctgattatcggaacagaatttgatatcgacaaagtaaaacaactttcaacgatcgcccctgtctatctgcaaaatttcctttctggaaaatcccacaattttcatatcgaagaaaatctggcccaactgaccggacgtgagcagagctttcaaaaacgaagggatatgtatttgcaacgcgttgccgcaacgcgcgctctcttgccggaaaatccggctaaacagacttatctgccgatccttgtcacagatcagatcaatgtcgttggcgaagcaaccggtttcactcaggcattggaagatcttggtttcacccgcctaaatctctcgaaacaaagcggcctttccgacaattcatcccaactacttctacagttgagcgcagataaattaggcgaacttaaccccgacgttctggtcgtgctcaatagctggggcagcaaggaacacgatgagaaggccattcgctccgcgcttgatcgggttgtccccggatgggctcactatatgaaacccgcccgcgaaaaacggattgtttttcttaacgcaggtgaagtttttactcccacgtttgccagtgcggaacatacgcttaaagccgtggaaaagtgggctaagtcgaagcaataacatgatcttgctcgccagagtctgctcgcattcaacctatttttatacttgtacctattaacagcatttttcaactacgtgaataaactatgagagaattaacgtcaatgcaggcagcttactgggtcgggcgtcatgttcaagccgatctgggaggcgttgccgcgcatctttatgctgagttcgacggcgatgacattgaagtgagtcgatttaaacaggctctggaacgcgtttgttctctacatcctatgctaagactctgtgtcgatgctgagggacttcagtctgtgacttcatccggtgagcaattatcgctggaaatcgacaattttcgcggattatcagaacaagaagtggaaaagttacttctcgttaaacgcgcgaagtggactcatcataaacttgatctttcttctggtcaggcatcacggttctcgctcagtctgctaaatgacggaaaatttcgcctgcatattgatacggatatgatagctatagatccttcaagtttcaggatattaatggaagatctggcgatattttatgataatccagaccagccagccccggtagtagcatcatatttcgaatggtgcgatcaggtacgcaccgatccccacctgaaagcggcccgtgaaagggatagaatctggtggcgttcgcgtattccacatattccaccagctcctgctctgcctattaacaaaactccgcccgatcaggttcacagccatcgtctggcggcatggctccagccagacgaacgtcaggcgctgaaaagacttgcccgtatacacaagataaccatgtcgagcctgatgctggggcttttctccattattcttggaaggcataccggagataagcggtttcgcctcaatgtgccgatgttctggcgctctccccatgtgaatgatgtagaaagaattgccggcgatttctctaacgtgcttatcctcggcgttgatataaatagagctgaaagccctgctgaccttagtcaacagcttggcgagcaactgaccgatttgctcgctcactcagcttatccgggggtgaatctgatgcgtgatctttcccggcatcatggtgcaacgcaattaacccctgtcgtcttcaccgccgctttggatatgtcgggagaagaacttctctcagatcgcgtcaggcaagcatttggttctatgaactgggttatttcacaaggcccgcaagttgcacttgatgcacaagtggcatctgccgatggcggtattctcatcaattgggacattcgtctggatatactgccagaagcatggataacctcaatgttcgacagttttgtcagtttcgtccgtgaaatcgccacacacccacaacgattcgatgaagcaatacattcttcacccaataacgtcgcagccctatcatcaataatcaggcgcaaatccgctgattccactgcgcaaattgatctgaaaaacaatattggcctgaaaaacaatatggaaaagatggataacacggaaaaaccattaacccctcttcaactggcgtatctgcttgggcgacgggcagaattgccgctgggtggcgtcgcgatgcaagagtttcgtgagtatcgcggaagcatggaattggcgcatttgcgaaataatctggagaacatggttcagcgtcatgacagtttgcgcacccgaatcgatgccaagcgacttgtccaatatgtttgtgcagatgcagatatcaatttacaccaagtcgacctgagtactatgtcacgggaagaggctctccgccatgtagaaaaccaccgtgaagaatatgcccatacactttgcaatttggatcgctctccgtgggatataacattatttcgtttaccagaatgccgtttgccaaagaatcagttagaaaaggatgagctgattgcgtttgttcgttttgacgcgctgatccttgatgggcgctcgatagctgcgctgatggtagaacttttcgagggcaaggtttcacttgtcgcggatactgatgcctccttgaatgagagccatatctctgaaaagcgcaaaacagatgaagcgtattggaaaacaaaacttgatgccgtcagcggcgccccaagacttccgtggataaaaccattggtgcaaataggcacatcacgctacgcacgacaaagcttgattgtaacctgtgaagattatgccgcagtatcaaaagctggtactaagcaaacgctttttaagaattccactattatggcactagtgcttgaggttctgtcccattggagcgaagagaagaatctatctatcggtattcccgtggcaccgcagatctctggtgttttgtgtaatcgttcaagttttattgtggtcaactgggatgctgagcagggaaacatttctgaacgggccagcaccctacagaacgatgtgatggaaggaattgaacaccttgcattttcaggtatagacattacccgtatgctggttgaaaaaaatggtgctggccctgttttacctgtcgtcattaccaacgggctttcatggccggtatcaggtcaggatagtggtatgcagttgcatagcggtctgactcagacaccacaagtcgcaatggatatccgtttttcaaccaatgcggacaaagagcttatttttgacattgattatgcaacttccgcaattgaacccgctttcgttcaggacattttacgggctctaagcaaggcgatacaaatcatcgtaacgtcaggcgtattcaccctttcagcgcagaatattatcgatacagaccactatcgattaaacggtgtcgaagctgattttcactgcgggcaatttctcagccggatagccgccaatattttcgacaataaaaacaccaaaacggcactcatctgtggtgacagacatatcagctacgctgatcttgggcgtgatgtacgtcgaattatgggcgctttcagggagaaagggctttccgagggtagcattgtcgccctttgcctgcaccgtgggcctgagcacacagcagtcactctagcctgtgcattaacaggggtgatctgggttccgatagacgcagactccccctccgagcgactgcattatctccttgaaaactgccatccggatcttgtcgtaacgacaaaaagagaaggtattgaacatccggctgaaatgcctgaaacactcttatctgccgaacctttggcagaactcccacttccgcttgacgctctctcatcaagtgaagcgcccgcctattatctctacacatcagggacaaccggaaggccaaagtgcgttgttttatccaataaatcaacatcgaatgtcattaccagtacccttaaagagtggtctgtaacacatcaggatgtcttcatttctgtaacgcctttacatcatgatatgtcggtcttcgacgtttttggaagcctgaccgccggtgcaacactggttcttcccgctgtcggtgaagaaaaggatgctctgtgctggaaccagttagttgccagacacaaggtcacattatggtgctctgtgcctgctattttggaaatgctcctcgcgtgccgtcagggtgatgaattgaaaagcctgcggttgattgcacaaggtggcgattacatcaaacctgctgtgattggtagcttgcgtacacttctaccgtcagtacggttgatttcgttagggggaccaaccgaaacaactatatggagtatatggcacgaaattgggcaggatgatatcagccagatcccttatggaaagcccttgcctgctaacagctactttctgttgaacgagtgtggtaatcactgtccggtgggtgtgactggcctgattcatacggctggcgtcaatgtcgcactgggttatctggaaaacgggaagctcacccagaccaattttgtcaccatcagggatactaacggagaaaacatccgggcattccgcaccggcgatcacggacactatcgtcacgatggcatcattgtttttgacagccgtgtcaacggttacatcaaagtgcgcggggtgcgtatttccttgccggatatcgagaatgaactggttcgtcatccgtcagttaagcacattcttgtggtggattatggcgatgaaatgcatggtgaaacctccatcggtgtactttatgtaccgctaaaagaagatgccctgtcaggagcagaattacgcaaatatgccagccaatgtctgcctccatcacatgttccaacacggttcgcacaggtcaccgaattaccgctctcgccaaatggcaaacctgatcgccctaaagcacgcagtctattgatggaatctgtgcatgaagcatcgcctattcgacacaattcttcccctgagcaacaaacagagatagaagagaccggaatgaaaaagaaagtgctggaaatctatctggacgtgctcggccaatcacgggatagccattttgatgtttccagcgacttcatcagcatgggattacgcccccagcatctgaagacaatttcggcacgaatctccgaggaatttgcgattggggtttcgttaccacaattgctacgttgccgtaatgccgcagaggttgaacagcaactgaacgcatctctgcgcttttgaaaacagttcggattattaacatgaataatattgaccttatcggtattggcatcggccccttcaatcttggattggcggccctgctttcgtcacactctaatctgaccagccttttcctcgatcgcaagcccgagtttcgctggcatgaaggtcttctgctaccggggacaacgttgcaggttccatttctggccgatctggtcacgatggcagaccctacacaccctctgagcttcctgaattatcttcataagcacgaccgtatttacaaattctattactatgaaaaatttcagatcccacgtcaggaatatgaccattattgccgctgggtgacacaacagcttccctcctgccagtttggtgaaaatgtcattgatgtggcttatgacctaacatctgaatgtttcattattgaaagtaagactcacgcgcgttcgacacatcagtactatagccgtaaccttgccattggtatcggaacagccccgttcctgcctgaatgggctaacatccaaaccaaagcacctattattcattcggctgacttcatcaacaaacgagcacaactctcaacatgccgacgcatcaccgtgattggttcaggccaaagtgctgccgaatgcgtgctggcactctatagtgcactgactcctgaaatgatagaggacggtgcttcaatccagtggatcacacgctctgccggttttcacccgatggaatcatcgaaactcggtcaggaatgctttacgcctgcttatatgaaccatttccacagcataagtagagaaaaacgccgcacgatcgcatcgggtcaaggggggctttataaaggtatcagcgtctcaactatcgcagatatcttcgatattttgtatgaacgttccatcggcggtcgtgatccgggtctttcgcttgtttcaaactgcgaggttgagcaagtggaaaatagagaagactccggaacactacagattgtttttcgtcatcagcagctcgatgaagtcagtttcattgagactgacgccattattgctgctacaggttataagcacacccgtcccaaatggctagaaggactcaaacaaacggtacttgccaccgatgattacggcgatttgattgtgaaagaggactttagcgctcaacgcattgacaagggaaaaggtcttattttcgttcagaatgctgagatcttccaacacggtattggttctcccgatctgggacttggcgcatatcgtaatagcattattgccaaccagcttcttggccgagcgtattatcgcttacctcaaaactcatcattccagagctttggtctgcaagagcatcacaatatcggagataaaaatgacgttatcccttgccgataaggacaggctagatgcattttggtatcactgtgttaaaaaccagcatttcaatatcggttatcctgaatcctcagactttgattactcttacttacagagattcatgcagttctctatcaacaattgcggggactggggggcggagtgcaactatcttttaaattcctttgagttcgaaaaagaagtcatggaatactttgctgagctgttcaaaattccttttgaagacagttggggttatgtgaccaacggaggaacggaaggtaatatgttcggctgctatctgggacgagaattattcccggatggcacactctattattcaaaagatactcattattcggtggcaaaaatcgtcaaattattgcgtatcaaatcttgtttagtggaatccctacccaccggtgagatagatgattatgacctgctacagaaaatcatcgctcataaagaaccccatcccatcatctttgctaacattggcacgacattgcgcggggcggtggataacataaaaatcattcaacagcgtatgcagcaagcgggtatcccccgcgagaattactatctgcatgctgacgccgccttaagtgggatgatcttgccatttgtagataacccgcaacccttcacctttgccgatggtatcgactcaatcagtgtctccgggcacaaaatgataggctcacctattccttgcggaattgttgttgcgaaacggaaaaacgtcgaacgtatttccgttgatattgattacatttcggctcaggacaagactatatccggttcacgtaatggccagacgccactgatgatgtgggcggctattcgcagccactcgtttaccgattggcgtcaccgcgtcaaacgctgtctggaaatggcacaatatgccgttaagcgtttccggtctgcggggatagatgcctggtgtcataacaactctattacggtggtatttccatgcccgtcggtcgctgtctggaaaaagcattgtctggcaacatcgggaaacacagcacacttaataaccacaccacatcatcacgacagtagtaaaatcgatatcttaatcaatgacgttattgctgattcccgccagatagttaacgtgcgggatgttgtatgtgagcagtaaaaaataacagtgaggctgattattttcaggctatgcagcattaaagacgcagagaatggttcatccatcgataaaaccgtaacctgactgctcgtcagataaacgataacagccaccatttttctgctgtgttatggatagggtgattttggtattctgcctgaaccctaaccatgtcactgcaattttttttatatataagataactgaaggagcttttggtgcttacagcaaaaaatctcaccgcaacttacggtaaaaaaaccgtattgcatgatttgtcagtagattttgctcaaggacgcattaccgcactcgtcgggtctaatggctgcggtaagtcaacactgttgaagtccatcatgggcttcattccactgaaaagcggggaaatttttctggaaggtaaaccgattgcagggataggccgcaaagcgctggcccgaaagatctcttatctgccgcaggaatgccactgcccggactatatgacactgggagagttgatcgaactggctgcttgtggacgccattctcttttcggcggggcatctgcgcgggatcgcaaactatttcatgatgtgctagaaatcgtcggcttggctgatcaggccaattctcaggtcagcgccctttcaggaggacaacgccagcgggcctgggtagcgatggtgcttgcacaggacactgacatcattcttatggacgaaccagtcaatcacttagatatcaaatatcagtacaccgtgctaaaactgatccgcgatctctcactccagcacggaaaaaccatcgttgtagtgttacatgatttaaatctgacaaccacttttgccgatgatgttgtgatgcttaataccggtaacgttgttgccgcgggcgctgtgagtaaaacaataacagtagataatatccagcgtgtattcgatattccggctgatattttcagttataacggcagccttatctgtcagccttatccgggtataaaccatcctgaaaattggtccggagtataacgatgaaaccccgtctattctttatattcgcaccttttttattactgctgatcttcttttttagtctttctttcggtgtaaatattgcttcattttcgcaaatttactccgctttaacccagtctgaaccacaaaactatgaacaagccgtgattttataccagcggctgccacgggcgctgatctctgtttatgtcggtgcggtgatggcatgcagtggtcttgttttccaggggcttatccgcaacccgctggcttcttcatcgacattaggcattaatgccggtgcaacattgtttgtcgtagctggtgcaatcgtgttttcgctcgacttaacatcacaaggtatagcagcccttttaggtgggctatttggttttttatcatctcttttaatatctcgtctgtcgggtgttaacgctgtttctcgcgacttactgctgatactggcgggcacattaatagcgatgctttatcttggggtaagtaatgctgttcttcttgcttatcctgaaacgcgaaccgaatatttaagctggctagcaggggctatcaatcatgtttatatcacaagactgcaccatttctggtggttcgggctgctggccttaatcgtgcttttattactggcacgtccactgacgctcattttgctcggttacgaaaaggcgcattcgattggcgtgaatgcaacgcttgtttcgcgcattgcattaattgcagccatagtcgcatccagttctgctgttgccatatgcgggcctattggtttcgtagggctggttgtaccccacattgtcaaacctttggtcggacagaactttatactgtcgctgccagcctgtgctctgacgggggcaagtgtctgcctgatcgctaatctttgtgcgcagacactcttccagccttatgtcattcataccggtattctgatggattttctgggcgggctgtttttcatctggattatcagaaagcgctatctttcaacaacatcagcgagattgttatgaagttcggtcaggcaatagacggaaaaagagtattacgtttcgcaaatggattacaaatgcgtaccctcgatataaaagtcgggttatgtctatttaccattacgatcatactcatcgttatttctttaagcgtgggagttacggatgttggtgtatatgaattcttgcatatgcttttcggtaattcgctggaacaccaccagttttatgcactctgggttgtacggatcccgcatattttattagggctgatggttggttggtgtgcggcccttgccggcgctattcttcaaccaattgcccgcaatccattggccgaccccagtctttttggcataagtcagggttctatgacaatgatcattatcttgctggcgttcgttcccaccgcacctaacatactgatcgtccttgctgcactggctggtggactggctgttgcattgtttttgactttactcatcggcaataatcgcgcaagtggcttggcaattttactgatggggattgctgtctcgtccgttctcggttcagtcagctcttttcttattctctatcttccaacagagttatccctgcatcttgccggatggatggaaggatcattgtttcaggccagctggtcagttatcgcatcattcatgccattattcttattgagtattatcggcattttgctcatcggccctgctttaaatcgctatgaacttggaaacgaacttgctttgtcccttggagagcctatcaaatattcccgcccgatgctgatgggattctctgtcttattaagcgctgcatctgtcaccgcagtagggccattgagctttctagggatattggcaccgcatctggccagttttatttcatcggctacaggtcgcgcccgtttgtttctttccgctctggtgggcggcaatctagtcattgcggcagatatcatgacgaaagcagcaccagcaggcgtcttcatccccattgggttgagcttcacacttattggtgtacccctgttcatcttgacaatgcggcttcgcgcactgcgtaaacactaaatatttgccgtatctgttgtggagtggtgtccatcattcacccatgttccgtttaaaccgccactgaaaaatcttcttctgagaataaaactttcagtgacggttttttctatttttggaaaaaatctcaggtgtgaccaattattttcaaccccataatttcttaaactttatttaagactaaatttatatatccttagtttaataaccaaggatatataaaagtgaaattagcaattccatacgtcaacaaatcattccttcaataataaaaccttaatctgtaaaatacttaattaacaagtgagggctagggcttcctatttcattttttaaaattaaaactttcatcattctcagtaaaaataaaataattaactccagttacccgccccataaccatcacctactaccatggaaagagctgcaccttggaaagttccaagaaaagaaccatcttcactgtagaaactcatagttaaataatcgccagctccgaaaaaccaaaaatttgtagtatcagaaaaaagtttagctaaattatttgtcaaaaaccaaccatcttgactataatattatgatgactgttttatctataaagttcaacttcccatttaccttctacttttttaaaaaatgtttaatcatttatagatttactttttctttttcactcataaaaccacctatatattgtataaaatgcaaaaaaacaacactccaaaatataaaaaacattatcactcctcattagaggccatttttaatagtagcacccccatctatgtaataaattacccaaaataaaataagcatcattaaatttaatggaattttcttgataaagaataattcaaacacattacaataacagtatggataattaccaacaatgtactaaatatcatttcattatattaaacatatttttatacataagtgattatatttctatttcatgactaaaatttagaaattttaatccatacttataaatttgccttaactttctcataagaaatattttttaatataacaattagtaaatctctctattgaaatctaactcatatactgactatcttattaaattagataattaaaacatattatctattgatctttttaagaaaaaagttaatttctgttatgcagaaaagtatcgcctttatataaatcagatttaaaatactaaaggagatcttcatgatagataaaaatttagcctgttctgaaataaaatcccttccgtggagaagtgatgatgctccattattagttgttcttgggcagtcaaatagttacggtcatgctactcaactggcaccaaatgaagcaattactcagggtttaaataatgtatttaccctgtccctgcctgaagtttatagcgtcaatttttcaaccattagctggacaggcctgacgagttttggccatgccaatattggtgctccgtgtggtttaccgcgaggtaatcaggatcatccggttaatatcgccaatcgttttgcccgctattggcaaaatcatattaacaccggtaatattctcaaattacctgatctttatgtcattctcatgggatacggtgggcagggaatgtatttacctgatactcctgataaccgttgggcgccagagcgggaccctgatgatgtagaatcactctacccccgcgcagtcagaacattaaggatgacggtgaattctctgcgtaaaatgggtaaaaatccccgtatactggccgttcactggaatcagtgggaagcagaaactgaaagtttaaccgcagcaaaagcagaaaaaatgaattttacccgtatcgttgccggtctaagtgatgccataggttcccgcaatataccgtggaaattttattacccgctttcagtctggtttgaccccattaataccagttatgtttccgaagcgataaatagtgtgattgcggctaatcctgagtatcgtacactcgtcgatgccagaaatgcaccaaactataacgggatctccacccaatttggggtatttactcccgatgatatgcattacaacgcagaaacccaaaaatggtttgcccgacaggaatgggctcagattctggctggttataaaggtgttgagttatagaatgtatctatactttccgtctttcagattgcctttttgttggacataggtggtgtaaaaataccacctatatttccacaccaaaccgctgtttaagtgcccgccttcctgtctctgtcaacgttagttcccgactatccaattgccggatagcccattttttctgcaaaaaaatattcagcagcgatgaacccagaaaaccactaaggtggaaatatcgttcactccagtcaagacaggagcaggcaaatttccgtccggaaattgttttctcatccaaactcaggccaagagaaaagaaaaattcttttccctgtggcgttaaacggtaatcatccgttatccaaaaacgggacaacagactgttatgaatttttacggcgatttctccggccatatggtcatagcaagttcggaaagaacgcaatgattttggtgtcgatgttttaataaccccgaagctttcgctattaacaaaacacatcatgctttccagcaatactgcgacttctttactataaattttaaaataacggtatcgcccctgcttaatactgctcaccagattttgttctactaaccggcttaaatgcgcactggctgtcgaaggtgctatatcagccgcggtacttaattcagtcgctgtgtaagcgcgtccgtccatcatcagaaatagcatacagatacgagcacgatccgataataatgcagaaactacagtgacttttttctccagagttaattcacacatatctatcccatacctgatacagccaacaaagaggctacttgaaaaacgaagagtatatttcgctacccaacgaagtaaccgtcaaaacggcaatatatgattacgttttctattcttcaaggaaacgataatgttagcagttatatttgaagtcgaaatcgcagaaaaccagagtgaacgttactttgacaccgcagccatgctaaggccactactggataccattccgggctttatttctgtagagcgctttcaaagcctgtctcaaaataataaatatctttcattatcctactggcgggatgaggaatctgttaaacagtggcggaatacctgccagcaccgggaagcacaaatattaggacgcaatggggtatttgcagattataaattgagagtctcagccattattcgtgattatggcatgtatgaacgggaagaagtgccaaaggaaggttaattctgagctatcgggagatcggttgccagcatctcccgatatactcgccaccttttaagtcataaattgtattagccacagctaatatacagcaaatgagcaccccattaatcggccgaagaacatccagtaccagtatcctattgcaaatcctgcaatcaacatatagctgatcgatttgaatttacatactgaaaaaagttttactccttttacgataaatatcagcagaaaaggcagcaaaaaaaacagacataaa

SEQ ID NO: 332 - DNA, 15826 bp, Xenorhabdus sp.
  CDS (10655)..(15826)
  unsure (1)..(15826): unsure at all n locations
gtgctctaaagtggtagccaaactgggccttccgcccaaatagccggagaacagagtaattctaagtatggtttcattattattactcctttatattcgcagtttttaaataaaaatacagaaattaaatctgaatgattttgtttcagtttcgactaagtaagctatggtgttctaatatttttataattctttctttagggatggaataagatgtatttccatttctaccaaccatagtttcagctgcaaacatggcattaataatggcttcttctgtggcactaaccgttgcctcatataaaggatcaagtttgtcatttggtaatattttaattgtttttatatcttctctggaaaatgcatcgttattcgcggtggagaatgcaataaatatttccccgctggtatttctggccacgccacctactttggcaagccctagagagactcttttggcgattttctctaactgatgaggtgctaatggggcatctgtagcaacgacagcgattatagaacccgcatcctttatttttttcttatctccatgatatatcggcatgaaatcctttatctcttgaccaaccggaatcccagcaataattaggtcatctctgaatccgaaattcccctgaaccagaaccccgactgtatatccgccgtcttttttatctaaaactcttgatgaagtccctgtacctcccttgaaatcaaacagattcatgcctgttccaccaccgacattaccttcttttatcattcctgatttagcgctatccaatgcgtgatagacatgttctttttttacatgcataccatttatatcatttaatatcccatcccatgtttctgtaaccacggggagtaaccagaataagtcatccttaagtggtgataccagatggttatcaaccagccagctgatggctgaatctctgacaacgccgacactgtgcgtattagtgattaatattggtgtttccagaaagccgctttcctgaacccattggtttcctgtcatttccccattcccgttcaaagagaatatgccggagaatactgggctgaattttttccctctgggtaatattgcggttacgccggttcttatcggccctttccccacttccagttttccattacctttgatcatggttgaatacccaacagttacaccattaacatcggtaattgcattatattttccggttgtgccagaaaaaggaatgccaaaatttctggctctggtttcactattggcgaaggaaattgaagttattattattgagataaataatgttgccatttttatggtttttatcataaatactccttgttgtgattaattgattatcactattttattattcacttatggaagtatttaattaaatcatgatttatatcaatgcacagtgctataaataatcatgcggctgatgctatttgataatgtcattattttgctatttaattttaaaggtgtaataaatttatttaaaattacaccataatttgaaataaataagaaaagagaggtaaatttttattattttggtatacctatcagtaattgatcatcagatataacaagagccttatttgaaaggtaatcatcacccagtaacccgtcaaaatttattttttcatcaggtacctgaaaaagaaatgcagataattcaatgccatcaggtgtcacaatcgttcgttttgggcataataatgaaaaatcaacacagccctcctttgaacgggtaaaaagtacagtatggctggcacccgtatcaataaccatatgatttaactttttattaccggacgatacactcacctctattccgtaatttttacgagtgaatggaatatttttccagtgataaccgtcaggaaggtttttagcattatcggtaattgtgagcatctttgaaggatagtcgataatcagcgtattgtttttgacaacacccagccccaataagccattaatacgaagctgcccattatcatctaacatgccgtttccccacggctttaatacttcaacatcaatgcctgaaagttttttaccattcacagtaatatcaactgcttttgctactacattatccaatgtttcattaccaaaaatatcaacagaacgagatgtttcaatgttatggtcgcgcgatgtgaaaatagaatcaaagacagattggggcagataaagagcactggatgcacctgtatcaatttcaattttgtcaatttttttaccattgatattaagtgatacggaaggtgtttggcgatcaaggtaaacaattggggctgtgatatctgcttttgcagttttagcagagactaccgtgaaaaatagtgctgctatacacatacccagagttctatttagattccgaaaatccgatcttttctgcgatatcattttttcttttctcctatcccattagtcagatgaaaatataaattttacttattattattttgcaggattaatataggtcattagaaaaaattacacaatgatattgaattaacagaaagaaatatcaattgactggtattcttgttcggtattgctaggcttcatattagaactccatatacattaatgttttacattccctctccaattaaccaacaaaaaaacatcagagaatacaaatgcatgactacggaatctggacgattgttacacctgtcgtcaccatcatattagccattctaacccgacaagtgatgctgtcattgatgctggggattctggttgggttcacggtaatacacgatcacaacattatattgggaataaaaagtacgctcgagggagtaattaatacttttacgtcatcgggaaataccaaaacggttatttttatgataatgattggcggtattatgcggctggttactgtcacgggtggtgtacgggctttggttcaactattaactgaccgaactaaaattattaaaagtaagaaaaacgtacaatttctggcgattattatttctgctcttatttttatcgaaagttccatcaaccaattagtggccggtgcatcgaccaaaaaccttgccagaaagtatgccgttcctcctgaaaaaatgtcctacctgattcagactgccggtgtttctgtctgctcgctggcaatgattaatggctggggcgctgtcatgatgggaatagtcggagtgcaaatttccaatgggctaatttcaggtgagccttttgatattgttatacattctctgggatataacttgatggcctggctctcacttgccagcatattattttatatttttaccaatgtgtcctggggtcccatgaaaaaagcagagcagaatgctttgcatcaacacaatacgccagtactggacagcgaaaagacagaatctgatgaagttattgagcaccctaacagtaacagtgttctgaatttttttacccccattctgtcaacagtgctgatggttcctgtcgcactctatattactgacgaaggtgatttcagcaaaggcagtggctcaacatccgtttattggggtgtgatgtttggtacggttatttctttcttttggtttttaggccgccgagttttatccattaatacctttttcgaagaactttatattggttatgccagtatgctgaaaatcagttctattatgattctggcattcttaatgggaacagtttcggctgatctgaatacgggggcttatattgcacagatcacacatggtgtactccctgtcggattttcggtaggttttatctttgtcatcagcgctatcatgtcactggcaaccggcacatcatggggaacttttgcgattatgatcccgattggtgtgcaacttggcctttcggttgggatgccggtggaatatatgattggagcggccatttccggctctattttcggtgatatgacttcacccatttctggtgatgcgatagtggcgtcaatggcaacagattgtgatcatatcgaacatattcgtacacagatgccctatgctcttgtgacagccagtattgtgctgagtatctatctctatttagggtttacttactgagtactttttcgggcaaaaatctggcggctttaccttataaaccagccgccagataactaactaataatttgcggtcggccagtcaatataaccttctgctccggaaccgtagtgggtattgcgatccagacccgtcagttcaatattataacgcaggcgattgaccagatcagggttagaaataaacggacgtccaaatgctactgcatcaacttttccttccgaacggcgggaaatggccatttcgaagtcatagttattattaccgatataagctccttcaaacagagagcgtaaagcatccaaatcaacaccttcaggaatcagacgatcttttcctgttgttccttccacaaaatgtagataagccagtttgaatgagtttagttgtcggatcaggtagctataagtcgccataacattgctatcaagtggagtttcaccgacttcggttgtcactggtgataaccggatgccaacccgaccgtcaccccatacaccggtaacagctttaaccacttccagaaccagacgaacccggttttcaatagagccaccgtattgatcggttcggtggttggttgaatcacgtatgaactgctccaagagataattgttggctgaatgaatttctacaccgtcaaatcctgctcgtttggcgcattctgctgcgtgtctgtattgctcaataatgccagggatttcatccgtattcagggcacgtggcatcgaggcttcctgcaagccttttacggtataaacatttcctgctgcttttatagcagagggagctacaggcgattcaccgttaggttgcagatcaacatgggaacagcggccgacatgccataattgcatcaccatttttccacccactgcgtgaacagcattagtgatttttttccactcagttacctgttcttcagtccagataccgggggtcatggcatatcctcgtccctgagctgaaatattggttgcttccgaaatgatcaaaccggcgctggcgcgctgagtataataagtcaccatcatttcgttcggcacaccttcttcattaacacgtgtgcgtgttaatggcgccataacaatacggttagcaagctcgatctctcctaacttaaccggtgaaaaaaggtcggtacgaatactattgtcagccataacatttccttttaataattgaccagtcgtctataaaaagataaaaaaaatgcgactacgatagtagtcgctgggtcatctctatggcggagttaaatggagcggtatctttagctactttagcgacaagaaatgcccccagccataattgatatagtgattcagctagtacgcgaggcgatacatccgctgagatagaattatcgctctgccctgactcaatacattgtgtcagttgatcgataatgtcgacagtacctcgacaaagaatggatctcattccttcggaaaggtcgcagacctcagcccctaatttaacagtcaggcatttgtcttcaggctggcctgttgtctgtatttcagaacagacgcgaaaatagttgagcaaacgctcacgagcggtgccttcggttgaggataaaagcattctggctctggacaaatattcattgaaatattccttcaacaagatctgtccaaactcttcttttgatttgaaatagtaataaaatgaacctttggggacaccggcagcggtgaccagttcggccaacccaacggcagtgtaacctttgtgagcgataattgatttggcaacatccaaaatatgttgccttgtgtctgatgcagattttttcataatgcttttatcataatcataaaactgactggtcgtctagttatttgtccaataaatttcacaactgattatggagatagcataagcctgtttctgatgcgtgactggtaaattttgcttatcacatatcttccttttccatttgttgaggtgtcaggtatggaatcgttaccacttatcagagtattaggaaaaagtgatgttaaagattaccgagaacttcggcttgaatctttgtacatcaatcccgaatcttttggcgcgacctatcaagaagaatcaactaaaagtgagcaggagtttatcactaaaataacgggttctttgattttgggcgcttatttaaataatgaattaattggtgtgattggatttcagcaaaatagtaactataaaactttacataaaggaattatctggggtttttatgtaaaaccgggttatcgtggtttgaaagttggtgaaaaactaatggataacttaataacattgctgaaaaaaagtaacgttaaaaagctatcattagctgttgttgaagagaatgtctcagcgattcatttatatgaaaaaatgggattcaaggtatatgggaaggaacctatctcattaaaaattgatgaagaaaaatacgtcaataatatcttgatgtgtctgttcatctgaatgttaattcaaagccaattatcacgtttcaaaccgttttttatagcgaaacgtgatttttgctgcataagatttaatcttcgtcacgaatgagtgtattcgcagataaaagatctgctgcccgatggcataattctgtaaatatagcaatttcgccctgagacatattcgatatgacaatatcagccatattgtgtttacttgcttcggttcgctgcaagaataccaatcccttcgggcttaatttagtgaccagttcgcgcttatcatgctcactagattcttgtttaaccagctccttatctttaagtgagcgcaaaatctttgatgtttttgagcgggtaaaaccaagcttttcaccaataacgccggggttcatggattgatactgccggagtaaatgtaatacatcatattgagcccaggaaacgccttcagggtttaccatcgttcttcttgcaacaagaacgcactgaagcctgctcaatgcatctccaaaaggtgttatcgcaatatcatgagtgttctgattatccgttttcatataacgcttttctttctgtgattcagctaacggtaaatggcaggagaaaatcatcccgccactgtctaaattttttactcaagttgccgcactattgtgataaatacccgccatcaacaggataaatcccccctgtgcaaaagctggatttttctgataaaagaaatgaaataaattcagcaacttcttccattttagccattcttttcattgggtggcagtctgaaaaacggtgtaatacttcttctggaagttcatttatctttggagtactaacataaccgggggcaactgcatttacccggatattcttacatgcaaattccagcgcagcggttttcgttaaaccaatcacgccatgctttgctacggtgtaaggcgataagccagcaataccagctaatccattaacgagtgatataatttccatttggaaagtatatttaatgtttattaaaaaattcacggggatgatatccgtgttttcagaatgttaatttccatttggaaactataaatgcagaatttcataaacacgaatacaggctgacaatgctttttactttttccagcaccgtttgcagggatttttgttctatcgaaccgatagcaagacggattgcatgtggcacatatgaagatgtagcaaatggttcggctgtggatactgatatatgctccttcattaaggccattgtaacctgatctgcccttactccctcatccagcggaagccagacaaaataggatgatggatggctgatatatttcattcctttaaagacccgtttaacaatgagttgacgtgcctgcgcatcatgacgtttatcttcttctaactgggtgatcattccgttagtgatccactcacaggtaatggcggtaattaaagcaggggtattccatgttgttaccctgattatccgttcaagtacagggatcttttctaccgaagcaacgataaaaccaacgcgtaacccggttgcaatacttttcgaaaaaccagaaacatagattgtggattctggagccagttccgctaagggcggcggtgcattctcgacaagaaaagcataagaaccatcttcaatcagcagcaggttatattgtcgtgccagcgccaccagacgttgccgatgttgctggctcatcacccatcctaatggattgtgtaatgtaggcatggtatagaacgcccggacatgccgatgctgacatagcttttccagtgcatccagatcagtcccctcgttacccgcaggaactgaaacaagttccagatgataagtctttgccagcgctttaaaacccgggtaagtcagagtatctactgcaactacatcaccgggtttcaacatagccataactgttgtggctaaaccatgctgagcaccgctaacaataagggtattatctgtcgtgatactctttaatccccttgttttcagatattgcgctatcaccgttcgttcatgcaaacgcccgccatgtggctggtaacgaagtaatgcttcaagatcgccggaagtcgccagttggcggagggaatttcgtaacaattctgtctgggagggaaaagagggatagttaaaacttaaatcaaccatatctgaagcaacatggtgttctatacccaaatccgcaggtaatgatatttcacggacaaatgtccctctccctgtctccccactcacgagtcccatcgcttcaagttcggtataaacccgggttgctgtgactaaagacatcttttcatcgatagccagctgtcggtgagtaggcaggcgtgttccgggaggcaaacggcccgtccgtatatcagcagcaaatttatcaactataaatttatatcgagagtgtgccattaaaaaaagcctccggtttcagtgcatttctcatgataacgcctgatttatatgcgatttgtacgaaaatgtattcatgacaataatttgattgtcatgaatgtgagcaatatcatgatttatcgttatcacagattggtcagtattttatttacaggcttcagttagatactcgataaactccaggttacaacgggtaatatgaggtgagtccttatatttccccgcggtgcggggagatagacacctatcttgaagttgagttggtatagaatctaattacatgaggtttcagaacaaacatgaaaagtttaaccatgaaacaggatagaacgaacggatggtttaatggctttcttggtgtattgattttcagtggctctttacctgcaacaaaagtggcggtaatggattttgaccctgtgtttctgactgtagcccgggcatccattgccggtttattggctctggtcatcttattagcgctaaaagaaaagcgccctaagttagaacaaatcgcttctctggttatcgtttctatcggtgtggtcgttggtttccctcttctcaccgcactggcactacaatatataacttcagctcactccattgtatttttgggtttacttcctctggcaacagccatctttggtgtatggcgtggaggagagcgtccccgccttgttttctgggtgttttctgtcatcggcagtgcactggttgtggggttcgcatttactcaggattcaagtgcttcactgaccggagatctattaatgctggcatcggtcattgtatgcgggctcggttatgcggaaggtgcaaaggtttccagggaactgggaggctggcaggtgatatgctgggctttactcatctcattacccataatgctgattctaacattgatatatatgccggatacatttaaaaacgtcagtatgcctgcctggataagccttgggtatgtttcactcttcagtatgctgatcgggtttattttctggtatcgcggtttggtgcagggaggaattgctgctgtcggccagcttcaattacttcaaccctttttagggctggctttagctgcaagtttgctgggtgaatctgtaagcttcctcatgattattgtaaccattggtgtagttttctgtgtctttggctcccgacgatttgcaagatagcctccgagcgggtgaaaccatcttcttacctcttgggaaggtggtattcatcgtgttgatgttccttccgtcagttcacacttcagccgtttagttcccccctgctttgataagacgttaatgttacctataaacattaagtaatattgttataactactcgttactcctgccacattaaactgccgatcaagcttcattcttttacctttttggacttacggaacacatgggtaaaacaaaataaacataagaatttttttattattttgtttctgtttaagttcattggtttagttttgattacgtattattaatgccacctccgttggcatcctaatgtgcaagttaagcactatcctcgcgcttgaagaaataatctagatacctttttgttctgaatgaagcgcctgtatacaaaatacaacgctctgtctgtgcctgttgatacaggaattctttcataatcacaagaattatatcaggttttttagttgacagattaatctatgagattctggagctataaaatgcatacacaacgtaaccacaaaccatcatgtggtgaattctcactaagctctactcaacaagttatttggttagaccaaatgactcgtcctaattcctccgattacaacctcagtgtattaatttgtcttgagggggaactggacgaatcattatttattcaggcgctggaagccgtcgtttctcatcatgatgctttacgtttaaaactcattgagacttacgggatgcctcggcaaacgtttgttgagactctcccgcttcccttaacggtatacgatttttcacaggaaactgatgctgaattccgcgccgaacaacagatgcacgctaattttatacgcccgttttgtttatataatgaattgtggcataccggattattcagggttggtgagaaccgttggtactggcaattctgctgtcatcatttgatcttagatggtatgggattaaaactgctcttcaaggagcttttagaacactacaggcatttaacgaccggtgaaaatttgcctgatatagccccttcttatcttgattttattactgaagatcaagcctatcttaattctaaattgtacatgcgagacttgcagttctggcagaatcgatatgaaacgttgtcatcagccctgcttccactgtcgcattcaaggaagccggccacgagtgaatttgctaaacccgtcttttggcaactggataaaacactttctcagcagatagaaaatatcgcagccgctcatggattatctgtccttcattttatgtatgccattttagcttgctattttactcgtattaacgatacagaagagattgttataggcatccccgtccacaaccgaaaaaataaaaaacaaaaatcgacactcggtatgttttcgtcaatgatccctgtcagagtgatcattcacgcggatgattctgttcttgatattatgcataaagtggcgactgagctgcatcattgctataaacatcaacgattcccgattactgagatcaatcagcatacacaaatcaaacaaaaaactgggcgtagccaactttttgatatcgccctgtcatttgagccattcaatgtctgtgtcagtatggaaaatatagccatgacgttaaaaggctcctatcgtggtgtaatgtttccgctttcaattgcaattcaccaatattcaatctccacaccccaccaaattgaaaaggaaaataaacctttcactattgaattcagctacgacagtaattatctgagttatgaagaagttatcacccttcaatcccggctggcactgttaactgaagccgcagtgatatcaccggaaacgaaggttaagcatgctcctctcttacctgagacagagaggcataacctgttgttcacgttcaataataccgaagctgaatttccgcaagatgcgctcatccacgagttgtttgaacaacaagcagcacttaccccagaagctaccgctgtggtatttgaagaacagtccctcagttataacgaacttaaccgccgggccaatcggctagcgcattatctgattgcgttgggagtacagcccgatgatcgggttgcgctttgtgttgaacgtagcccggaaataattgtggggttgttgggcattctcaaggccggggcagcttacgtccccctcgatccccgctatcccacggaccgcttacgctatatgctccatgaagccgcccctgtggctctgttcacacagtccgagctagttgcaaggttagacaacaacttgcctgccgtgctgctggatactcctgcttcatctgcctttgataacatgccggatacaaaccctgattgccgtacccgcgggctgaattcacaccatctggcctatgtgatttacacctccggatccaccggaaaccccaaggggattatggtgactcattgcaacgtcatcaatctgtataccgggttgcaattggtgatcaatttaactacgccatgtcgtaccgccctgaatgccagtattgtgtttgacgcttcagtacaaagttggctgcaattgcttgccggtcatacactggtcatcattccggaggctattcgtgccaatggaacgcagctttggcgttatctggctcatcacgaggtggatctgtttgactgcacacctgtgcagctgcaatggctgctgaatgcggggttaggtaccgatgtgggttatcagccccaacaggttttaatcggaggagaggccatttcacctgtcgtctggtcgcgcttacaacaaatagaaacgccccgttttattaatgtctacggcccgacagaatgtactgttgatgcgaccttttgttcggtggatcattccctgccataccccaacatcggccatccgatagccaatacccgaatctatattcttgatgcttatggtcagccagtgcctctgagcgtaaccggcgagatttatatcgggggggctggcgttgcccggggttatctaaaccagcctgaactgacggcagaacgttttgttgtcgacccttttagctcacagcctaataccagaatgtacaaaaccggcgatctgggccgctggttgccggatggcaatatcgaatatcttggacgtaatgattttcaaatcaaactgcgaggcttccgtattgaaccgggagaaatcgaagcacatctgatgcagtgtccgggggtacaggatgcgattgttattgtccgtgaagatatggaaggtgatgcccgcctggtggcttatctctgtgctgaaacgggtacggaactgctgccagttgatctgcgccgacaactggcacaccatctggcagagtatatgcttccctgtgcgtttgtcattttagatactttcccactaactcctaacggtaagctcgatcgtaaggagctacccgctccggacttatccgctgtgatcacccatgattatgctgcaccaatcggagatgtggaaactgcgttagtggaaatctggcaggatttactgggggtggatcgtgtcggacgccatgaccatttctttaaactgggcggacactctttgattgctgttaacctgattgaacaattgcgtaatcgggggtattcactagacgtatccgctgtctttgctacaccgctgctgacagagatggcacaggcgatacagacagggatggatgtaccgctggttccggttctggttccccccaaccgcattcccgagggctgcacagttattacgcctgagatgctgccactggtgacgctgtcacaaagtgaaattgacaccgtcattgcaactgtaaccggcggggtcgctaatgtgcaggatacctatcccctatcccctttacaggaaggtattctgttccactaccagttgcaggaaaatgacgatacctatctgttaaacaccctgctggcttttgatacccaagcgcgtctggaggctttccttgcggcgctgcaacaggtcatcgatcgccatgatattctgcgtaccgccttctgttggcaggggctgagtcagccagtacaagtggtctggcgacaggctccgttacttgtgacatcatttatccccacgtccgtacagaatattccgtctcagttacaagcgcacatcgctcaacgaatgaatatcagtcaggcacctttatttaccgccagtaccgtccacgatccggccagtaatgagtggctgctggggctgagttttcatcatctggttagtgaccatgtgacactagagttgatcatggatgaaatccagcaattattacaaggagaagtcgagtccctgcctgcgccactgccgtaccgcaactttattgcccaaatgctgaacataccgccttcagtgcatgaaggttacttccgcgagcggctcgccgagattgatgaacccactgcccccttcggcctgcttaatgtacagggggatggcaccgatgtgacggaagcccaattgtgtctggatatcacgttggcgcaaaccctccgcgcactggcccgtcaactggggatcagtccgagtgtgctgttccatgtcgcgtgggcacaggtgttggctcacaccagcggacgtgatgacgtggtcttcggcacggtgttgtcgggacgattgcaaggcaccacaggggccgatcaggtgatggggatgtttatcaacaccctgccggtcagaatatccctgaacaatcacacggtacttgaggtggttcaggcaacggcaaaagatctggctgacctgctggaacatgagcaatttccactcgctctcgcgcagcgttgcagcggtgttatacctccccagccgttattcagtgccctgcttaactatcgccattctccatcaaattccacggataaactaggctgggaaggtgttcgactgttgtcttctaaagaatggtcaaactatccgctggatctgtcggtggatgattttggggatggttttacactggtcgttcaggcagtgaacagcgtcgatccacgtcgggtggtgaattatctgtatactgctctttgtgggctgactgacgcactgcaaaacaaccccagacagcctgtgtgggcgctgtccattctgccggtagctgaacgccaacagttactggaggttttcaatgccacacaagctgattttccgcagcatgcccttattcacgaactgtttgaacagcaggttgcgctaacaccagaggcccttgccgtagtgggtgaggaacacacactgagttatgataaactgaaccagcgtgccaaccagttggcgcatgccctgattgcggcaggtatccggccggatgatcgggtcgctctgtgtgttgaacgctgtccggatatgatgattggtatactgggtatcttaaaagccggtgcggcgtatgtaccgcttgatccgaatcacccggataagcgacgggcttatatcctgtctgacagtacgcctaaattactgctcacccaacagcatttacagccacaggctcagaaccctgatattcctgtctggttattagatgaggcggattatctggaacgggtcgcccaatacgctgtcgctaaccctgaaccggaacaactgggattacagaatcatctnctggcctatgtccatcttaagagcacattggtccgcaga

SEQ ID NO: 333 - DNA, 14936 bp, Xenorhabdus sp.
  CDS (4913)..(14935)
tgcctgatttcatcatttgctgtcagaacactgcaaaaaaatgaaacagagccgataacaaacgagtgagttaatggttttttccgcgctttttcctgccattgccggaacaaagacgcgggataattgatgttgaatttgttggataaggaactccgccacggaatgcgcggtgccttactccactacagaaaacaggaatttgtctgtccatgtctgattatagctacgagcgtaagcgcacaaaaacaatttggatgatactgctaatactgattgccgtatttagtaccgccatcggaggatatagctggtggacaatgaagcaatccggcaataacagtacagaaaaatccaaaaacataagtactccggtattcatgacactggaaccttttaccgtcaatctgatagacaacgaagatcattttgatcgcgttttgtatgtcggcgtgacgctgcgtctgtctgatgaaacaactcgtcagcgcttccatgattaccttcctgaagttcgtagccgtatgctgctgttactatcccgccagagatcaacagatctggcaaaagatgacggcaaagtacgtttagtggaagacattaaacagacactgagcccaacactgatccccggtgaacctgatcaagagatcaccgatgtgttgtttactacgtttattctgcgataatcacgatgagtgacaatattctttcacaagcagagatcgatgctctgctcaatggtgacagtgctgctgcggatgacgtagaacaaactacgtcgtcagtggaaagtgaggttcgtccttacgatccgcatacacagcgccgtgttgtacgcgagcgtttgcagtcactggaaatcatcaatgaacgctttgcccgccaattcaggatggggctgtttaatatgctgcgccgcagtccggatattacggtcggtgccattaagatccagccttatcatgactttgcccgcaatctgtccgtgccgaccaacctcaatctggttcacctgaaaccgttgagaggaaccgcactgttcgcttttgaccccagtctggtttatatcgccgttgataacctgtttggtggtgacggacgcttcccgactaaagtggaaggccgtgaattcacctataccgaacagcggatcatcaatcggatgctgaaactggcactggatgcctatcgtgacgcatgggattccatctttaagattgatgtggaatatgtgcgctctgagatgcaggtgaaattcaccaatattacgacgtctcctaacgatatcgtggtcaccacgccatttacggtggagatcggtgacctgtacggggaattcaacatctgtattccattcgccatgattgaacccctgcgtgaactgctgacgaatcctccggtggaaaatgtccggcaggaagacgggcagtggcgtgacattctggtgaaacaggttcagaactccgaactggaactggtggcaaattttgctgatatccccctgcggttgtcaaaaattctccagttaaaacgcggcgatgttttgccgattgaaaagcctgaacgtctgatcgttcacgttgatggtgtgccggtgctcaccagccaatatggaacactcaacgggcagtatgccctgcgcgttgaacacctgattaaccctgttttaaatgctctggatgaggaaaagcccaatgagtgatgctaaacaacccgcagataccagcttgactgaagaatcgtgggcagaggcgctggaacaacaggctgcacagcttgcctctgacagcggctcgtcaatttttgaaagccttgaaccgcaggatgcgctttcccagctttctgatattgacctgattatggatattcccgtcaagctctctgttgagctgggacgcaccaaaatgactatcaaacaactgctgaaactttctcagggttccgttgtttcgcttgatggtctggctggtgagccgctggatatcctgatcaacggctatttgattgcacaaggagaagtggtcgtcgtatctgataaatacggtatccgtattacggatatcatcaccccttctgagcgcatgcgtcgcctgagtcgttaaccatgatggcgaaccagccttctcttcatacttctttccaaagtggtgcggcatcagatgccgcaccgattggaacagcagtaacacacgctcctcccctttctgccggtcaaacactgatgcaggtcagtagtgctctgggcgggatcctgttactgatatttttcataacttggttgatccgccgtatgggacttgctcctgccaaaaataaaaatcaccggttactcaatgtaaaagccagttgttcacttggggcaaaagagcgggttgtcgtggttgaaatcgaggacagctggctggtactgggggtgacacctcaacagatcactatgttacatcagttacctgtaccacctgatgacacggaaaaggaaaccgtgctcaaaacacttcctttcggccagttattaaaaaataagcttcagcgaaaaaccaggaacgacagggacggcgatgaaaaatagagttttccttatgataggcaatcaaataaaaagccggaaattcgccgcacatattttttctccagcgcgtctggcagctgtgtttatggcgctgttactgccactgtttcccatgaatgcagcagcagaattaccgggcatcatcagtcagccgctggcaaatggcggtcaaagctggtcactgccggttcagaccctgattttcattactgcactgggatttattcccgctgcactgctgatgatgaccagttttacccgcatcatcattgtactgggcttactgcgtaatgcactgggaacaccttctgccccaccgaatcaggtaatgctgggcttagcgttatttatgacttttttcattatggcaccggtattcgataaggtttatcaggatgcctatctgcctttcagtgaagacaaaatctcgctggaaacggcactggagaaaggttcccatcctgtgcgccagtttatgctgcgtcagacccgggaaaacgatttggctctgttttcccgtttggcaaatcaggaagcatttgaaactgccgattctgtcccgatgcggattctggttccggctttcattaccagcgaactgaaaacagcgtttcagattggttttacgcttttcattccttttctgatcatcgatctggttgttgccagtgttctgatggctctggggatgatgatggttcctcccgccacaatatcgctgccattcaaactgatgctctttgttctggtggatggctggcagttattgcttggttcgttggcgcaaagtttttacgtctaacggaacttttcttaaaaagatcgaaaacggtttgaaaaattatgactccagaatcggtaatggcacttggtgttgaagcaatgaaagtcgcattggcgctggctgcgccattgcttttatcggctttgatatgtggtttagtgatcagtctgttgcaggcagcgacacaaataaacgaaatgacgttgtcgtttattcctaaaattctggccgttgtggtcacaattatcgttgccggcccgtggatgctcaatctattgctggattacatgcgcacacttttcagcagtattcctacgattattggttaatcatgatcccgtttgacagtgaaacactttcccgcctcgtcagtgattttttctggccactggcgcgccttctggcattgttcagcatcgccccgattttcagcgaaaagcagatgccgataaaagtccgcatcgggctggcattagtgatcaccgccttactggttcccggtattccgtctccccaaattccgatcttttccgttgccggaatttgggttcttatccagcaagtgctgattggtgttgctctgggattaacaatccagatcgcctttgccgtggtgcgtcatgccggtgaagttctggggctacagatggggctatccttcgccacattttttgacccgaccggtggcccgaatatgccaatcttggcgcgtattctgaatatgctgatgatgctgttgtttctggcttttgacgggcatttatggatattatccattctggcggataccttctattccatccctattcagactacccagttaaattcaaaaagttttctgttactggcgcagagtgccagcctgatatttatcaatggcatgatgctggcaatgccactcattactttattgttagttctgaatttctcgttaggtatgctgaaccgcatgacacctcaactttccgtgttcgtagttggcttccccctgacgctaacagttggcattttcaccctctccctgctgttcccgatgctggtaccatttactgaacggttattcagtgaaatgtttgatcgtctggcagtgattattaattatatggtgctgtaaagagcaccatttttatgctgctaaagaaaaatattacttattcaattcgtctttatttatagattttgttaatttagtaatatttaagacgatacttttagccggacttgccttggtctcaaccctcatctgctattctctgaaccgaaaataacctccgaggctcgctttgcccgagcctcactcctcacagtatcgacacttaaaattaacttttctccaacaaaaaatatcgacatctgatattaatttcagttaatttaatttccttaagttatagttcattgagtattttacatgggtatcaccatccagacttattacgttcctttgcatcaaggctagcccaaggcgatatacatctattttttcaaatggataagaattaaagccggactcttatcaaggagaaatgagaatgttacatgagcactcttcacaaattacctcagcaattcgtgataaccatcaacctatttcgaatacctatcctcttagctctcctcagcaggccatctggtttgatcaggctcttcggcctcactcttacgactaccatatcaacatgtttatctgtgtcgaaggtgagttgaatgaagaaatatttgcccgcgcctttgaacaggttgtttatagtaatgattctctgaatctgcgatttatcagtacacacggcttacctgagcaacaggttgtcaggccacaatctattaccatggatatcctcgatttttcatcatatcccgatgcagaaatccgagtgaaagagcatataaatgcccagttgatacggccatttaaactggatgatgtgttgtggcgaagcagtttactgcgaataagcaatacctgccgatattggcagttttgctgccatcatttgattattgatggggcaagcatgtttatattctctgaaaaacttctcgatacctataaccggctggtgcaaggagaaatgccggataaggttgctttctcttatctggatttcgttagggatgagctaaattacttttcttcagaacactattctcacgacatgcaattctggttacaacggtatgaaaaattgcctcctccactactcaaacccgcccacaccagtcatccaagtgataagccatccacacctgttgccgcacaacccgttatctggtcactggaacaggatctttttaagcgcctggaaaaagctattggcgggcggagactgccactcctgtattttatgtatgctgttctggcctgttattttgcccggacaacagatatcaatgaaattgttataggtattcccctacataaccgcaaaaattcaaaacaaagacaaactgtagggatgattgcagcagtattccccattggcatcaccgttgagccggaagatacttttcatgatctcatggataaagtcgccgctgaaatgcagcattgtcataaacaccaacgcttcccgactgtagaacttaaccgacaactccattcccggcaaaaagcagagaatacgaaattattccatatcaccttatctctggagtcgattgaagttaatttcggcatagaaggacaggataccagaatcaaactttttgacatgcagtccggaataccttatccactgactgtaaaaataaagcaatatacaaataaagccatctctaatactacgcctcctcctatttccattgagctccatgcttctcctgattatctgagccatcaggacctcataacactccgctcccgccttgccgttctgcttaatgccgctatcactacactggaaacaccttccctaacaagtacgaaaatagttaatctgcctattctgcccgatatcgagcgtcagcaggtattagtggatttcaacgccactcaggtgaaatttcagcaggatgccctgattcatcagttgttcgaagcacaagtacaacgcactccgaatgctattgccctggtttttgaaaaccagtcattaacctatgccgagctgaacaaacgagccaatcgtctggcacaccacctgattgcgcttggtatccggcctgatgatcgagtcgctatttgtattgaacgcagtctggaaatgatggtcgggttactagggatcctcaaggctggtggtgcctttgtgcccctcgatccggcttatccgagcaacaggctgatatatatgttcaatgatgcagagcctgtcgcgctggtgactcaatcagcaataacagaaaaatggaataagaacctgccaactatactgcttgataacccgccatattcagttttagatgaaagctcggcagaaaacccgaatattcaggcactgggactcacctcccgtcatctggcttatgttatttatacctccggttcaacaggtcagccgaaaggtgtcatggttgagcatcgcagcctgtgtaatctgataacgactcagcagaataaacttaacatcacgccagaaagcagggttttacaattttcctcaaatagtttcgattcctgtatttgggaattctgcatggcattaatagccggagcgcatctttacctcgccagacgggaagaccttctgcccggaaaaatcctgtctcattatttagaaactcatgccattactcttgcactgttatgccccagtgtactggcaacagtggattctcttcctgcaacgctgcaaactctgctcgtaggaggtgaagcatgtccgcctacgttggttaagcgctgggcgaaaggacgacggatgatcaatgcctatggcccgacagaaacgaccatttgtgccacctttggccagtgtgacagtcaggaagacaaagcacctcctattggctatcccatcgccaatacccaaatttatattcttgataaataccaccagcccgttcctctcaatattacaggagagatttatatcgctggtgcctgtgttgcccgtggctatctgaatcgtcccgaactgactgccgagcgtttcctcaccgatccgttttctgctgataacggggcacgtatgtataaaaccagcgatctgggacggtggctgcctgacggtagaattgagtatctcggccgcaatgattttcagattaagttgcgaggcctgcgtattgagctgggtgaaatcgaagcaaggctacatcagtgtgagggcgtacacgaagccgtggtactgccttatgacaacccctcttgtgaagagtttactgatcaaaacgcaccggatgaatatcgttcagtatcaaaacatctggttgcctacctgctgtctgaagccaatgccagactggaacccatggcgctacggcaacaactctcacaacaccttgctgaatatatgatacccagcgcctttgtgacacttgatgcttttcctctgacgaccagtggaaaactggatagacaagctctgcccaaacccgatcacacttcaatcgtcacacgcagttatcaggctcccgtaggagagcttgaaacagtgctgagccaactctggcaaaaattgctcggcatgaaatatatcagccgctacgatcactttttcgaactgggcggacactcactattagcggtgagtctgatagagcaactgggaaatatgggctgggttatcagcatccagactgtattcgctaacccagtactgaatgagatggcacaagcgatactctcagctcagcaggatgctactcagaaaaatatgaagcaggaaaacatgcctgcattcactgtacccgctaatctcattcctgacggctgtactgcccttactcctgacatgctgactctggtttccctgtcccagcatgagattgatgccattactgctgccattcccggaggcgcggccaatattcaggatatttatccgctcactccgctacaggaagggattttgttccattatctgttgcagcaacagggcgacacttacctgctacgcaatttgctcgcctttgacagccgtgaacgactggacaactttctgtcagccttacaacaggttattaaccgtcacgatattctgcatacttctgtcttttggcagggactggaacaacccgttcaggttgtctggcgtcaggctcttctgagtattaagacattttctccagatcgtcatttagcaaatagtgaagcgaatattcctgaacaattactggcacacactgatcctcatcagtatcgccttaatatcagtcaggcgccgttattctctgctgacattgtttatgatccactacggaatgaatggttactggcattgtgtatccatcacttagcctgtgatcatgtaacactggaaagtatcactagtgaaatcagcgcattattaggcagccatactcaaaaactgtccccggcattaccttaccgcaactttgttgcccaagccctgaatgttccggcctcagctcatgaagactattttcgtgaagccctatctgatgtggaggaaccaacggtatctttcgggatactggatgttcatagcggaaataaagaaatcgcagaggccagacaacctattgatgccaaactagccaaagctatccgtacacaggccaaacgtcagggaataagccccagtatcctgtttcataccgcgttggctatggttctggcaaaagtcagcgggcgcgatgatgtagtattcgggacggttttattagggcgaatgcagggcagcgccggtatcaatcaggcgatgggtttacttatcaatactctgcctatccgggttaaactggcggataacagcgtacaggcgacgattcaggaaaccagcctcagcctgataagattgctggaacacgaacaaaccacactgacacaggctcagaactgtagtggcgtggcaccctctttaccgctcttcaacaccctgcttaactatcgtcatagtcagtcgaaccttacttttaatcaatgggaagggattcgtttgctgatgcaggaagagagaattaactatccgtttggtctgtttgtggatgactggggcgatgggttcagtctggttgctcagagcgtatcagatatagaacccgttcgtctgatcaactacataaccaccgccctgacaggattggtcaatgcgctggaaaccgcaccccatcagccaattctgaatatttcaattttgccagacagagaacgtcaacaactgctggtggatttcaacacaacacaatcctacaaggaaacacaaccttatccgaatttggtatttcctctccatacagctgccatttcccgaccaacgtttattcagcagtcgatagaaaaacaggctcaatacatgcctgatgcgattgcggtgatctttgaagaacagtcgttaagttatgccgaactcaaccgtcaggccaatcgggtagctcattatctgctgaccctcggtgtacgtcctgacaatcgggtagccatctgtattgagcgcagtctggaaatgatcgtaggattgctcgcaattctgaaagccggaggagcttatgttccgctcgacccccaccagccaactgaacgtctggcttacatgcttgaagattcggcacctgttgccctgctcactcaaacatcatttgttaatctcgctcatcggctgaccgatagcataccgattgtcaatctgagcaatggtgaatgtttgctagcagacatgccagacaataatccagaccctgacactctgggtttaacctcacaccatctggcttatgtgatctatacctctggttcaaccggagtgccaaaaggggtgatgaatgaacattgtgctgttatcaatagtttattctgggcacaaaaaacgtatcagttaacgccgcaagatcggattttgcagaaaacaccattcagtttcgatgtttcggtctgggagttatttccccctctgatgtttggtgcccggctgattctggctcgtccggaaggccataaagatccacattatttattgtcagagacagaaaaacacaaaattactttcatccattttgtgccctcaatgctacagctctttctcagtgcgatccccgccggtcgttgtctttctttgcgtcatatcttatgcagtggcgaagcatttccttatgccttacaacagaaatgtctggcctattttgcccactgccagttacataatttatatggcccgacggaagcggcaattcatgtcactgcctggcggtgtgtggcggatcggtatgttggtcgcattcctatcggaaaacccatcgataatatccgtatttatctgctcgataatcagaaaaacccggttcctgttggtgtttcaggtgagctttatattggtggagtcgctgttgcccgtggttatctgaaccgtcctgagttaacggacaagcattttatttctgatccattttctccagatcctgatgcccgtctgtataaaagcggcgatctggctcgatggttacctgatggtaatatcgaatatctcggtcgtaacgattttcaggtcaaaatacgaggtttccgtattgagctgggtgaaatcgaagcgaaactgacgcaatgtcatggtgtacgtgaagcggctgtcattgcccgtgaagacgattctcatgaaaaagccgctaattgtgaaacagcagtgggcgataaacagttaattgcttatctgcttgcagagcctgatacaaatcttgatcccgcaaaactaagggaacaactcgcacaacaccttgctgaatatatgctgcccagcgcctttgtgatccttgatacctttccgttaacatcgagtggtaagctcaaccgcaaggcactgccagtgccggatcaggctgcacgggtaactcgtcattatcaggcgcctatcggagcaaccgaaacagagctggccgaaatttgtcaggaactgctaaaactggagcaaattggtcgttatgacaatttctttgagttaggcggtcactccctgctcgctattcagtttgccacgcgcatacgccagaaactggcgcgggaactaccgttacaggatattttttctcatcctgttctggctgatttagctgtgctgatcgccaatacttctgtgacaactcaaaccaccattaccgcagctgaacgcgaccagctcctgcccctttctttctcgcaacagcgcctgtggtttcttacccgtcttaatagcgaaatcagtctggcctatcaaattccgactgtcctgcatttgagcgggcatctcgatcatgctgcgtttgcaacagcacttgaccatctcgtcagccggcatgaaagtttacgtacccgttttgtactggtggatgaacagccttatcagcatatcgataacgcggataccgggttttctctgactcatcacgatttacgcagtttagatgaaacagcccgcatgagccgcatcaacgaactggttaaaatcgaaagacagacaccgtttgatttcgccagtgaatccatgattcggggccagttactgcaactgtctgataaagaacacgtactgatcctgatccagcatcacatcattactgatggctggtcactgggtatattgctgcgcgaacttagtgcgctctactctactgctctgggagaaaatgagacttccttacccccgctttctatccagtacgctgactatgctgtctggcaacaaaaatggctacaaagcgaggatttcgctgtacaaaaagagttctggcaaaaccagcttcagggagcaccggcattactggctcttcctactgattacccacgcccgccagaacaaaattacacaggggatcatgttcctgttcacttgagtgctgatttgctctctgcactcaaggcgctcggacaacgtcaaaacacaacgctgtttatgacattgctcactgcctggggaattgtactcacccggctaagtgggcagaacgatattgttatcggcacacccgttgccaatcgttcacacagtgaactcgagggattaattggctttttcgtcaatactctgcctttacgtattgaaactgaacagtgccactccgtagccgatttactcacccatgtccgtgagcgctcgcttgcagcttacgctcatcaggagctgccttttgaacagttagtggaaatcctgcatcctgaacgcagcctgagccataacccaatctttcaggttatgctggcactgaacaatacaaccataccatccctcgaattaccgggattatccgtttcattaatggaacagccgcacagcaccgcctattttgacctgacactggcactgagcgaaactcaggatggactcagcggttatctggaatacgcatcaagcctgtttgacagagcaacggttcaacgcatcgtgggttatctcaccaatgttctgacagccatgacactagacgaaacgcaggctattagcttcctgccgatgttatcggttggcgagcgtcagcaattattgactgatttcaacgatattccgccggttcagagtaataatcctgcccaaaaccctgttaccggtttttcacagaatatgttgattcatcagctgttcgaagaacaagtacaacgtacacccgatgcaacggcagtgatctttgaagaacagtcattgagttatggcgaacttaaccgcctcgccaatcaactggcacacagcctgattgcctttggcgttcgacctgatgatcgggtggcaattcatgttgagcgggggctggatatgattgttggcctgcttgggatcttaaaagcaggtgccggttacgttccgcttgatccggaatatcccgtcgaacggctgacataccagctcactgacagtaagcccgtcatattactgacccagaaacatctacaaacacgcttaccgatacaaaatatccccatctggttactggatgatgaaactcatcgggatagtatgcaaaaacaatctgccaataatcctgaccaccagcaaacgggaattcagccacatcatctggcttatatcatttacacctctggttcaaccggaaagccgaaaggcgttatgctcgaacaccgcaatgtggtcagccttattggcgctcactgtcaaattagtgaacccggcccgggagatcgtgtgctccagtttgttaccttcgcatttgatatttcagtatcagatattttccctactctggcctccggcgctacgctggtacttcgaccttcttatctcaaagtaccggacagcacttttgtcgacttcatccgtgaacagaaagttacgatcgttaatgtaccgactgctttctggcatcattgggggcaggagataaaagccgggcgcagcggtttcagttcctgcattcacactctgattgttgggggggataaagtagaaccccgctgtttaatagactggctttcatgcccggaaacagccaactgccgctggttcaacgcttatggcccaacagaaatcaccattactgcgactgcgataatggtcaaccgggaaatgatgatgggcagcaacaatcatatttcccccatcattcacagtatcccgattgggcgcccgctctccaatacctccatctatattctggatacatttggtcaacaggttcctatcggtgtcagtggcgaaatccacatcggaggaatgggtgttgcgcggggttatttaaatcaaccggagctgactgccgaaaaatttgttgtcgacccctttagcaaacagcccaatgcccgtatgtataagaccggtgatctggctcgctggcacgctgacggcaatattgaatacctcggccgcaatgactttcaggttaaaatccgcggctttcgtattgagttaggcgagattgaaaccagactgctccagtgtcagggtatacgtgaagctatcgtgctggcccgcgaagaggattcttactcaaaaacagggcatgataaacgccttgttgcctatcttatcgctgaacccgatgcaaaaccggaacctgcggagctacgccgacaacttgcacaatatctcgctgactatatgcttcccagcgcatttgtaatgctggatgcgttcccactggcccctaacggaaaactcgaccgtcaggcactgcctgtaccggatctgacttctgtcgttacccggacttatatagaaccgcagggtgaagcagaaacggtactggctgagatctggcaggcattattgaggttggaaaaaatcgggcgttatgaccatttctttgaactgggcggtcattcactgatgattatcaacttagttgaacgactgcgcagccgtggctggcgtcttaatatccgtgaagtatttgtcacgccgattctggcggaaatggcaaaaacgatgcaagtcacagaggataatccagcgacattcgccatccctcctaacctgatccctgataactgtagcgcgattacgcctgacatattgccgctggtttctctggcacaagatgaaa

SEQ ID NO: 334 - DNA, 16822 bp, Xenorhabdus sp.; identical to SEQ ID NO: 88
  CDS (8781)..(9134)

SEQ ID NO: 335 - DNA, 16822 bp, Xenorhabdus sp.; identical to SEQ ID NO: 88
  CDS (9139)..(9468)

SEQ ID NO: 336 - DNA, 14946 bp, Xenorhabdus sp.
  CDS (13385)..(14890)
aggggggaatatttttatgatcaagtgcacagtttcattgaaaaacattcaacaccagacaatttttcattcaaccattaatggactgtttctaaaagaaacaatttgagtttaattacacgactatttttgaaaatagatctattttatcagtttaaaaaatgaaagttgttaacaaataaacattacattaactaaaattagaaaggataataaaattaataagggatatttctgacagtaaatatcagcaattagaatggaaacaggaaaaggttattaatatatatttagaaacaggctaatatttccacaaataaaatggaaatattagcctataaaacacacgtaatattactcgtttatattttcgactgaggattcttcaatggattcaagagagtcatcagattcatcaatatcatctgtttcatctgattcaatggatgtcacggtataaggtgttttcttattttctatagcatcaaaaactgtcagaactgattcattttgttcattactgttccgatacaagaagaattgtatttctggcaaacgcggcagcccttcgctctcacccaaaattcttaagtcagcattctgcatttccaaaggacgggcagtaataccaacctctgcattaacagcagagcgaacagcggataaggatgcagcttcataggcaatacgccacggaataccactcatatcaagagtatcaagtgcgatttgacggaaagtgttcgtttcgtccatcacaaccaggggaaccggctcattcacctgtaactggaagtcaggtgcacagtgccacaataccggtgaagaacgaagtacagtactaggatgatgattaatttttgctgtggttaatgctaaatcaatttcatggttatccagcatactttcaataaattgactacgtttaatacgcacatcaacagcaatacgtggatagacagaagcaatacggtttaacaggaaaggaagcagagtatcgactgtatcgtcagacgctcctattctgagttcaccgtctgcatcattatatgtcaatgatgcggtagcatcgtcattagcacgcagaatttggcgtgcataaccaagaagttgaagcccgtgctcggtaaggagcttattacgcccgtggcgagcaaataattctctccccactaaatgctccaaacgttgcatttgctgactaacagccgattgcgttctacaaactgctgctgctgctgctgcaaaagtatttaagtcagcaacggcaacgaaagttcttagcagatcgagatcgaggtttattatctgacgatttgcatttatcattgtttattcatcacttttttttgattttaattactaactaacctggtgtttttacttcagcagtatcaaataaaataataccaattctgacactactctactctattaaagagggcaaaggtttactgcatttttttactacttatatcatcatgggttttattttctcctttcttaacaaaatttatgcaatcactgaattaatggctaagtaaaaacctatttaccttacataaccaccaatttccagtacaaatagtctttttctgacttgcttcaaagaataacataacttcaattcgcaaaacttaatcaaagcaaacaatattagtatttttaatgaattaatacttttattgaaaagtcatgaaaatgttacgggtaaaaattcaaaaagattctcgaagtatctaagataaaaaccttaattaattttatgtcggcaaagataaattataagaatacattatacaaattatcttacttttattgacaattcagcctgcctttatgatttaaactaaaaatcagcatcattccttatcttttaacagttcgtcaactaaaaacacctcattatatggaattaaattccaacatattaaaaacaactagaactataaaccaaataaacacatgtttttagatagcagacttatccattagactttaaaacaaccgttttaaccaaagatatcatgggctcttcaaaagattgacagagaggagtacattgaacattagattttttgtaagccggataaaatccacttttgccaagaaaaaggttaaggcatcctatgttttccattaataaatccagcaaattagataatgtctgctatgacattcgaggtaacgcccttaaagaagccaaacggcttgaagaggaagggaataaagtactgaaattaaacattggtaatccggcaccatttggtttcgaagcacctgatgaaattttagttgatgttatccgcaatctgccaactgcccagggctattctgattcgaaaggcctgtactcagcgcgtaaagcgatcatgcaacattatcaggcgcggaatatgctggatgttaccgttgaagatatctttatcggtaatggtgtttctgaacttattgttcagtctatgcaggccttgctaaataccggtgatgaaatgctggttccggctcctgactacccgctctggactgctgccgtctctctctccagtggtaaaactgtccattatttatgtgatgagcaacaaggctggttccctgatttagatgacatccgccgtaaaatcacccctcgtacccgtggtatcgtcatcattaacccgaataacccgactggcgcggtatatagtaaagaactcctgctggaaatcgtggaaattgcccgccagcataacctgattattttcgcggacgaaatttacgacaagatcctgtacgatgaagcccagcaccattccatcgctgcactggcaccggatctttttaccgtcacctttaatggactgtctaaaacctaccgtgttgcgggtttccgtcagggatggatggtactaaacggcccgaaaaaacaggcgaaaggttatatcgaagggctggaaatgctggcatctatgcgcctttgcgctaatgtgccgatgcagcacgctattcaaaccgcactcggtggttatcaaagtatcagtgaattcattcttccgggcgggcgtctttatgagcagcgcaaccatgcctgggaattaattaaccagatccccggagtttcctgtgtgaagccgatgggtgctctctatatgttccctaaaattgatacaaaacgtttcaatatttatgatgaccagaagatggttttggatctcttattacaggaaaaagtattattagttcagggaacagcttttaactggccggaaccggatcacttccgtattgtcacactgccacataccgcagacctgcaaatggccattgaaaaatttgcacgcttccttggcaattaccggcaaaaataatataaaacttaactaccacctactgaagtaggtgggttagcgcacttcggtgctgacgactgaaagtcgtcgaaccacgcacctcgtaaacgcgcgtaggtcaaaacattaaagtcaaagtcaccgtctaaagacggtggttttaacctgtcatatggaaaaataaattagttatatatttcatacccttcaggatgcagccaataaagctgcagcttgaaggctggtgggtttacttcctcccaaccaacgcccacaatcataatcaccctgtttcattgtaagagaagattatgagccattttttcgcccagttatcccgccttaaactgattaatcgctggcctcttatgcgtaacgtacgcacagaaaatgtttcagaacatagtttacaggttgcttttgttgcccatgccttagcaataataaaaaaccgtaaatttaatggaaatatcaacgcagaacgaattgcaatattagcaatgtatcatgatgccagtgaagttattaccggggatttgccaaccccaataaaatactacaatcctcaaattgctcatgaatataaaaaaatagaaaaaatcgcccaacataaattattagatatgttaccgattgaattacaaaatgattttcgttctattttagatgatcaatatcatactgaagaagaagctaatattattaaacaggctgatgcaatatgcgcttatttaaaatgtctggaagaattatccgctggtaattctgaatttaatcaggccaaaatcaggttagaaaaaacattagaaaaacgccacagtcaggaaatggattatttcataaccgtatttgttccgagttttagcctctctcttgatgaaattagtctataaaaacagtcagatctgcaaaaatcaggcagcttaacattcttattaagctgcctgatatctgttcaatctatttcaaaatgcatcacgtaattattattcattagatttcaagatacttagccaacaaaaatactcagaaaggaaaaagaacaggcacaacagccacactaatagctaagacaaccaaggtaaaaggcacacccaatttcagaaaatcggcaaaacgatatccacccggccccaatatcagcgtattaaccggagaagaaaccggcgtcataaacgctgccgaagccgcgactccaataatcattgcaaaagggagaggagatactgccatctgtttggctgctgcaatcgcaatgggtgccattaataccgcagtggctgtattggaaataaatagcccaataaccgcgcacagaataaataaacagaccaacatggcacgtgggcccatattaccggcaatatccattaatccgctgacaatcaaatcaatcccgccggttttttgtagcgccagtgcaaatggcatcataccaacaatcaggataatacttggccagtgaatggcacgataagcactcaccatatcaatacagcgaaattgccccatcagcaagcaggcgatcaaagcggcaataaaattcggaacttcattggtcagcatcatcgccaccattaacgcaaggcaaaacaaggcatgaggagcctgagatgcggctggtgcagcactttctacttcaacaggtaaattcagcataataaagtccggtgctttagttctcagctcacgcaccagcttccaatcaccgattaccaataaagtatcacccagcagcaaaggctcatcgaacaacttaccagccagagccttaccactgcgccgaatacctaccacatttaatccatagcgggtacggaatctcatactacgcagtgattgccccaataaatccgattcagggatcacggagatttctgccattccgacttcccgggattgatcagaaaaatattcaccgcgtaatatcatgggttctaactgttgctcactacagaattgccgtaaatctatatcactgtcggacatatccaccagtaatacatcctgttgacgcagttctgtctcgccggttgcagcaaccataacccggcgaaattttcgccagcgttcaatgccaattacgttcgccccataacgtgcacgtagccctaactcatccagagtatggcctattaacggtgaattctgccggacagcaagacgccgggcacgccctgataatttataatcacggataagatcgcgaaatgatcgatggtagcgctcatcaggtcttgccggtgttttacttcccagccaacggcggacgagtaacatataaataattcccgccagtaaaattaaaattccgatgggtgtaatggaaaagaaaccaaaaccttgcagcccttcacgcaccagttcgctattcaccaccatattcggtggtgttgcaaccagcgtcatcataccgctgataagaccggcaaaccctaatggcatcattaatcgcccggatgaagtctgcattctggctgccacacttaaaacgaccggaataaaaatggccacaacgcccgtggaactcatgaaagcacccagcccggcaacggataacatcagtaaagccagcatcttagtttcactgttacccgccaccctaaccaaccagtctcccatctgataggccacacccgttctcaccagcccttcaccaatgacaaacagtgctgcaatcaataaaacgttaggatcgctgaaaccgatagtggcttcatttaaggaaagcgtaccactcaggacaaaagcagtaataaccagtaaagccacgacatccattctgactttattagtagtaaaaaggacaattgcgactaataacagggccaatacccacaacagttcagtattcaatacagcctctatcagaaaagacggcctgctgacaggcaggccggagattatcaacaagaacctatactgggagcattaaacctgttttatatgaataattcttcggctcagatcaacaatctatctgattcatttgataaatcgttacataaccgccggatttaacaatttcgatatcttccaggttggtaacagtcatatgaatttcgtcacgacgggaaattcccggttcatcatgaacaaccacaacctgacagcccgcatctaatccggcatggatacccgctgctgcatcttcaaaaaccacacactcttccggcagcagccctaatttttgtgctcccagcaaataaggctcaggatttggtttaccatttttgaccgattcggctgtcacccaatgggctggctctggtaattcagcttctttatggcgggcagaagcaagcgggattgttcctgatgtgacaatggcccacgggatctccagcgcattcagtttatcaatcagagcaatagcaccgggcaaggcagtaataccttccatatcttctgtttcgattttttcaatccacttaaaagtactgataatctcttcttctgtggcatcaggcataaaatggcgtattgataataatgctggtgtgccatgcacatagttcagtacttcatcgcgatcaatacccagcttatctgcgaacttaatccatgcccgttcaacggcaggcagtgaatcgatcagcgtaccatccaaatcaaataaaaaacctctacatttcagctccaaacccaactcctttaaatgcagttatgtgttaataatcagtgtaatcccaactaagttcagatagtactggcgaagataaaaaaatcaaagcaccaattccatttatcttttatcgcattctgcgaatttaaaacataactttaaaaaccaaataaaatcgtacatatgcaatataataatattctgccccaataaactctaaaagttgccactaaaaaactctttaataaaaaaagaattctcagtgacaacttaattaaattttatttccctctaattcaacaatatcattgtaaagaaaaaatctagcatattacatggctagggcaacaccccccaccgccaaaaccaccaactttccacccatgagggcaccgaggaggatcaaaacaattataacaatgagacgcaggtggatcgttttttatgatattaagggcaatgttaatcgaatcagtatcagggtaaaaacgaactgtgtaatctaaacagtttgattcattgcatgtagcattaacatcaaaatattcacatgtgctttttttatgaaaataaacacaccagccagtatcattatagtaatgatccaactcaatagaacaagaatccccatcatcagactctatattccattctatagccttattcttacctatgcagtcacctgaattactatcactaaagatctcattatgtttatcgccagctttcaaagtaataggttgtttatcttctccaaacatacagttaggttgtacgttatctattgttaacgttctatctgaagagttatttttaaattttaatgtgaaattttcaaaacgaccaaaactccctttgataacgtcagtcgcattagcatattgaaataatgatactataataaaaaaatcatagaatataatttcatcataacaattccctcacattaatataaaccaagaattttatgaaattagttttacagagtaagattcaataccactatcgaaaataaattcagcgcattccttccctgataaaaatacaacaagacttttattattcacgcaggcactaatttaaaacaatcacacttcaattaaaaacattagaacaaaaagagcaaccaattaaatttaaatcatctacctcgttatttttttctgcctttattcttaatatcttcttttttccttaaaaaatcaaatgagagaataaaagaaatttaactaaaaccttcacaaaaaccattaatgaatgttagtcaatattaaaaattcataataaagtctttaacaaaatagcaatatccacaggtaaatgcgattacatttatttatgcagcacaatcaatatttatcatctataccctatgaatttcgagttacctcgcggcccacagagaagcaacctgaaagataaaggatacgggtagtataaagaatgaaagagcataataaatgccagctcatcaataaaaattcagggatatatcgggataagatatatttttctggctatgaaaaacctatctaaaaatccgtattaaatttattggacgggaaatttatcagtcaaccgatacaaaaactgtcagaatccacactaacggtttaaatatcatcaagaaatgagttatccagctgtttgaacgcacgtttcagcagttcagccagcgataaatacgttggtgtgttttcaactggcatcattgcgatccctgcttcagcaaatttttcacgaatttcgtaaaaccatttcagcaagctttccggtaaaggcgtcgccgcacgttttcccagccaccaaagcccttgcaatggcaggctacaggcaaacagagcggttgcgatagatggccctagctgcccgcccagtgcgatttgccatgtcagggtaaaaatcgccaatggaggcataaaacggatgccaaagcgggtcgctttaatgatgcgattttcaggaaacacaggagcaagctgtttttccagtggccacgtcttcagatattgttgccccagctggacttttttgaaccaaccgtggttggcaggtggcatcgtattcatcatgacctcaatcaattaaaggtatagtttttaaaaaatacctacaaaagataaaatcttttttgtagtattaatagcattaagtatattttgtctttaatgctggcaaacggtatcctacacagacttttgtgtggttgcagcaacaaaacagaaaacccgcctgttttcgcaacactttggttccgtttgttaataaattgcttctttttttaacatttttcttatttaagattagatcacaacaagataataggtaattccatgtcaagtaagctggtactggttcttaactgcggtagctcctctctgaaattcgctatcatcgatcctgctaatggtgaagaatatctttctggtttggctgagtgtttcggtctgcctgaagctcgtatcaaatggaaaattgatggcgcgaaaaacgaagctgctttaggtgccggcgcagcacacagtgaagcgctgaacttcattgttaatactattctgtctgaaaagccagaactttctgcacaaatttcagccatcggtcatcgtatcgttcacggcggtgaaaaattcacttcgtctgtcattatcactgatgaagttatcgaaggcatcgaagctgcgatcccattcgcaccattacacaaccctgcacacctgatcggtatcgctgaagcgaaaaaagcgttccctcatctggttgagaaaaacattgccgtattcgatactgctttccaccagactatgcctgaagaagcttacctgtacgctctgccatacaacctgtataaagagcacggaatccgtcgttacggcgcacacggtaccagccacttcttcgtttcccgtgaagcagcaaaaatgctgaacaagccagcagaagaactgaataccatcatttgccatctgggcaacggtggttctgtttctgcgattgttaacggtcagtgtgttgacacttcaatgggtctgactccactggaaggtctggtaatgggtactcgtagtggtgacatcgatccagctatcgtattccatctgtacgacgctatgggcatgagcattgaccagatcaacactctgctgaccaaagagtctggcttactgggcctgactgaagtgaccagcgactgccgttacgttgaagacaactacgaaaccaaagctgacgctaagcgtgcaatggatgtttactgccatcgtctggctaaatacattggtgcttacagcgcactgatggaaggccgtctggatgcaatcgtatttaccggcggtatcggtgagaactctgcactggttcgtgaactgaccctgaagaaaattgctctgctgggcttcgagtacgatcacgatcgcaaccttgcagcacgtttcggtaaagacggtgtgatcacaactgataacagccgtcctgctctggtgatcccaaccaatgaagaattggtgatcgctcaggattcagctcgcctgactgcataagtaatagatttccggtagccgccagccatgctggcggttattgcttgactgaccagcaaccgttaaagaggtttccgtgtcccgtacaattatgttgatccctactggcaccagcgttggtttaaccagtgtcagcctgggtgtaatccgctccatggagcaaaaaggcgttcgcctgagtgtcttcaaacctatcgcccagccacgtaacagcggcttccaagacagaaccacaacgatcatccgctcccacaccagtattcacgctgctgaaccgctggctatggctcatgtagaatccctgctggccacgaataaaaaagatgtgttgatggaagaaatcgtggctaactaccacgctaacaccaaaaacgctgaagtggttttgatcgaaggtctggttccgacccgcaaacatccgtttgcccagtctctgaactatgaaattgccaaaacactgaatgcagaaatcgtgttcgtcactgcactgggtactcacactccagagcaattaaaagagcagattgaactgagccgtgcagaatacggtggcaacaaaaacaaaaacatcatcggtgttattatcaataagctgaatgcgccggttgatgaccaaggtcgtacccgtccggatctgtctgaaatcttcgacgaagcaacaaaagcaactgttgccaatgtcgatcaggcaaccgtattcaaaaacagccctctgccaattctcggctgcattccatggagtttcgagctgatcgcaacccgtgcgattgacatggcaaaacacctgaaagctgagatcgttaacgaaggcgctatccagacccgtcgtatcaaatctgtgactttctgtgctcgcagcatccctaacatgctggagtacttccgtccgggttccctgctggtgacttccgcagaccgtcctgacgttctgatcactgcttgtctggcagcgatgaacggcattgaagttggcgcagttctgctgaccggcggctacaaaattgatgattctattcgtgaactgtgtgagcgtgcattcaatactggcctgccagttttcactgtgaatactaacacctggcagacttccctgaacctgcaaagcttcagcctggaagttcctgcggatgatcacgagcgtattgagaaactgcaaaactatgttgcgcagcatatcagcaacgaatggatcgattctctggcagccacttctgaacgtccaaaccgcctgtcaccaccagcattccgctaccagttgactgaactagcacgtcaggctggcaaacgtgttgttctgccagaaggtgatgagccacgtaccgttaaagctgcggctatctgtgctgaacgtggcattgcggaatgtgttctgctgggtgatccagaagaaattcgccgtgttgcagcggctcagggtgttgaactgggtgcaggtattgaaatcgttaacccggcaactgtacgtgaacgttatgttccacgtctggttgaactgcgtaaaaataaaggcatgactgaagttgtggctcgcgagcaactggaagacaacgttgttctcggcaccatgatgctggaacaaaacgaagttgatggtctggtttccggtgcagttcatacaacggcaaacaccattcgtccgccattgcagttaatcaaaaccgcgccaaacagttctctggtttcttccgtgttctttatgctgctgccagaacaagtactggtttacggtgactgcgcaatcaacccggatccaaccgcagagcaactgtctgaaatcgccattcagtccgcagactctgcaaaagcatttggtatcgatcctcgcgttgccatgatctcttactccaccggtaactcaggtgcgggcagtgatgttgagaaagtacgcgaagcaacccgtctggcgcaggaaaaacgccctgatctaatcatcgatggtccattgcagtacgatgcggcaatcatggcagacgtagcaaaatccaaagcaccaaactcaccagttgctggccaggctaccgtgttcatcttcccggatctgaacaccggtaacaccacttataaagcggtacagcgctctgcggatctggtctctatcgggccaatgctgcaaggtatgcgcaaacctgttaacgacctgtctcgtggcgcactggttgatgacatcgtttataccgttgcactgacggctattcaggctactcagcaagaaaacgcgtaatttcctgccgcgttattcttatctgaacaatcccggcaaattgccgggattgtttataaaaccacagctacacatcccccttgcagttcgacattatcctgtttcagatagtgatctttgtcgattagccatttcacaacgcacatttcatacccacaaaccctgatcacatacgttctggcgctcacttaatcaccataaaaaaaatttgcatagatatagttttgttgatttattatttttgccagtcacaacgcttttgagcacaaatcatctcatcagggatcggatttttctgacatctttgatttgtctgtaaaggcaaaaggaaataacgctaaccatataaaaataaagtgaaaattttagtttcaataactattttgaattgctattaggagaaataggtatgccatacaatcacaaccgtacctctgaaagttccttagccattacaagttccgatctgatttcctatcctctcagctcaccacagcaggctatctggttcgatcaagtcagccaaccagatcaatccaactacaatgttggtctttttatctgtattgaaggcgttctggacgaaacccagtttattcacgcctttgaaacggttgttgagcagtatgatgccctacgtttacagctcaccaatacccatactcttccggttcagacagtggctgatcattgccctgtatccgtccccatctatgatttttcatcgcattcagatgcagaaaccaaagcaaggcaatatctcgatacccgatttatgcaaccgtttcacttaaatgaaacgctctggcattccgaattattcaaagtgagtcatacacgtcgatactggcagttttgctgtcaccacataatcattgatgggattggagcgttcatactacttgaggaggttattgatcgttataaccggctaatgaagggagaacctctgaacaaagttgtcccttcttaccttgattttattacagatgatctggcttatctggcctcaccaaactacgcggatgacctgcaattctggctggaacgctatgaaaatccgccatctcctttgctccacccggtgaaatccaatcgcacgatgcagtatggaatgcagcacagtccaactgaacctattttctggtcaattgaccagacactttttaaccgtatcaaaaacattgccaccgaacagaaatcgtccttcttgtacattatacattccgctctggtgtgctattttgcccggacaacggatgtgaatgaaatcgtcatcgggatgcctatacacaaccgcaaaaatacccgacaaaaacacaccatcgggctttttgcatccgtgttcccgataaaagtgaccatttctccagaagatacgttccgtgacattatgaacaaaacagccgcggaggtgaaaagttgctataaacatcaccgtttcccgattgcagagcttaaccggcacattcatattcagcagaaaacagaaataactcaattattcgatatcaccctgtcactcgaaccgtttgaagccaatctacatctggaaggagaggacacccgcgttacctgtgttaatacacaaaatagaaatccttatcccctttccgtcagaatcaagcaatttatagatactgcggctcccgaagatacttttcagtctgccaccattgagttcaaatactctggtgaatatctgactgccacggaagtgacggctctccgctcccgtcttgctgtcctgcttgatgcagccctgacttcaccggatacgccgataatcaatttgcctattttgcccgaagaagagcgacaaaaggtgctggtggacttcaatgccacacaggccgatttcccgcaatccgctcttatccaaacgctctttgaacaacaggtcatactggcaccggaggcgattgctgtcgtcggcgaaacacagacgttcagctataacgaactgaatcaacgcgccaatcaactggcacatgctctgattgtcttgggggttcaacctgatgatcgggtcgccgtgtgtatcgagcgcagtccggccttcatcgtctgcctgttgggtatcctaaaagctggggggcttatgtgccccttgatccggcttatccgaccgaacggttggcgaatatactggacgatgccgttccggtcgtgttactgactcaggccgcgcagcgcgacaaactgcctgataccgtgcctgtatacacactggac

SEQ ID NO: 337 - DNA, 17925 bp, Xenorhabdus sp.
  CDS (73)..(3663)
ctattgaacgaatggccggttttttcaccaaatgtactgacggcaatggcagctgatgaaaggcaaacagttgtgcacctcccaatgctgccggaactggaacagcagcaactgttggtcgattttaatacgactcaggctactttcttaccagcagacaatccgcaagatgccctgatccacaggttgtttgaagctcaggcagaccaatcccctgacgcaattgcggtagtatttgaagatcaagccatcagttaccgtgaacttaaccgccgggctaatcatctggctcattacttgattgcagagggtgtgcgccctgatgatcgagttgcggtatgtctcgaacgcagccccgaaatggttgtcagcttactcggtattcttaaagccggtggagcttatgtcccgcttgatccggcctatccggcagagcggctgaagtatatgctcaaagattccgctccggtaacattactgactcagtctgaaatctatcaggccatttatcccgatatgttatgcgatttagaatctgcggacgctctgccaatcatccttttagatatccgggcaccgtttatggagacacaaccagaacataacccggaagtatccggtataacagatcagcatctggcctatgttatttacacgtctggttcaacgggtgttcctaaaggtgtcatgagcagccaccgggctctgagtaaccggttattgtggtttgtgcatgacgtatggtttgtgaacgatatagtgacacttccgcttatcacagcactgaaaaccagtatcagcttcgttgattcaataacagaaacgctgagtaccctattaacaggggggcggctggtagttttcgacaagcatgaggtgaaagatcctgtccgtttccgcgcaagcctacaacatgctggtgtaaatttactggtcatcgttccttccctgttgaagttcttaatccagaataatgatgaacacgccctgaaatctatcaggatattgatttgcagcggggaacagctggcacccgaactggcacgacaggtcgtcacaaattatccgtggatccgactgcttaatttttatggttcatctgaaattaatggtgatgcgacatggtatgagtacgatgttgcgcgtactgtcccggatgtctccgtaatcggccgtcccattgccaatacccgctgttatattcttaaccctgacaggcaactgatccccgttggtgtcattggtgaaatctatatcgccggtaccggattggcccgtggttatttgaatcagccagaactgacggctgagcgcttcctgcccgatcctttttctgcctatccgaatgagcggatgtataaaaccggcgatctcgggcgctggttgccggatggcaatatcgaatatcttggccgtaatgattttcaggttaagctacgaggcttcagaattgaacccggtgaaatagaaacccggctggcaaaatgtgatggagtacgtgaagcggtagtcattatccgtaaaaacactattgatgaacaaacagacggacaagaacgtctggttgcttacttattaccgcatatgggcgctaagttagtcccggctgaacttcgccggcaacttgcccaacatcttgctgagtacatgctacccagtgcttttgtgactttggaggctttcccattaacccctaatggtaaacttgatcggcaggcactgcctgcccctgatttatccgcaatgatagtacataattatgccgccccgatgggcgaaactgagatcgcgctggcacaaatttggcaggatctattgggactgaaacgagttggccgttatgaccatttctttaaactgggcggtcactcattactcgcaatacaactactaaaccgaatgaaggaacaggaaatggaagctccgctgaccgctttgtttgctcaccccacattatgtgagctggctgccgctgtggataaacaccttgccgtaccagaatcgccgtttgatgcaaacccagtaccgttaagcccgtctggctctttacctccactattcctgatacacgagacttccggcgatccgctggtttattctccactggcaacgctactgccggctgaacttcccgtttacgcattacaggcgcttggcattcatacactgaaacagcaacccagctccattgaagaacttgcggcctgccatattcaggcaatccgccgtattcagcctcagggaccgtatcgtctggctggctggtctattggtggcctgattgcctatgaaatcgctcaacagttaatcaatgataatgaagtcgtggaattccttggcatgattgacacctataattatgtcaatgacgatacgggtaacaatacgcttcatgaagacagggctagtgaagataaaacagctgtgcaaatcgggttaatcattgattcactgcgtactcagaagaatattgatgatgaacaggcactggaagcactgtacaaactcagcagtctggagcagattattgattactgcattgagcatcaatgggtaccggcgaatatcacgcagaatgatatccttacacgtactcataccgctgagctgatcacccggctgggacaagactatgtcccgcccaagtcacccctgcctgttcatctctattccgcagatgagtcaaacaatcgtgaccgctggcatggctggcacgatatcgccgggcaccattctgtactctgccccattggcggaacgcacttctctattatgcaacctcctttccttaatcagattgcagattcaattactgagcagatacaggccgttccggctttcgacccgcgtgttatcattcagctgggttctaaatcagtctccccgctattctgtatgcccggtgctggagccagcccgtccagcctgcttgaactggcgttatcattcccgtcgcaactgcccatttatgctttacaagcccgtggttttactgctgagcacaattatccgcataccagcgttgaaggagcagcccgagcttacatccggactattcgtgaaattcagcctcacgggccttatcatctgttaggccactcttttggtggctggatcgcctttgaaattgccttacagctacaggccgagggcgaacaggtcgctgacctcattcttgttgatacagacgaacccaaccagcaaggctctatccataagcctgtcagccatactgagacgataatggagttgattgatatctacgatatgatattagatcagccgcttcctctcacccgacaggattttgaaaacctgacacaggatgagcagcaccagcttttacaccatgccctaataaaagccggccttttcccggcaaaaacatcaatatcactactgcaagggatcattcgcgttatgcaggctaacctgaacacccgctatattccccgggcacgttatgaagggctcgtccatctgattagtgcagaagacgagaacccggatgaaataaaaaaccgcgaaactcagtggcgcacacatgttgcaaaactggacgcaatgcctgtgtccggcaatcatatgaccatgttatccaccccatcaaccaaactctgggtgggtaaactctggcagaaactggcaaatacaatcaggtaagtctaaagaggcaaactatgcaggattttctcaacccatttatgacaaatatcggtgcgcaggcgctgtccgcactggaagcggacatcacagataacccggtcagctattgtcatgataggttaaacaggccggtatgcagccttgaagaactggaaaaacagttctcttccgtgagcataccggaatgcccggttgataccggaatatacacccggtatctgagcgaaaatgtgctaaatcaggttatgcctgtttcctcacctgcctttgtgggccatatgacatccgctcttcccctgcacttaccggtgctggggaagatactgacagcgctgaatcaaaatgttgtcaaactggaaacttcccacgtcctgaccgcgctggagcgtcaggtcttgggaatgatgcataaacttgtctacaactgtgatgataatttctatcaaaaatggcttcacaatggtgatcatgcactggcgagcttctgctccggcggaaccgtggctaacctgactgcattatgggcatgccggaatcagcttatgcccgcagatggcgactttgccggacttactcgtgaaggtttagcccgtgggttaatccattatggctatagtggactggcgattctggtatcagaactgggacactattcactgaaaaaggccgttgatgtgctgggtcttgggcaggatgcactggttaaaatcgctactgacaaagacgggaaaatctgtcttgatgacctgctcattcagttacaggaacttcgccgacgtaatatcaaaccgatggcaattgtcggcatcgctggcagtaccgaaaccggctctatcgacccactggatgcgctggctgatattgctgaacgggaacagtgtcattttcacgtcgatgcagcatggggaggtgccagcctgttatcagaacgctaccggcacttattcaagggcatcgagcgtgcggatagcgtgactattgatgcacataaacagatgtacgtcccgatgggatcaggcatggtgctattccgtcagcccactatggccgatgctattgagcagcatgctaattacatcttgcgcaagggatcaaaagatctgggcagacatactctggaaggttcacgtagcgcgatgtcgctgatgctgcacagtaaccttcacctgcttgggcggcagggaatggcagctctgatagatgcaggcattgagaaagcacatcagtttgcggacttcattcaccaacaggaagatttcgaactaatcagcgaaccgcagctttgtctgttgacttaccgctacgccccacctgctgcaattaaactgatgcgtgagagttctgagccgatacgacaaaaagtgcaggatatgcttaatgccctcaatcagaatatccagaccatgcagcgctctgccggaaaaacatttgtttcacgtaccagtattaaacctgcgcaatgggataaacaaccaacgactgtttttcgcgttgtgctggcaaatccactaacaacgccggaaatactggaggacatgattgaagaacagcgccaactggcaagacaaagtgaattctgggaggatttgcaagatttgctgagctcagagtgaaataggttctgaaagagggatcatcatgagtcgttatatcgctcaaaagccgatacgggactgactaagcggcttcgatattggagcagccgataatatattgtacatttatcggccattcatgaatggcgactattactgataaggcagaggaacatattgtggcaaaaaagttgatgactattgcagaacaacttgaacaaaaagggcgcgagcagggccttgaagaaggcatcagacaaggaagagaagaaggcctaaaggaaagcagaaaagaagacaaactggaaacggctcgcgcactattacagcatggtgtcagtctggatatcattgtcaccagtacaggactgagccgggaagaaattgaagcgttaaaacattaaattaatcgccctctttcacagtaaaatgccgatatttaaaatcggcatttttgttttaattatggctttagccagtttaagtcgcgttagcgtcttaaacataaaaccacccgctttgcgggtggagttcaaaggttataccaagaaaaacacctttccgttacgatatagatgttcaagctaatattcgtaactcaaataaggaaaggtgtttatgggcattaaagcacaaagctcagcgcatacaaagtggctgtgtaaataccatatcgtcttttcgccgaaatatagacggaaagtgatttttaataatattcgttcaagtgtgggagagatcctcagagacctttgtaagtataaaggtgtggaaataatcgaaggtcatctcatgccagctcatgttcatatgttggtgagtattccaccaaagctaagcgtttcaagctttatgggatatttgaagggtaaaagttcgttgatgatctttgatagacacgccaatttaaaatataaatttggcaacagaaagttttgggcggaagggttctatgtcagtacggtagggctaaatgaagcgacaattcaaaagtatatcagagagcaagaaaagtcggatttaatctcggataaattgagtagtaaagagcatgtagaccccttcaaggggtaggccaaagcagcaaagacacttagcttgaacgaagagaaagcagcgtcatttaggcgcagtcggtaacaagcccttatagggcaagagcaaaccacccgttatacgggtggttatgattacttaaaacttattatctaaaatctgataaataagatcttaagcaacaattggcgcacgccagtcgtcagcaccagaagtacctgcagtagtgtgttcccactcgattttacggtaagccagagaaacacgaaccaactgagtgaattcagcttttgctggatcctggcagtgtggcattttgcagtcgatgtcaacgatagttgcgtctaccagtttagtagagaagaagtgctcttgtttgccttcgatagaagtacggtaccacttcagttctactgtaggtaacatttcaccggaagccagtgcgttgtacatcagtggaacggctttgttcagtgcaacagtgaagcggaatggcttatgtgcacgctgaccagaaggctggcctgactgtgggtcagtcggaacagtaacgatgtggtcaaattcctgaaccagcatttcgtcttcatggccctgaacaaagatattacctactgactcagcggtaaatgcgccagcagtaatgtgaccctgagtttttccattgatggaaatataacatggagttggcatatgaatatcctataaaaatttaccaatataagtgtaagtgctcattccttgcgtgattattccattcactaaatgatgcccactaaatgaaataaaattagcgatgccgaacactcggagcgaataataaggccgaatttctctgatgcaaagttatttataaattgcaagacgagcctgaattcaaagacaaataaaaattttataatcattgctgttataagatttatggctgattttttataaacggtaagcttatatttctgtatgaaatttaatcttcaagtttttgttttttgtaatctattgataaataatgatttttaatttttaaattatttatttttcatgatcattaataaagtgtgacgggtgtcaaaaaaatgaattcagaaagggtttttatggaggataattaatcggaatgaaataaaaaatgaactttatgataatctcaggtcactaatttggtgattatattttattcataacatacgaaaaatatttctttttatacaattgataggtaatcggtctatatacacctataaagagtaaaaccaaacttttatctatttagtaagagaaaaataatcataaattttcaagagatacaataaaagtattaaaagccagaatagagggtgttatcaattagtgttttggctttacatcaaaaaaataaagtgtcaaactcgctattgacgattttttatatcgatgttatttccacgactggttagagtctttcttatatttatctatatggtgatatataaaagtctacttatgtctgcaaatacagttgttttcctatacctatttttttaggaagctctgctgtatttgttatatggataacattgtaattattatcttaccaataatgggttgttagacagttcatggttgtattagccaaagggttgaaatatgagtaaaaatagtcctggtagcgtagctcctaaagaaagaattaatattaaatatgttccaaataccggtgatcagaccgcagaagttgaattaccactgaatcttctggttgtaggtgacctgaaaggcaaaacagaagatacgccaattgaagaaagaccaacagtttctgttaataaaaataacttcaatgcagtaatgaatgaggcgaatatcaacctgacttttaacgtccctaatcgcctcgatgaaaatagtgaagaagatttaccagttaatctggaaataaaatccctaagtgatttctcaccggataatatcgccaagaaagtacccgagctgaataaacttctggaactacgtgaagcattagttgcattaaaaggccctctgggaaatatccccgcatttcgcgctcgcctgcagtcactgctggatgatgaatccgttcgtgaacaactcctgaaagaacttgaaatcatcaataaaaaataactcgttaaaggaattctaaatggctcagcacgaagaaaacagcacagcacttgcttctggcgcaaccacttctctgcttgatgaaattatgtctcaagcgagaatgactcctgaaaatgacggctactacattgcaaaacagggtgttgccgcttttattggcagcattctggatacaggttctaacgaagaacctatcaataagctcctcgttgataaaatgattgtcgagcttgataaaaagctgagtgagcagatggatgaaatcatgcacgctaagcaatttcaggagctggaatcttcctggcgctcactgaaaatgctggttgatcgcactgatttccgtgaaaacatcaaaatcaacatcatccacgcgactaaagacgaattgctggaagacttcgagttctctccagaaattattcagtccggtttctataagcatgtttactctacgggttacggccagttcggtggtgagcctgttgctgctgtcatcggtaactacgctttcaacaacactacgcctgatattaaactgatgcagtatgtcagctcagtgggagcaatggctcactctccattcctctcctctgtttcacctgaattcttcggtgtgaaccagtttactgacctgccagctatcaaagatctgaaatctgtctttgaaggcccttcacacaccaaatggcgtgcactgcgtgaatctgaagattcccgttatctgggtctgactgcacctcgtttcctgctgcgtctgccatattcctccgttgaaaacccaatcaaaaacttcaactatcaggaaaatgtcagccgtgaccacgagcactatctgtggggtaacaccgcttatctgctggcaagctgcctgacagacagcttcgctaaataccgctggtgcccgaatatcatcggtccacaaagtggtggtgcggtgaatgatctgccggttcatctgtatgaagcgatgggtcaggtacaggcgaagatcccaacagaagttctgatcactgaccgccgtgaatttgaactggcagaagaaggctttatcaccctgaccatgcgtaagggcagcgataacgcggcattcttctctgcaaactctgtacagaaaccaaaagtgttcccgaacacccgtgaaggcaaaattgcggaaactaattacaagctgggtactcagctgccatacatgttcatcatcaaccgtctggctcactacatcaaagtgttgcagcgtgagcagatcggctcttggaaagagcgtcaggatctggagcgtgaactgaacatgtggctgaaacagtacattgctgatcaggaaaacccaccaactgacgttcgtagccgtcgcccactgcgtgctgctgaaatcaaggttctggatgttgaaggcgatccaggctggtatcaggttgcgatgcaggttcgcccacacttcaaatacatgggtgcgagtttcgaactgtcgctggtcggacgtttggataaggaataatcatggctgcgctgtacagttggaacagaggcagctctgccagtctgttcgagcgcattcaagggaagagcttcggctcttcccgtcagtcaaggatgcgtgctctgcttgattctataaagaaacatttgaatgaagtgcttaattcgcgccctggtgcctgccagagtgccattgaactgggtgtcattgatcttaatgacgcaaccgcaacctcagtggatttcaagcaaagtatcgaatgggcgatagaagagtgcatcagaaattatgagcccagaatatcagcggtgtcagtcagcgccatcaatgatgagtcagatccgttgttattgagctttcatatcagtgcggaagtttccctggatgatatcaacgatgttgtggaattcagcatccagttggacaacaaccggcgctattgcctggagcgaactcaataaatgtcatttgaaaaatatttcagagatgagctgaactatttgcgacaactggggaaagaagccgcagttgagcgtcctcatcttgccgcttttctgtctgaacaaggctcagatcctgacgttgagcgtttgcttgaaggttttgcattcctgacaggcaatctgcgggcaaaaattgatgatcagtttcctgaattgactcatggcctgcttaatatgctttggcccaattatctgcgtccgactcccagcatgaccatcatcgaatatacccctgatgagagtgtggtgacaaaagcgacacaggttaaacgtggcacacagattatgagtaatgcgctggcagctcatgatgatatttactcgaatgaaaagcagtcgaatggcaaaagggatgatcacagccgctgtaccttcaccttatgccgtgatgtctggcttttcccactttctattcaggatatttccgttaataacagtaatgagcaggggatcattggcctgaactttgcctcaaaaacggaactgaatctccatgaactggaactggataaattacggttttacctcagtggtgatgactataccacttcgcaactctatttctggctctgttactacttcagaaaagcggaactggtgatcggtgataaggtgatccctttgccggattttgactttgtaccggttgggtttgagcgggaagatgcactgttgccttaccctaaaaatgcctacatgggttatcgcattttgcaggaatatttctgttttgcggaaagcttcctgttttttgatgtgaagggtttgccggaactgcctgaagatctcaagaccaaagatttcaaactgaatttacatttttctcaggcactgccacccgaagctaagatccgccatgacactttccgtctgcactgtacaccggcgattaacctgttcccgatggacagcgaagcgattgaactcaatggtagccagacggaatatccgctgaaggccagttatagcttcccggataactacgatattttctctatcgacggcgtagaaagctggctgacgggagagaacggtgagcgcagccgggcacgtgtcggtgagcgggtttataccccgtttgaaagtttcaatcaccagattgataacgaagatgaacgctcaatgcgttactaccgtctgcgggtgaaagagtcacctttccgcagagggctggaacatttcatctcatttgtccgtggcgatgaatctgatctgctcaggctcagactgaaagagaacgtttccgtcagcctgacgtgtaccaaccgtgaattgccgctggagctacgtgtcggcgacattaattacccgtctatcggcagcccgtcatttgcgacattccgcaatatcacacgcccgtccgtgccgctttacccgttgttggacggcggattgcactggtcattgttgtcgaacatgtcgctgaactacatgtcattgctggatagagatgcactgaaacaagtgctgcgtacttacgatttcccgagtattcacaaccgacagtctaaacgatcatcacagaaacggcttgatgctattgaaaaaatcgagacagagccgacggatcgtctgttccggggccagccggtacgtggtttgcgctctactttgtatatccggcagcaggcattcagctcagaaggtgagctttatctgttcagtacgattttgtcacggtttttctcactgtatgccagcgtcaacgcttttcatatgttgaaggtaatcaatctagataatcaggaatgttatgaatggccggtacagataggtcaacactcgttgatgtaatcacagcgcagagtcctgccaaagcgctggaattggacatctcacgctacaacttttaccagttggttgagctgctcaatcagctggcggtagcgtgggaaaaaaccggagaaacagatcggcctgaacgtgagtctgtccgcttcaaatccagcgccagtctggcatttcctacccgtgatgtggtttcactgacgcagtccaaacaggggtattttgagctggaagtctcttttatggggctacatggcagccagtccccgatgccgggttattacctggattcactggcatgggaagacgcacagggtgaaaaccggctgacggattttctcaacctgtttaaccatcgcttaatcacgctcctgcaccagatttggcggaagtaccgctattacatctgctttaagaaaggcggggaagacggtttttcccagcgcatgttctcgctggtggggttaggcagtgaagttaaccgtcggatgctgaatatcaatcacagcaaaatgctggcctatgccgggttgctggcaagtcccggccgctcaccggaagtgatatgcagtctggtttcccactgttttgacttacaggatgtcactctgcacggctggcagttcagaaaagtcacgatcccggttgatcaacaaaatcgtctgggtggcaccaataaagggcaaacgattggtgataccgagctgtcagtattaggacaaaacttcaccattggttcatggattggggactacagcgggaaattcctgctcagtatcaacaatctgccccgtgatcggttcctgtcattcctgccggacggaaaaaactacctcccattagtgatgttcatttccttcgtcatgcgtagtcagtttgcgtgggagctgcgtcttgggctggcggaaaatcaggttggcggcatggttctgggggcacaacagcacaaccatctgggatggaccagttttctcggtgagccggaaaagaaaccctctgtcacaatttcagttatggaataacgactatggaaaaacatcaaccaaccctttcattgcgggttatcaacagtgagcaactggagagtggccgagccgccagctgccagttttcgccacagggcggtacggtcggcagcagtgaaagtcacctgtggtctgttcaggacagtcagggcaacatccacccgtcacaattctcgattcagtggcgtgatggtgcattctgcctgcaagtactgtctgatgctgtgcagatcaataatgccacattaacaccacagtccagcctgatccgtttacagcagggcgatcagattaaagtcggcatgttgtcgatcaagatccacatcagcttctctgagtcagatcgggtcgatccttcaacggtatcccctgaatcgctggtttccagttacagcaatccactggatgccatgatggaaggcgtttcgctgcaaaagtctgcatttgccaaagatgacagcgttgctccgacggtgatgcaccgtttcagcgatgaccctctccgggtactggacagtgaaagcctgaccacattgaaacagcaggttgacgctgatgataccgagcagcttctgcctccggatcattatcaatcccctccatttgctaaccctatttctgataaccgaggcagtgttatggatcaggagttccttgatttaccggatatcacttccgagcagcactatgaagatatggatgttgaccatgtcgcaattacgcctttgatgcgcgggctggatacgcagttgcctctgcacgacacgcagcaggccaacgatttcttgcaggaaatgggtaaaaccatgaaagcggcaatcgaaggattactggctctccagcgtgagcagcacggattgcgtgataagcaacttcgtcctatcgaagacaacccactgcgcctgaatatggattacgacaccacgatgcaggtgatgttctccgagcagaaaagcccggttcatctgtcagctcccgctgctgtcgcagaaagcctgcataacctgcaactgcattatcaggccaaccgggaagctatctctgcggcgctggataccatgctggaagccttttctcctgagcagttgctccgccggttttcacactatcgccgcagcagcgacgtcaggaacaaagatgcttcatgggcgtgggaaatgtataccaactattaccgtgaattagcttccagccgtcagcaggggtttgaaaagcttttccgtgaggtgtacgagcaggcttatgaccgcgcattgcgtcagggcttagaggacgccagtgatgaaacgttccggtagtcagcgcatctggtcggtagggattttattactgtcagcgatgttactgaacggctgtagcagtgcatggaacgcaaccaaaaaagtcggtcaggtcatctgggatccttccacgccggtaggaaggccgagtgatcaggcttctgttgccaatatcacgttactggctgaacccaacattaaccccaatgaaagtggtgaaccggcacctgttgagatgaatctggtttatctcagtgaggattcacgttttctggctgccgattatgaccagcttgaaagtgacaaactcgaaaaggcattggggaaaaactacatcgatcatcaggattacaccctgctgccggggcaatacaagccgctggaagtgatcacattagaaaagaaaaaccgttatatcggtgtcatcgtccactatgcagatgtcaatcagtctgaatggaaaaagatcatccgggtaaaagacatgggacgccattacaacatcttggtgcatatcagaaataacgacgtcgaacttagaaaagaggaggaggagtaatcatgccaggaaagaatcgggtgatttggcacgaaggattattcatcaagccacagcatttccaacaacaacaaaaacataatgattatctggcccacagcctcgtctctgtactgacagcatacggtcatggtttcagctccatgagcatcaatgatgatttgctcaagctgggacgcatcggtattaccgaggccagcggaattatgccggatggcacaatattcgcggcacccagtcaggatctgctgccaaagccgctggatatcgaaaacatcaatgacctgaaaagtaaagatatctatctggcattacccatgtcgagcgacaccattcgtgaagtggctgatcgggatgctgaaacccagagcgcagtgcgttatcgcgagctgccgggtgatgtccgtgatttgcataccaaaggtggtgattcttccatcctgaaccttgctcagctaactccggtattgatgcagggttctgaggatatgagtgcttacacggcgatcccgctgtgccgcattaaagaaaaacagaaagatggcactatcgtgctggataatgaatttatcccgacctgtctgtccattttcgttgctgacaaactcaagcgcttcatggtggaaatcgatggtttgctgacagagcgttcaagaacgttagcgaagcgtatcggttcgccgggccagcaagggattgcagatgtggctgagtttatgatgctccagctattgaaccgcgttcagccgctgtacaaccattatgctaagcagagcgttctgcatccgctgcatctgtatacccagctgatccagacctgcggtgagctgagaacctttaccgatgcgagccgtctgccgggcaatattctggcctatgaccacaataacctgaccgatacctttcaggatgccatgcacgccatccgtgatgcactgaacgttgttctgacaccgcgtgcaacatcgattgccctgaaacagaacgaaggcggaattcgcgttgccacgctgcacgataacgacctgctgcgcaaagctgaatttgttctggctatcagcgccagtactccgcaggaacagctgcgtcgtcagttcgtccagcagaccaaagtcacctcaatggagcgtatccgcgatctggtcagcgtccagttgccgggtgtaccactgattgcgctgtccgcagctcctcgtcagttgccatatcactctggctatacctatttccgtctggatcagaagagtccggcatggaaagagatccaacagggtaattccattgcattccacgtctcaggggatttccctgacctggatatgcagctctgggctatcaggggcggtaaggactagttatgaggattaggcatgagtgatatcaatgttgacagtccgtcactggaaaaatttgaaaaacaggctgaaacactgaaaacgtttcagcgccagtaccagctcccgttgcgtggtgaaagcctcaacccgatgatcgatgccgccactcctttactggggatggtcctgcgtttgcaggacatgagtgatcaggcgctgccagataagctttaccaacaggttgttactgacattcgtgctattgagcagcttctgcaaaccaagggctatgaacccggtgcgattgtttcattccgttacgtactgtgcaccttcattgatgaaaccgcattggggcacggctggaacagtcagaatggctggttgaagcaatcactgttggtgcacttccacaatgaaacgtgggggggtgaaaaagtctttgtattgcttgaacgcctgatgggagaggctcagcgctaccagcatctgctggagtttatttacctctgtctctgtcttggctatcgcgggcgttacaaagtcagcacccagaaaagtgatgattttgatcgcctgttccgccgcttgcagcaacagcttcactcattgcgtggagatgctccgccgaccacgctgtatgtcaacgtcaacgagcgcgatgcaagttatcgcctgatccggcgttggaagatcaaacatctgtttgcgataggcataggtctgctgattgctatttatagtttttatgccatacgcctcggtgatcagacccagtacatattagagcagctaaataaattattaagataggaagtcgccatgattcagattgatctgcccactcttgtaaaccgtttaaacccgatgacccgccatgcactggaagcggcggcggcatcctgcgtcagccagcaacagccagagattactgtggctcaactgctgcttcagatgatcgaaacaccactcagtgatgtgcgtctgatcctgaacaaagcagaaattgataaagatctgctgaaagaacaactcgatcaggtgatgacgcatcatcagtcgattgtacagacttaccctaacttttccccgatgctggtggaatggttgcaggatagctggctgctggcttctactgaaatgcagcataccgaactgcgcagtggtgtattgctgatcgcattactgttcagcccgctgcgttatctggctccgcagtctgcgcgcctgctggcggggattaaccgtgagctgctgcgtcagaatttcgctgaatggacaaacggctctgccgaacagcctttcagtgccggagataaagaagggcagggcgttcatccggcaaacagcgacagtctgctggcccgttttacccagaatatgacggagcaggcgcgtcagggcaaactcgatccggtactgtgccgtgataatgaaattgacctgatgatcgatattctctgccgccgccgtaaaaacaacccgatgtggtggtgaggcgagcttagagca

SEQ ID NO: 338 - DNA, 6481 bp, Xenorhabdus sp.; identical to SEQ ID NO: 242
  CDS (5332)..(6147)

SEQ ID NO: 339 - DNA, 21094 bp, Xenorhabdus sp.
  CDS (9448)..(12645)
tgctccatccatgtgctctaaagttgatgccagagagggataaatttttggcaaaagtcatcgacggagcaataaagttattctaaattatacatgcctgaggatctccacgattttgttttctttagcaagaactttaatcgtgcctcaggcactttagttcacttctcttaagcgaagctcgggttaattacagcgtaaaaacaccaatcagagccataacagtcagaattgcggcagcgccataaaacacccatttaccggcaggaacatgaattttcagatcatgcatagcatgatgaatgcggtgtaagccgcaccagagtggcagacttatcatcagcaataaaaaaacacgcccaataaagctctggcagaaagccagaatacgttcgtaagagagcgcctccggtgccaatcctaatggcagtaaaatgcctaatagcaggataatgactggcccgacaatagcactccacataccgccagcgccaaacaacccccagaaaatcggttcatcggaacgttttggtacttgattcatcagatcctccttggggtcagagtagcgctatgccaaggatcacggcagtcgcaataatagtgaaagtccacaataatttgataatgggccccggtgccattttttcatttttgacaatgatattgagtgccttgggtgccagttcaaaccaggttttggtatgtaataatgctgccagcaaggtgatgatattgatcagcaataccagtgggttttgcagaaaagagacaaaaccaccccagctttcagggccggctttcagggcaaacagaccataaagcaccaaaatactgaaccagacagtaggaacagaagttccttcacgcagcatatagaaacgataaaaacctaatttttgccaccagttgggctccatgccacgggtataaggcttacgttttgttgtcatgactttcacctcccttattgtggtttcagcatggagataatgaaatcttttgcactttctgccttgctttgctgaattgcgcctgccggatcgacatgtttcgggcaaacttcagaacaataaccgacaaaagtacaggaccagacaccattatcgctgttgatttgtggcatacgctctttcttaccatgatcacggttatcaaggttatagcgatgtgccagcgtgacggcagcagggccgataaactcaggattcaggccgaactgagggcaggctgcgtagcataggccacagttgatacaaccggagaattgatgatacttcgccatttgtgccggagtttgcacattcgggccatcggagggtttacggtcattaccgataatgtagggcttgatggcttccagactttcgataaagtgagtcatatccacaaccaaatcccgctctatcgggaaattccctaaggcttccactttcagtccgtgctgatagtcgcgcagaaaagtcttacaggccagtttgggtacgcggttgaccatcatgccgcaggagccgcagattgccatgcggcaggaccagcgataagacaggtcaggagccagattatccttaatatagcctaacgcatccaacagcgaagtctggtcatcataagggacatcgtatgttgtgaaataaggcgcatcatcggtttccgggttatagcgcatgacttccattttcaggtttttcatctcagtcattcgcctgctccttctgttttttctcttgtgccgcggcttcaccaccataaacccgttttgctggctgggatttagtgatcttcacatcactgtattccagatgtggcgcaccttccgggttgtagaaagccagtgtatgtttcaggaagttctcatcatcacgttcggtacagccttcatcaagacgctggtgggcaccgcgggattctttgcggttcatcgcggagtgagccatacattctgccacatccagcccgaatcccagctctatggtatagagaaggtcagtattgaatacactggagcgatcactgatttggatctgtttgaagcgctctttcagctctacgatcttatcaatcgttttttgcatcaattcaggggtgcgataaataccacaaccttcttccattgccgttcccagctcatcgcggattttggcccagctttctccgccctgctgattcagcagtttattgagtttagcctcaataccgtgaacctgtgcagccagtgcattttcattggcgggaggagcttcctgagcacacttggccgcttcctcacccgccagacgaccaaagacgacaagttctgccagtgagttagagccaagacggtttgcgccatgcaggccgacagaagaacattcaccaatagcaaacagccctttgatacgggtctcacattgttgattggtttcgattccgcccatagtgtaatgcgctgtcggacgaacagggataggctccttgaccggatcaacgccaacgtaggctttcgccagttcacagatgaatggtagacgctccagtaatttcttctcacccagatgacgcagatccagatgtacaacgtcaccgcgcggcgttgcaatagttcgtcctgcccgccattcatgccagaatgcctgcgaaactttatcgcgtggtcccagctccatatatttattttcaggatggccgagtggtgtttcaggccctaagccataatcctgtagatagcgatagccatctttattcaccagaatcccgccttcaccccgacaaccttcagtcatcagaatgccggaacccggcaggccggttgggtgatattgcacaaactccatatcgcgcagtggaacaccatgccggaaagccatacccatgccatcaccggtgacaatgccgccattcgtgttgtaacgataaacacggcctgcaccgccggtagccataatgactgcatttgcgcgaatctgaactttactgccttccatcatattcagggcaaccaggccacgggcacggccttcatcaaccagaatatcgaggacaaaatgctcatcgaaacgctgaatttgcggatacttgagtgaggtctggaacaatgtatgcagcatatggaagccggtcttatccgcggcaaaccacgtgcgctcaattttcatgccaccgaaacgacgcacattcacggagccatcttctttgcggctccacgggcaaccccattgctcaagctgggtcatgtcagtcggacagtgtttgacaaaatattcaaccacatcctgctcacacaaccagtctccgccggatactgtgtcattgaaatgaaagtcataggaatcatgagactgagtgactgcggctgatccaccttctgcggcgacggtgtggctgcgcatagggtacactttcgaaatcagggcaatcttgagttggggattggcttcagccgcagcaatggcggcccgtagacctgcgccaccggctccgataattgctagatcagcattgaaggtttgcactgtgcttctccattgtttcaagtgaaatgaataaacttcagccagaaagcctaatgcgttatcactcgtcatttgtgaccttgctactttgcagaggtattttttcttgtccgactgagtgttgtaagtaaattttttgtaccttaacgagttaggagcactgtctgttattttttatctgatatgattataacggatggtggctgaagtaaacttgatatgaacgctgatttggcagaattgttatcaataaaaattgatctaaaacaagttttccattcatccggacattttttattaatgtgttgttaagttaatcgatattatttgtcttatcttgaggcttaaattcattaaattaacgcgatatcggtgtctcttatcaataaataaggaagtttgaatttttatttaatgtaagttctttatttttttaatgtttacttgaaggtcatttctattcttttggtaatttatacactttgtttatttataatgaaggtatgggtttgtaaaaaaaaactataattaattattttttatgttattgattggtggtttatatattttgttattttatattttagttaaatgatgtatgttttctggcggatgtattgtatttcgttcctgattttaagttgtaatatatagagatatatttttgtgacaaaccaattttataattaggagcctatcatggcgcttagaaaaataaccatcgcattacaagcggataacaatctttatttaagtagagttgatagcaatggaattcaatatattgaagctgtaaaatcatctatagatgaatattgtcggtttaccgttgtttatcttgatccaaataaccttaataaaattgctcttatcggagataataaactttatcttagtagagtaacccgttcaaatggtgattttattgaatctattaaaccaacggtagacatttattcaatttttatgattgaagatgttggttgtaatatgattgcactgaaagctgatacaggtaaatatctcagccgagtaacagttggcggtgttgattacattaaacctgataaagttaatttagatgtgtattgtaaatttcgcgtcgtgacattaattgaataatttacatttctgactaaaactaatcagcaggtaaatatagtggccgccaaagcaggccacttttttatatttttaatattttttaaatttatctctaggtttaagatttatttataacaatgtttatgaaaagagttaatctatcttcggtaaaattttatatagatgggttatttttataactcgttcagaaataaatgataaatagcagaccatcgacaagggatttaatgtaataatttgtctggcgagcgtgatgcgggtaaactgcgcgttttgttttcttttggagccacaggaatatgaacgaaatcgcggattggcagccaacagcccctatcgctaatttattgaaaagggcaagaattctggcagaaatacggcgctttttcgcagatcgtggggtgttggaggttgagacacccgccatgagtcaggcgactgtcacagacgtccatctggttccctttcagacgaggtttgtcggccccggtgcagcagatggtcttcccctgtacttgatgaccagccccgaataccacatgaaacgtctacttgctgcgggcagtggctccatttatcagatgggaaaaagttttcgcaatgaagaagcagggcgccatcataatcctgagttcaccatgttggaatggtatcgtccacattatgatatgtaccgcttgatgaatgaagtggatgatctattacagcaaattctggattgcgaaagtgccgaatccctttcttatcagcaggcttttattcgttatctggatatcgaccctctgacagtgagcaaagaaaaactgcgtgaagtagcagcaaaactcgatctcagcaatattgctgatcgtgaagaagacagggatactttactgcaactgctttttaccatgggtgttgaaacacatattggtattgaaaagccgacatttatttatcatttccctgcctctcaggccgcactggcagagatcagtaaagaagatcatcgtgttgctcagcggtttgaagtgtatttcaagggcatggaactggcgaatggtttccgtgagctgacagacagcaaagaacagcgtctgcgcttcgagcaggataatcgtaaacgcgaatcaatggggctacctgtacagccgatagatgagtatctgcttgaagctctggctcatggtatgccggaatgtgctggtgtggcattgggggttgatcgcctgattatgctggctctgggcgcggagcgaatcagtgaggttatagcctttccggtaggcatttcctgatttaataccccgccacttgcggcggggtattaaatgaataaaaggtcgattacttatgttcgtgatgttcttcgaggaatttcaccgctaaatcagggaaatcggtgaatgcaccatcgacattggctttatcgaagacgatatcaaacaattgatttccgctggtggcatactttggcaactggtcaatacggatagtatacggatgcactaccatatggctggcgtgagcttctttcaccataccggttaatttaatgttgtttggggtagagtcattggcgaccagcatgtggtaatccgggccaataccatcagcatattttgccacttctttcatggcacccggtttaaacatccagtcataactgtagttatgccatgttccatcggttttctgttcgtaggtttcattccagtcggtgtaagcaatcagttgcaccagtttcagatccatccccaatttgggttccagatcatttttaatacgtttcaactcattggcatcaaaacattgcagataaactttatcgctctttttggtgtaaccatactgtttcagtacttccaacacttttgcggtgatgtctttgccttcctgacgatggaaccacggtgctttaatctcaggatagataccaacattctttccggtggatttgttcataccctgaataaattccagctcttcctgaaaagtgtggatgcgaaaatctgattttcccattggaaaacggccgggatagctttgtacttttttgccatccttgatatcaaacccttcagtaaatttcagtgacttaatttctggcagggtaaagtcaatggcatagtaacgaccatcagcgcgtgctcggtttggaaaacgctcagcgacatcagtgacgcgatcaagataatggtcatgcagaacgaccagttcattatccttagtcatcaccagatcttgttcaagataatctgcgccctgagcaaaagccatcgctttggcaggaagggtatgttcaggcaggtagccgcttgctcctcgatgcgcgataacaattttatccgctgcatgcgcaatacctgacatcgatgaagctaacagaagaccggccataattgttttaacgggggtgtgcattggggttctccacttgtggtaatgaaggtgtattttggtaattaaatggtgttttatatgaatttagaatactgaatataagggggaacgtagtgttactgtattattgtcgccactgttgaacgaaatgaaacagtggcgacattggaaatggctctatttaaaacagcctattgattagctgttatgtgcttgtgccatttcctgcttatgtttgttttcatgcagcataacaaacaacagtagaataacagacagaatgctgccgccaaccatgaccataaagccgccatcccaaccggtgaaatcaacggtatagccaacaatcgcactggcagctaccgagccaccgaggtagccaaacagaccagtaaagccagccgcagtacccgctgctttcttcggtgccagctcaagagcatgcaggccgatcaacatcacagggccataaatcaggaagccgatcaccaacatacagatcatatcaacattcggattaccggccgggttcatccagaagacaatcgtagcgatagtaacgagcgtcataaagaacacgccggtagcaccacggttgcctttaaagactttatccgacatccagccacacagcagcgtaccggggatacccgcatattcatacaggaagtaagcccaggaagatttatccagtgcaaagtgtttaacttctctcagataagttggtgaccagtcaaggataccgtaacggagtaagtaaacgaatacgttggcaatggcgatcatccacagcagtttgttaggtagaacgtactgcatgaaaatctcttttgcagtcagttctttttcatcgttttctgtgtagtcaggtggatagtcgtttttatattcttcgattggtggtaagccacaggattgtggggtgtcacgcatcagggcgaagatgatcagggcaaccagaatggcagcgaatgctggcatataaagtgcggctttccagtcattgaaccatgccataccgaggaggaacagcaatggaggcaatccaccgccaacgttatgtgcgcagttccagatagaaactatcccgccacgctctttttgtgaccaccagtgaaccatggtacggccgcaaggaggccatcccataccctggaaccagccacacaggaacagtaggacaaacatgaccgcaatgcttgaagtcgcccacggaacaaagcccatgaacagcattacggctgccgcaagtatcaggccagctggcaagaaaacccggggattagaacggtcggaaacggaacccatgatgaattttgagaagccgtatgcgattgagatccctgacagagcaaaacccagatctcctctggaaaagccttgttctaccagatatggcattgctagcgcgaagtttttccttaccagataataagcagcatagccaaagaaaatccccataaaaatttgccagcgcaagcgacgatagagtggatctacttcttgcgcaggcagccgggctttgtgaggcgccggtctgaatatacttaacatgtttgtctccacatgacttttagtatgagcgaatcaccactgtttagtagtgaccagcagtaaacgaaagtttcaatttatttttttctatatcgaaagaaagaatagctaaaacagactaatatatctgtgaagtatcgctaacatatggatataatttcgtaaagaccacaattttgagcgatttatggctcttttgaaataagttttattttaattatcgtgatttccgtcacaattaagaatgtttagcggttatttttgagcgtattccattcgtttattttctttttgtcataaaggactattattattgtgggaatatattcgccgttttaatcatacgaatcttatttaaacaaatataagattatctaaacatatagtgatgaatgaaaacgtgatatttattgtctgttttcttaactgagatttactattttttgctgttatttttatttaataattttgattatatttatttacatattttgcgttttttataacacagttataaataaaatgattgaattttgattcggaaataatagatattactacaaatggttattcatgctcacgaagccggtttttatgagttgtggatagctgttttataaaataaaaacaagttatatcaaggtgatgaagtggtgtataaggcgtaatacactctattcactagtaaaaaaatataattgtgggttgattgtgtaattaattaaaagttacaaataaatattaaataataattctttaattttaaataattttcttgaagtttatttttttattcagtgaaggtcaacataaggtcattgtaggagccaaatgtggacaatagctgatatttattgactaacagcataaatatctccattcatcataaaaaatgatggaacaaaatggagatcagaatgagaacatcattatgaatacttacacacacaaggcaatattacacacagcatttattgggcaacaatcctcattctctaacccttctgatattaatgacattgatatcagctatatggaaaaaacacttcagccatggtttgacaatgtaccatcccggttagcaaaactggcaaaaatagcaccgcatgatattgctgtttcagatccgcatgggattctggaatttggtgagttacagcaacgggttatcagcgcagcgcatgttttacgttgccatggcgtaacaatgggaagttatgtcgctattgcagccgagaggggtattccatggtttattacaatgctggcaacctggcagatcggtgcagtatacattccccttaataccatgatgccggaaaaacgtctgaatgatattctcgccagcttacctgacagtattctggtctctgatgaaacggtatcagcggagctgaaagcatcaacacatattccgatggagcgccttgcctatacagttgaggaaattacggaggatgttgttattcctgaattaggcgatcatccggcctatatcatgtttacctctggttctaccggactaccaaaagctgtgcaggtgcagcatgacaatctggcggctttcctgtgtgcactgggcaaattattatcagttaaccagaatgaccgtatgcttgcgctgactactttctcttttgatatttcagtgcttgagctactgctgacggttgttcatggaggcagtatctacatcgcacccactgagactcagcgtgatgcgatggcactatcccgtgtgttctctgagcctcaatttactctggcgcaggcaactccagtaacctggtcaatggcactgaatgccggctggacgccgcgttctgatatcagcatgctttgcggcggtgaggctctgtcacaagatctggccgatcaattaacggcatctggtggcactttatggaacctttatggcccgacagaaacgacaatctggtcaacggcattccgcatgaaaaaaggagataaagtacagctgggcgggccgattcccggcaccagcatcagtattgtggataagaatctgcgtcctgtcgctaaaggaacggtaggtgagatcctgatcggtggattaggtgtgacagcaggatatcgtaataatccggttgaaaccgctaaacggtatgtccctgatgtcaacggaaaggggaaaagagcctatctgacaggcgatatggcccgtatgactgaagatggctccctcatttatatgggaaggcaggatgaccaagtcaaagtacgtggttatcgaattgaactgggtgaaatagaaatcgcgttgagaaaacaacacggggttcaggatgccattatccgtgtcgcgggaagtggtgattttgccaagatacaggcgttcgtattgtttgatcctaatatggttgtatcggaggagtgggtacgtgaaactcaggtcgcattgcgagaaagcctgcacgaagcctggatcccttctgaatattaccgtattccttatattccgctgacaagtagtggcaagcgggacaggaaacgtctggaagaagtggcagaacgtctgagtaccagtcatgatgcggtacagccggaaacagaaacagaaaaacgggtttatgctatctggggtgatttgttggctgcggaaacttttggcattaccgatgattttttccagattggtggtaactctattctggttgcccgtatggtggaacggattgaaaaagtattctcactcaggatccctatttccggtatctatgttgaacccacaattgcccgaattgcggctattctggatgagatgagtgaagttcacaaaaataatctgattcctttcaacagtgtttaccgtagtgaagcgcttattcagcaacatgcagaaacgctgagaaaagatgtttacctgaaagaaagtatacgtcctgatggattaccgcatgcgaactggtatgagcctgatactgttctgctgacaggagcgaccggatatcttggcctgcatctgctggaacaactgttgaaacagacttcagctcaggttatctgtctgtgccgtgctgacgacaaggcacatgcgcttgagaggatccgggatggctttactcattatcagattgatgtaggtaatagccttgatcgcgtggattttgtgataggtgatctggggcaaccccgtttcggcttattgcctgaaatctgggataaacttgcgcaggatgtggatgtgatttatcacaacggtgcgctggttaactttatctatccttatagttcactaaaaagcattaatgttgatggcaccagaaccgcactggagtttgcctctacttcacgcctgaaacatttccattatgtttcttctgtgaatgctttgtttgctactgaatcgccacgaccatttatggaagatgatcgcgctatgagcgaaacaatacgtgatccttccggttattcgggcagcaagtgggtatcagaagggattatcaatattgcccgtaaacggggtatgccagtgagtatttaccgccccggtctgatcctcggacatacccgtaccggagctgctcaggggaatgattatcttgtagcttccctgaaaggttatctggaaatgggatcctatcctgctcatggattactgctggatatcgtaccggttgattatgtggcggcttcactggtgcatatttctaagcagcgtgaatctgacgggaaattctttaatctgtttaatccggtgcaagtttctatccgtcagtttttcgattgggttcaggagtttggttatatccttaatccagttcctttcaatgaagggaaagagagaattcttgctctggatgattctcattcgctgtatccattgattccgctgattcgggatatgacagagaaaccttaccgcgcgctggatcctgactatgtccatgaaatccagccagaactggagctgaaacagacgttggcagcactggaaggatccgatattcagtgtccggttattacctctgaatatgtttgtcaggtactgaattatctgatcagtaccgggttcctgcctcaggtattgccgacaagttacagacagggggtattttcatggaacagttaaccggaaatgaagcagcgctgtggatagttgtcattaacagtaaaaagcagtattcagtctggcctgacgaatatcggatcccgattggctggatggcgacaggaaaagaaggccccaaagccgagtgtcttgagtatattgcgggtatatggccggaacccactaaaaagcagactgatatgcactaaatagatatacgagcagacaatattatccgtagtggacataacttattagaggttgtgtccacttattttttctgctcgttttatgtcgtaaaaaccgcaaataaacgccccctcaaaaaatagtgatatttctcacgatcttggtttttttatcgcctcaaatacgcgtttcaggttcgtttttgttccttatcaaacaacttatactcattttggatatatttttatcattaaccggatgtactgaccggatatgtgactggggtgaacgagcgaagccaacaaaaaggcaatttgaaagacgaagtgtatagaagcgaaagaaaggagcatctctgatgaatggctctcctgtaacagaaactgatgtcattattattggtgggggcgcaacaggtgctggtatcgcaagagattgtgcccgcaggcgcttacgctgcatcttactagagcggcatgatattgcgacaggtgcaaccggacgcaatcatggtttattgcatagcggtgcacgctatgccgtcacagacagcgaatcggcaaaagagtgtataaaagaaaacagggtcctcaaatccattgcccgacattgcattgaaaaaacacacggtttgtttattaccttgccggaagattcactggaatatcagcaaacttttattgctgcgtgtgaaaaggcaggaattgatgcgcagtcgattgaccctgaagaagcgaaacgttttgagccggcggttaatccggatttgatcggcgctgtgattgtgcctgatgggacggttgatcctttccggctgacggcagccaatatgctggatgccagagagcatggagcacaaatactaacgtatcatgaagtcatggggttaatcaggcaagaggataaaattaccggcgttcatgtttatgatcatcgcactaagcgcctgtatgacatttatgcgccgatcgtggtgaatgctggtggaatttgggggcagaaaattgcggagtatgcggatctccgagtccatatgttgccggccaaaggatcgttgctgatcttagggcatcgcattaacaatatggtgatcaaccgctgtcgtaaacccgcagatgccgatattctcgtacccggtgacactatctcgctgatcggcacgacttcttcccgcattgaatacgatcagattgataacatgtctgtgactaaggaagaggtcgatatcttaatccgggagggagcaaaattatccccccggcttgcgcaaacccgtatcttacgggcttatgcgggagtccgccctttagtcgcgagtgatgatgatccatcgggcagaaacgtcagccgtggtattgtgctgcttgatcatgcccaacgtgatggtctggacggattcataaccattactggcggtaaactgatgacatatcgcctgatggctgaatgggcaaccgataagatttgcgagaaacttaatattaccgcgcattgtacgactgcacaggagccattgcccggctcagagaattccgccgaacaaacacgccagcacacgtcacacagtaaaagcccacatagtaaaaaaccgcattgtagcaccgtaactctctccgctcccattcgtgggtcggccatttatcgtcatggagatcgcgccagccagttactgagtaccgaacgatcagataaaagtttggtatgtgaatgtgaagcggtaactgcgggagaagtacgttatgcaacggaatctttggcggtgactaacctactggacttgcgtcgccgcactcgtgttggcatgggaacctgtcagggagaattgtgtgcctgtcgtgcggcagggctacttaatcgtctcggtgtaatcacagaacaggaatcagagcagcaactgaaacagttcctgaatgaacgctggaaagggatccgtcctgtcgtctggggtgatgcgttacgggaaagcgagttcaccagctgggtttatcagggactgtgcggtttagatgatcatgatactgacgccgataaccagccagtaacggagactgacaatgaaatttgatgctgtcattattggaagcgggctggcgggactgactagtggtattcggctggcagaagcaggtaaatcctgtgcgatagtcagttcaggccaaagttctctttatttctcttctggttcgatggattttctttcccgtctacctgacggaggtgaagtcacccatcccttacatgccttgtctgaactgaccagacaggctccgcatcacccttacagtcggataggcgaaaaaaacgtagtatcactggcttatcaggctgaaaaattaatcagggacagcgggctggttatgaccggttctgcttcacaaaaccattatcgtgttacgcccgttggccgtcagcgcatgacttggttaagcccggcgcgagtaccggtttgtgagctggaacggccatttaaatgggaaagtgttgttgtgatcggcattgcgggatttctggattttcagcccggcattgtcgccagtgcattacagaggcagggggtgaaagccagtgcgcaggagattcacttaccttttctcgacagactgcgtgataaccccagtgaatttcgctccgttaatatcggcccatttactggatctgcctcaaaacctgacactgatagcggaggaaatcagccgtctggcgcagggatatgaggctgtgttcctgcctgcctgtattggtctggaaactgatcaagttgtacaggcattgcagatacaggtgaaaaagcctgtctatttgttaccgacgttaccgccttctctgttggggatccgggtggatcagttgttgcgtgctcggttccgccattttggcggagtgataatgacaggtgatacggtcaacggtgtggaaatggcagataaccatattactggtttgtatacccgtaatcatggtgatatcccactgcgggcttctcacgtgattctagcaaccggtagttttttcagtaatgggctgaaagccaaattgaaccggatttatgaacccttacttgatttagatctgctggcgtactcctcacgtgaacaatggacgcggcaaaacgtttttgctcctcagccttatcttaaatttggtgtcaccacggatgaatatttacggccattaaaatcaggtcaggttgtgaagaatctgtatgccgccggtgctgtgctggggggatatgatccattgtttgaaggctgtggttccggagtttctttattgagtgccttatttgttgctgaacaaatcatcaccgggcaacgagtcacaaaacagcggataccggagattgcacaatgaacatagcggataacagttttgaaagctgtattaaatgcactgtctgtactactcaatgcccggtggttaaagttaatccgggttatcccgggccaaaacaggccggcccggatggagagcgcctgcgtttaaaagatcctgctttatatgatgaagcactgaaatactgtactaactgcaagcgctgtgaagttgcatgtccgtctgatgtaaaaatcggtgatattatcctgcgggcaaaagcagattatcattcacagcgccctaaattgcgggatgtcattctcagccataccgatatgatgggcactctttccactccatttgctcccatagtcaattcagtgaccagcctgaaaccagtgcgccatctgctggataaaacgctcaggattgatcaccggcgtgaattaccaaaatacgctttcggtacgtttcggcgctggtatcacaaacaggcatccatccaacagcagtttacagaacaggttgcttattttcatggttgtttcgtcaattataaccatccacaactgggtaaggatttattgaaagtctttaatggaatggggattggtgttcaattactgacgagggaaaaatgttgtggcgtgccattgatcgccaatggatttattaatcgcgcgaaacgtcaggcgaaagctaacctgcactcactaacagaaagtgtgattgagcgacaaattcccgttgtaacaacgtcatccagctgtacttttaccttacgcgatgaatatccgcatattttgggcgtagatacccgcccgatacgtgatcatattgagctggcaacccgctatatttatcggttgctggatcaggggcgtgatctgcctttgaaaccgatgcccctgaaagtggcttaccatacgccatgtcatatggaaaaaatgggctgggcagcttattcgattgagttaattaagcgtattccgggtattgaattaattattctggactctcagtgttgtggtattgccggaacttatggttttaaaaaagaaaattatgaagtatctcaggggattggtgctggcctgttccggcaaatcgaagcaagtggcgttgatttggtgatcacagattgcgaaacttgtaaatggcagatagagatgtctaccagcaaaaaatgcgaacatccgatgagtttactggcgcgagcactggactgaattaacctattttccagctaatgaggcaattagatcgattatttgcctcattttatgaggcgaatagtgttgttatttgcctcatttagtgagtagaatgaccaactgattgatatcatgaggtgaatggtcatgtggatatgggaacagaaaaattggcctgatttccaatggaatgaacgtgagttgatctccattctacgtgagattaattttaatcagggattgttactcggcttatctgctactgaaaataatgagcaggcaacgctggataacctcttagccagtattctctattcttgtgagatagaaggagaaaaactaaacgtagcatcagtacgttcttcgctggcgaatcatctgggtatcagtgaggaaaccccgtatccaatcagtgaacaatctgatggcattgcacgaatcgcgtttgaagtcgtagaaaaataccaagaaccgttaactcttgaacgcattttgcagtggcatgagtggatgtttcctgtcggttatcggttaattaatcccatcagtggtgggcaattgcgacatggcggtatcgaagtggtgtcgggcagaatagacaagcctgttgtccatttttcagccccgccagccgaacggctgccgcaagaggttgcagagtttatcgcatggtttaaccgctcttattatgaccctaatcttgatcctattttgcgggcagcgattgtgcatctgtggtttgttaccctccatccactggaagatggtaatggtcgtataacccgttttctgactgatctggcactcgcgcaggcagaaagccgatcaatccggctttatgctatgtctgtgagtatctgcgaaagcaggaaacaatattatgaaatgctggaacagactcagcgtggtgggttagatattacgggctggatgaaatggtttctacaaaccctgaataacactctgattgttaaattgaaacaaattgatggaaccgtgaagaaaacccggttttggcgtcgtgttgatcagcgccagctcaatgaagagcaagttaaggtactcaacagaatgttagacggtgatttctctcagggaattaacagtagccaatatcagaaagtggctaaagtgagcagggctacagccacccgtcatctaatctacctgacagaattggggtatctggaaaaaacagaagcgggaggacgaagcactcgttatgttatccatcatgttaatggcgtgaccaaatagggcgagggttctcgccctgaaaccgcaaaaataacgctgatattaaattagtataaccagtcttttcccatctgatctgctgccagaattgcagcatagacctgctccggagtgacggtaaatggcatattgtgaatagtttccccttctgcacagcttactttagcgacctgcataattttctgatgcaaattttcactatcgcgcaggccaagctgttccagcgtaattggaaggccgacttgtacacaaaagtcgagtacggtttctagttcttcactggggctattttctaatatgagttgtgtcagtgtaccaaatgcgactttttcaccatgatacaggtggtgacactcttccagaatggtaaacccattatggatggcgtgtgcagcggcaagccccgcgctttcaaaaccaattccgctgagataggtatttgcttcaacaatattttcaaccgcaggcgttgtcactccggcttctaccgccagttttgctttataaccttctgacaataatgtgtcgtaacacaatttagccagtgccagcccggtcagagaagttgttcctcctgccatagtcggattatgagctgtactgctggcccttgcctcaaagtaggtagccagtgcatctcccataccagcaacaaacagccggacaggtgattttgcaataattttcgtgtccactaacacaatatcgggatttttagggtagaacaggtagctatcaaattcccccaattctgtatacagaacggaaagtgcactggttggtgcatccgttgaggccagagtcggggaaacaagaatgggtaattttgattcgtgtgctacagcttttgcggtatcaagcgtttttcctccaccaattccaattacggcctgacattgattagtgagtaggatggctgacaggcgttctatttctttacggctgcactcgccgttgaagacttcaaaatggctggtgacttcattttctttcaggcttttactgactgtatccccgataagattgagtacaaaattatcagcaataacaaaaacgtggtcagcaagtattttcgtatagtgaccaatgtaggatatcgcatctggcccttggatatatttggatggagactggataactttcagcataagaaatattccttcttcactggaaactcaacataacctgttaatagcatcggtatgtgacaggttatcagtcgtttcgaataaaagtgtttgtttgcctgtccgtcaacactatacgacaaaacatacccgtaggttatctgtaaaagcaggaaatgcgcgatttgtgaggaaaagctgaaaggcgatctgcaccctgattagctcagggcgcaatgtcgttttagcggctctgtgccagtgccttatctgatgagtgagaaaaaaagaatttcaggataaggttcagtaagatgccataagctggcaggaagaagagcatacaaataaacagcttaaatgcataatccactaacgcgatttctacccagtgggttgccataaaggcatcgctgctgcgataaaaagcgataaagaaaaaggcaagagtatcaagcatattaccgaaaaacatggccgctgccggtgccatccaccaatgctggttctgacgcagacggttgaacacgccgacatctaatatctgaccgagaacataagccataaaacttgctgctgcaatgcgggcaacaaacagattaaacgttcctaaggccgaaaaaccctgccacgatccctgaaaaaatagcgcagagatgaagtaagagataatcagagccggaagcatgactgtcataattatccggcgtgctaatggcgcaccgtaaatacgtacggtcaaatctgttgccagaaagataaagggaaaggtgaacgctccccaggtggtatgaaaaccaaaaatagaaataggcagttgcaccagatagttactggaagtaatgatcagaatatgaaacagcgaaagccagattaaagccgaagctttctgctgctgagtaagttgaaacatattgtacctttttgctggatggggtgagggaacccagaaacaaatttccctgaattatcaggagagaagcatcatacgcgggttgagtaatatactcaatgggtttcaaaatgcggtgattgaggtgaatatgtaatataatccaccgctatagattgtttgaacctacagagattgttatgtctgatgtttttgccaaccctgataaaacacttgatacacagggattacgctgcccggagccggtaatgatggtgcgtaaaacggtccgtcacatggatgtcggacagactttattgattgttgcggatgatccggcgacgactcgtgatattcccggtttttgtcgttttatggaacatactctgcttgctcatgagacagcggaaactccttatcggtatctaatcaaaaaaaattaaaagattgcttaataaactaaagctttagggcac

SEQ ID NO: 340 - DNA, 21876 bp, Xenorhabdus sp.
  CDS (7262)..(18769)
cgaatgctagaatgtataaaaccggcgatctggggcgctggctaccggacggtaatatcgaatatctggggcgtaatgattttcaggtcaagatccggggctttcgcatcgagccgggggaaattgaagcacaattagtcgcctgtcagggtgtcagggatgccgtggttattgcccataagacggataagggtgaacaacgcctggtggcttatctggtgcctcaacctgacgttacgctggaagcagccgatctgcgcgagcagctgagaagtagtctggcggattatatgctgcccaatgcctttgtcatgttagataccttgccgctgacccccagcggaaagctcgaccgcaaggcgctgcccgcgccggacttgtcagcggtcattacccgaaactatgaagcaccagtgggtgatgtggaaacggcactgacagaaatctggcaggagttactggggctggaacgggtcggccgtcacgaccatttctttgagctgggcggacattcgttgatcgcggtcagcctgattgaacagttacgccgtcggggatattcactggaggtacgcagcatttttgcaaccccattgctttcggaaatgacgcaagcaatacactcacaacaggatacttccgatatttttgttcccgccaatcgtattcccgatggttgcacggttatcaccccggatatgctaccgttggtgacgctgtcacaaactgaaattaacacgattgttgcaactgtggcgggaggtgtggctaatgtacaggatatctacccgctgtcgcccttgcaggaaggtcttttattccaccaccagttacaggaaaatggggatgcctatctgtcaaatagcctgctggcttttgatacccgttcccgtctggatacctttctgaatgctctgcaacaagtgatagaccgccatgatattctgcggacagctttctgctggcagggactgtgcaaacccatgcaggtagtctggcgagaagcaaaactgccggtgatgtcgtttgttcccatatcggcagaaaatattccgtcacaattgcaggcacatatcaccaaccggttggatatcactcaggctccgttgtttactgccagtactgtctatgatcccgcctctgaggaatggttgttggcactgagtttccatcatctggtctgcgataatatgacactgacgttgatcatggatgaaattcaacagctattacagaaacagacggtacagggtcagtcgattgagctaactccgccactgctgtaccacaattttattgcccagacccttaacgtaccggattcggtacatgaagaatatttccgtcaacagcttgcggacattgatgaacccaccgcgcctttcggttttcttaatgtacaaggcaatggcactgatgtgacggaatcccgtttatcactggataaaacgctggctcatactctgcgtgcacaggctcggtgtttaggcatcagtgcgagtgtgctgttccatgtcgcctgggcacaagtcttggctaaaatctgcggacaagaaaaagtcgtattcggtacagtgctattgggacgattacacggctcggccaatgccgatcagatgatggggatgcttattaataccctgccaatccgagtctccttgagtaatttcagtgtattggaagtcgtgcaggcgacagccaaaaatctggcaaacctactggagcatgaacaagctccgctggcacttgcgcagaattgcagtggtgttatccctccgatgccactgttcagtgtattgttcaactatcgtcacggctcatccgttcccgtggaggcagagaaaactgtctggaaaggagtgcgcctgctggcatccacagagagaacaaactatcccatcaccctttcagtggatgatacagaggatggtttcacgttggtggctcagagcgtggcgggtgccgacccctgccgattggtgaattacctgcatactgccctgagtgaattagttaacacactgacggctgaaccccagcggcctgcgcttgatttatctattctgcctgcggctgaacgtcagctactgttggagaatttcaatgccatacaggctgatttcccaccagataccttgatccacgaattgtttgaacaacaggttgttcgaacgccggaagcgattgccgtgatgtgggaggcggaaacgctcagttatggcgaactgaatcgtcaggctaaccagttggcccattatctgattgaattgggcgtaaaaccggatgatcgggtggctatctgtgtcgaacgcagcttagacatgatcgtggggatattggctattctcaaggctggcggtgcttatgtgccctttgatccggcctatcccgctgaccgattaacttatatgctggatgatgccgaacctgtggtgttgctgacgcaaaccacactgggcgaaatcactggcaattctgcattacctactgtcagatttgatgacctgccctcatccatgctagcaaacctaccggaaaccaatccgctggccacagtgcagggactcactccacaccatctggcgtatgtgatttatacctccgggtccacgggtcaaccaaaaggcgtgatggtagaacataccaatgtcacccgcctgctggcagcgacacaggtgaggttccggtttgataacaacgacatctggacgctgttccactcttttgccttcgatttctccgtatgggaattatggggagcgctggcttacggggggcggctggtcgttattccggctgaatgtgcccgctcaccacaccagttctatgagctgctgtgccgtgagcaagtgactgttctgaaccagactcccagcgccttccgtcagttaattgtcgcgcagaatgcaatgccgcacgcgcaacacaccctgcgttgcattatctttggcggtgaagcgttagagttgcatacccttgcgccgtgggttgaccgcaatcccaccgatcagacgcgtctggtgaatatgtatggcatcacggaaattactgtacatgccacctatcgggaactgaccgaaccggatatttattcagggaaaggcagcttgattggtcagccccttgacgatttacgtatctatatccttgatgcctatggtcagcctgcccctctgggcgtggcgggcgaactctatgttgccggtgcaggcgtggcacgtggttatctgaaccgaccggaactaacctcagagcgtttcctgcctgacgtgttctccgataatcccgggatgcgtatgtacaaaactggtgatctggcccgctggctgccggatggcaatctcgaatacctcggccggaatgattttcaggtgaaactgcgtggtttccgcattgaattaggggaaattgaagcaggtctgatgcagtgcccgggcgtacaggaggccgtcgtgatagcccgtgaagacgctgaagggaatacccgtctggtggcctatctctgtgctgaagcaggtacggaactggtgccggttgatctgcgcagacaactggcacaacatctggcggaatatatgatccccagtgcctttgtgatgctggataccttcccgctgacacctaacggcaagctcgaccgtaaggccctgcctgcgccggatttatacgctgtgatcacccgggattatgaagcaccgatcggtgacgtcgaaattgcactggcacaaatctggcaggagttactggggctggaacgggtcggacgtcacgaccatttctttgaactgggcgggcattccctgattgctgtcagcctgatagaacagttacgcagccggggatatttactggaggtgcgtagtatttttgccaccccgttgctttcagagatggcgcaggcgatacaggcccggcaagattcgccggatattcttgtcccacccaatcgtattcctgacgattgcacacgtattatccccgacatgttgccgctggtaacactgtcacacacggagattgattcgattgccgcaactgtgatgggtggcgtggctaatgtacaggatatctatccgctgtcacccttgcaggaagggattttattccaccaccagttgcaggaaaacagtgatacttatttattaaacacgctgttagcgtttgatacccgctcccgtctggatacctttctgaacgctctgcaacaagtgatagaccgccatgatattctgcgcaccgcgttttgctggcagggactgagtcagccggtacaggtggtctggcggcaagcaaaactgccagtgacatcgtttgttccagcacaatctattcaaacacaatctattcaagcacaacaacaggcgcatagcatctcccgactggatatcactcaggctccgttgtttgccgccagtattgccctcgactcggacagtaacgaatggcttctggcgctgaattttcaccatctggtcagtgatcatatgacactggaatttattatgaaggagatttttctgttattagacggtaaagaggaatctctgcctacaccactgccttatcgtaattttatcgcccagatcctgaaaatgccgaattcagtacatgaaagttacttccgtgagcggtttgccgatattgaagaacctacggcaccttttggcctgctggatatacaggggaatggcgcaaacgtgtcggaagcccgtttgcttctgaatgatacgctggcccagactctgcgtgcgcagtctcgccgtctggggatcagccccagtgtgctgtttcatgtcgcttttgctcagatgttggctcatatcagcgaccgtgaagaagtcgtattcggtactgtactgctgggacgattgcacggttcagccggggctgatcaggttatggggatgtttatcaatacattgccgatcaggatatccctgaataatctcaatgtgtgggaggtagtgcgggcgacagccgcaaatctggctgaactactggaacatgagcaggctccgttggcactggctcaacggtgcagcggagtgatcccccccttacccttgtttagtgctctgtttaactatcgatatagcccgtcagaattgggcgagaatatcggttggccgggcatacgcgtattacagtctgaggaacggacaaactatcccattactctttccgtggatgatcacgggaacgatttcacgctggtggctcagaccgtagacggaattaatccggacagaatcgtacattatctgcacacttccctcagtgagctggcggatgcactgaccgctgacgctcagcaatctgtgctcagtttatccatcctgccggccgcagaacgtcagcagttactggtggatttcaacgcaacacaggtcgattttccgcagcatgcccttatccatgaattgtttgaacagcaagtctcccggacacccgatgctatcgccgtactctttgaagaacaaaccctgagctatgaagcccttaaccgtcaggccaaccaattggcccattatctgatggcattgggcgttaaaccggatgatcgggtggctatttgtgtcgaacgcagcttagagatggtggtgggattactggctattctcaaagcgggtggggcttatgtcccccttgatccggcttatccacctgagcggctggcctatatgctggaagatgcagctcctgtggcgttgctgacgcaaactgggctggcgggtcaattgacctatccgatccccacggtgcaactggataaccaaacttcgctttttgatatccagcctgaccataaccccgatgcaacctcgttggggctgaattcccaccatctggcctatgtcatttatacctctggctcgaccggacaacccaagggagttatggtgacccaccgcaatgtcatcaatctgtataccgggctgcaatcggtgatcgatatcacgccaccgtgtcgtactgccctgaatgccagcattgtatttgacgcttcggtacagagttggctgcaattacttgcaggccatacactagttatcattccggaggctattcgtgccaatacggagcaactctggcgttatctggcacatcacgcggtggatctgtttgactgtactcccgtgcaactgcaatggctgttgaatgcggggctgggtaccgatacggattatcagcccaaactggcgttaatcggcggcgaggccatttctcctgtcttatggtcgcgcttgcaacaaataaaaacgtcgcgctttatcaatgtctacggccccacagaatgtaccgttgatacgactttttgtgtgatagatcattccctgtcgtcgccgagtatcggtcatccgatagccaatgcccgaatctatctgcttgatgcttatggtcagcctgtgccccttggcgtcactggcgagatttatatcgggggagcgggtgtggtccggggatatctgaaccagcctgaactcacagcagaacggtttgtggccgatcctttcagcccacaacttgatgccagaatgtacaaaaccggtgatttaggacgctggcgaccggatggcaatatcgactatctggggcgtaacgattttcagatcaaactgcgtggtttccggattgaaccgggagaaattgaggcacaactgctggcctgtgatggaattaaagaagcgatggttattgtccatgagacagataacggtgagaagcgcctgatagcctacctggtggcacaaccagacgttacgttggaagctgccaacttacgcgaagaactgaaactctgtttgcccaattatatgctacccagcgcttttgtaatgctggataccttcccgttgactcccaacggaaagctcgaccgtaaagcactacccgctcctgatttgtcggcggtaataaccagtgactatgtcgaacctgtgggtgacgtagaaaacagactggcacaaatctggcaggaactgctgggtctggaacgaatcgggcggcatgacagcttttttgaaatcggcggacactcacttttagccgcaaggctgatagcccgtatacaaaccgaatttttagtccagatacctatcgtttcaattttccagtcatcccgattatcagagctatctgaactcattctctctgcccaaatgaattcagcatggggagatgactcagagttaatcatgaaaaacctcgattcaatgtccgcagaagaattaatcgcaattttaagtggagatactgaagaatgagcaaagctaatatcaatatcgaaatgttaaaacgagctgttttagagaaaaaagttaaagaaaaaattaaacagtgcgctaatgaaactcgttcattgcacatgccgataacgaagacagatcgccatgcgcctttagtattatcctttgcccaacaacgattatggtttatcggacaattcgattcagccgcaagccgggcctatcatatccctgtcgcattgcgtcttacggggaaacttgaacatcaggcactcatctccgctcttgataaccttgtggcccgtcaggaaagtttgcgcacccactttacattggtggatgatcaaccttgtcagaaaatagcccctccggatactggcttttcaatgagttatctggatttacgttctctgagtgaagacgaacgttcagcccgtgttgacgaactggctgaatctgaagcccggatgccttttgatcttactcagggtccgttaatccgggggcagctattgcagttggataatgaagaacacgtcctgttgttcactcagcatcacatcatttctgatggctggtccagtggtattttaatccgcgaactggcggcattttatcaggctgccctgaccggacacgacgctgatttgccaccactgcctatccagtacgccgactatgctgcctggcaacgcagcgcattgcattgcgatgaactgaccgtacagcgagattattggtatcaccagcttaatggagcgccatccctgctggaactgccaacggatcgccctcgtccctctgtgcagagctatagaggaagtaaaatacctgttcacctcgatggggaattactcactgccctgaaaacatttgcacaaaatcagggagccacattatttatgactctcctcacggcgtgggctattgttctctcccgtttgagtggtcaaaacgatattgttatcggtcttcccattgccaatcgtactcgcaccgaactggataatctgattggttttttcgtcaacacgctcgccttacgtattgaatcaggccaatgtcatacaatagcggaactactggcccatgttcgtaaacagacactggcggcttatgctcatcaggatctgccttttgagcaggtggtggaagtgttacaacccgaacgcagcctgagtcatagccctatctttcaggtgatgctggcactggacaacactccggctcaggaattgaaacttcccgggcttgaactttctattatcgaacaaccgcaatacagtgctcaatgtgatttaacgctgtcgttcactgaaacagccggaaattcgggcttaatcggaacgctaatatacgcaactgatttattcgatagggaaaccgtggttcgtattgcgggttattttcaaaacgtgataaccgcaatgatcgctgatgtgaatcagacgatttcatcactgcctatgttatccgcaatggaacaacaacaattattagtggattttaatgtcacgcaagccgactttccgcagaatgccctcattcatgaactgtttgaacagcaagtgacccaaacgccggaagctattgctgtcgtctatgaagggcaaacactgagttataaacaacttaaccgtcaggctaatcaactggcccattatctgattggattggggatacaaccggatgatcgggtggctatctgtgtcgagcgcagcccggcattgatcgtctgcctgctgggtatcctgaaagcgggcggtgcttatgttcccctcgatccgacataccccgcagaacggttgacctatatgctgaaagatgccgctccggtcatcttactgactcaggtcgcccagcgcgataagttaccggatatcgtacctgtgcgcgtaattgatgctcaggatacctcattagaaacccggtcatctgaaaccctgtcattggtcacacaaccgagccataacccggatgcacaagcattgggactgacatcgcgccatctggcttatgtgatatacacctccggttcaaccgggcaacctaaaggcgtgatgattgagcaccgtaatgttaatcggttggctatcaatgggggttatgcggatatcgggccgaatgactgcgtcgcgcactgttccaatattgcgtttgatgcctcaacatgggaaatctggtcagccctgttaaacggcggacgcctgcatgtgatcccacaagccgtattactcaaccctgaacgttttcgtgacgaattaatcagcggtgaagtcacggcaatgttgttaacggtgggactgttcaatgcttatctggaaatactctctcccctgttcaggcaattgcgctatctgcttgtcggtggagaagtgctcaatccgaaaaaaatacaacaggtacaattatctgaatcccggccaacccatctgattaatgcttatggtccgacagaatccaccacaatagccaccacttatgcaataacaccggctgttaatgctgcatataccattccaatcggacgccccattgctaacacccaaatctatattcttgactcttctggccaacctactcctcttggggtagtgggcgaaatctatatcggtggcgccggtgtagcccgcggttatcttaaccggcctgaacttacgcgggcgcgtttcctgccggatcggttctctgccgaagcggatgcccggctgtataaaaccggtgaccttggtcgctggttgccggatggtaatattgaatatctgggtcgcaatgattttcaggttaaattacgcggtttccgcattgaactggatgaaatcgaggcgcgtctgaatcaatacccggggatcaatgaatccattgttatcgcacgtgaagacattcccggggacaagcgtttggtcgcttacgtgcaaactcagccggatattgaactgatgccaaccaaactgcggcagtatctcactcagcatctggcagactatatgctacccagtgcatttgtcatgttagataccttcccgctgacgcccaacggtaaacttgaccgcaatgcactacctgcacctgatctgtctgcggtgataacgcgtgactatgctgaacctgtgggtgacgtggaaattgcactggcacaaatctggcaggagttactgggattagagcgcgtcggtcgtcatgaccatttctttgaactgggcgggcactcgctgattgccgtcagtctgattgaacaattacgcaaccgtggatattcactggaagtacgcagcgtttttgccacaccgttgctggcagatatggcgcaggcaatacagacagggatagatactccaccggttctgatcccacccaaccgcattcccgatggatgcacagctattacgcctgagatgttgccactggtgacgctgtcacaaaccgaaattgacaccatcattgcgacggtaagcggcggggctgctaatgtacaggatatctatccgctatcgcccttgcaggaaggtattttattccaccaccagttacaggaaaacagtgatgcttacttattgaatgccctgctggcttttgatacccaagcgcgtatggagactttccttacggctctgcaacaggtgatagaccgccatgatatcctgcgtactgctttttgttggcaaaatctgagtcagccagtacaagtggtttggcggaaaacgcgcttaccggtgactccttttatcccgacatcgccagagaacatctcggcacaattacaggcgcatattgtcatccccataaatatcactcaggcgcccttgttcgcggccagtaccgtttacgatcctgacagtgacgaatggttactgggactgagttttcatcatctggttagtgaccatgtaacactagagttgatcatgggtgagattcagcaattattacaaggagaaaccgagtcactacctgtgccactgccgtaccgcaactttattgcccaaatgctgagcgtaccggcttcggagcatgaggactattttcgtcagcgacttggggatatcgatgaacccacagcaccttttggtttacttaatgtacagggggatggtacagatgtaacggatgcacaactgtcgctggaagcaactttgtcgcaaactctccgcgcgctggcccgccaactggggatcagcccgagtgtgctgttccatgtcgcttgcgcacaggtgttggcccataccagcgggcgtgatgacgtggtgttcggcacggtattgtcgggacggctgcaaggtacaaccggagccgatcaggtgatggggatgtttatcaacaccctgccggtcagaatatccctgaaaaatctcagcgtgctggatgtagtaaaggcgaccgcagcagatctggcggtcttgctgactcatgaacaggctccgttagctttggctcagcgttgcagcaacgtctcccctcccatgcctctgtttaatgttttgtttaactatcgtcacaactcatcagattctatcgaaaattctgttttgaaagacgtgcgtctgctggtatcagaggagagaacaaattatcccctggctctcgcggtagatgattcaggggaagatttctctctggtagcccagtctgtaaccggaatagatgctgaacgaatagtcaattacttgcacacagcgctcagagagctgattcatgcgctgatcaatgagccccggcagctcgtgcaggagctgcctattctaccggtgtctgaacgtcagcagttactggtcgagttcaataacacgcaaaccgatttcccgcaggctactctgacccatgaacaatttgaacagcaggtgatacaaactccaacagctatcgctgttgtgttcaaagaacagaaactgagctacgacgagctcaatcgccgggccaatcaactcgcccattatttaattaaactgggtgtaaaaccggatgatcgtgtcgctgtttgtgttgaacgtagcccggacatggtcgtaggattattggctatcctgaaggcaggtggtgcctacgttcccctcgacccggcctatccgcaggatcgcctgagttatatgctcaatgatgctgctcctgtcgttcttctcactcaatccgccctgacggaaaaactggataatcaattaccaactatcctgtttgacgagcctactttatatgcccttgatgacatgccagaaacaaaccctgaccgtcgggcatgcgggcttaattcacgccatctggcctatgtgatttacacctctggttcaaccggtcaaccgaagggcgtcatgattgaacatcgcagtctttgcaatttagccttgtcgcatctggatattttggcggcagaaccgaccgaccgtatcctgcaatttgcttcacatagttttgatgcctgtattttcgaatgtgtgatggctttgctgagtggagccagtctctatcttgctgagcgcgaagatatcctgcccggtgccgccctgttaagaactttagaaacccatgccatcacgcatttgacgctgtcacctactgcgttagcggcgatggataccctccctgccacattaaaaacgctgatcacagctggtgaagcttgtccactttcgcaggtcaggcgctggtctgaggggcggaacatgattaatggatatggaccaactgaaattacgatttgtgcaactacttatcagtgtaatagtcaggatgatatagcaccgcctatcggtagcccgatagctaatacccgaatttatattcttgatccctttggtcaacttgctcctttgggtgtggtcggtgaaatttatatcgggggcataggtgtagcccgaggatatctcaaccgtcctgaactgactgccgaacgttttctgcccgacccattttccaccgagccagaggcccgtatgtacaaaaccggcgatctgggtagctggttaccggatggtaatattaaatacttaggccgtaatgattttcaggtcaaactaaggggattccgcattgaactgggagaaatcgagagtcagttattgcaatgtcccggtgtacacgaagcagtagtattggcacgtgaaggagaagtacataaaggagaaaataatgctggcgcgcagaagcggctaattgcctatatcttacctcagcccggtgttgaactaatcccggctgaattacgtcagcaattaatgcaacatctggcggaatttatgcttcccagtgcatttgttatcttagatgctttcccattgaccccgaacggcaaacttgatcgtcaggctctccccgcacacgaacagtcagcggtcattacccgaaactatgaagcaccagtgggtgatgtggaaacggcactgacagaaatctggcaggaattactggggctggaacgggttggccgtcatgaccatttctttgagctgggcgggcattcgttgatcgcggtcagcctgattgaacggttgcgctgccggggatacgcactggatgtacgtagcgtcttttcagcaccacgacttacagatatggcgcagacaatacagacccggcaaaacatatctgattctgtggtgccacccaaccgcattcctgccgattgtactgtcattacgcctgatctcttacccttagtgacactgtcacaagaagaaattgatattattattgcaactgttcccgatggagccgccaacgtacaggatatctatcccctatcccctttacaggaaggtattctgttccatcaccagttacaggaaagtggcgatgcttacctgtcaaacagcatactggcttttgatacccgctcgcgtttggatgctttccttgcagctctgcaacaggtcatcgatcgccatgatattttgcggacggctttttgctggcaaggattgagccaacctgtacaggtggtctggcggcaggcgaagttgtttgtaacaccgttcattcctacatcagcagagaatatcccggcacaattacaggcaaacatgccgtgtcggttggatatcagtcaagctccgttgttcgctgccagtaccacccatgatccggacagtgacgaatggctgttaacgctgaatttccatcatctggtcagcgaccatgtcacactggaattaatcatggatgaaatccaacaagtcttacagggacgagaggaatccctgcctgtgccactgccgtaccgcgattttattgcccaaatgctgattgtacccgcttcagtgcacgagaattacttccggcagcgactggccgagattgatgaacccaccgcccccttcggtttgcttaatgtacaggggaatggcaccgatgtgacagaagcacaactgtcgctggaagcaactttgtcgcaaaccctccgcgcgctggcccgccaactggggatcagcccgagtgtgctgttccatgtcgcctgggcacaagtgctggcccacaccagcggacgtgatgacgtggtgttcggcacggtactgtcgggacggctgcaaggtaccacaggagccgatcaggtagtggggatgtttatcaacaccctgccggtcaaaatatccctgaacaatcagactgtacttgaagtggttcaggcaacggcaaaagatctggctgacctgctggaacatgagcaatttccactcgctctcgcccagcgttgcagcggtgttatacctccccagccgttattcagtaccctgcttaactatcgccatacttcgtcccacaattcgtcagattccacggataaatccagctgggaaggtgttcgtctgttgtctgctaaagaatggacaaactatccgctggatctgtcggtggatgattttggggacgattttgcactggtcgttcaagcagtgaacagcgtcgatccacgtcgggtggtgaattatctgtacactgctctttgtgggctgactgaggcactgcaaaacaatcccagacagcctgtgttggcgctgtccattctgccggtagctgaacgtcaacagttactggaagtcttcaatgccacacaaactgacttcctcccgtcaaacgcacttatccatacgttgtttgagcaacggacacagcagactccggaggccatcgccatcatttctgagcaaggctccttcagttatgatgaactgaaccggcgagctaaccagctagccaatgctctgattgaagcgggtatccggccggatgatcgggtcgctctgtgtgttgaacgctgtccggatatgatgattggtatactgggtatcttaaaagccggtgcggcgtatgtaccgcttgatccgaatcacccggataagcgacgggcttatatcctgtctgacagtacgcctaaattactgctcacccaacagcatttacagccacaggctcagaaccctgatattcctgtctggttattagatgaggcggattatctggaacgggtcgcccaatacgctgtcgctaaccctgaaccggaacaactgggattacagaatcatcatctggcctatgtcatttatacctcgggttcgacggggctccccaaaggcgtgatggttgaacatcgtaatgtggtgaactttattcaggcccagtgtcagataaccgcgcttaatgcggcagatcgcgtcctgcaatttgccacaatcgcctttgatgcgtccgtggccgaaattttcccgacactggcaacgggtgccaccttaattctgcgaccctctcaccttcagataccggatgccgctttcggccacttcctgcaagaacaagctatcagcgttatcgatataccgaccgctttctggcatcagtggggacaggaaatcaaagctggtcgcagtgggttcagttcaaccctgcgttcaattacggtcggcggggaaaaaactaaccttcactctcttgccgactggcaatccctgcctgaaacacaagactgtcgctggacagacacctacggcccaacggaagcgactgtcattgtaacctctctgtcactcaatggtggcgccttactcgatgcggctgaaacgttgtccattggtcgcccaatcgccaactgtcgaatttatctactggataaaacacaacaactggtgcctctgggcgtgacgggtgaaatttatatcggtggtgagggcgttgcacggggttacctgaatcgctctgacttgattgctgagcgctttgttgctgatccgttcagtgccgaaccgaatgccagaatgtataaaaccggcgatctggggcgctggctaccggacggtaatatcgaatatctggggcgtaatgattttcaggtcaagatccggggctttcgcatcgagccgggggaaattgaagcacaattagtcgcctgtcagggtgtcagggatgccgtggttattgcccataagacggataagggtgaacaacgcctggtggcttatctggtgcctcaacctgacgttacgctggaagcagccgatctgcgcgagcagctgagaagtagtctggcggattatatgctgcccaatgcctttgtcatgttagataccttgccgctgacccccagcggaaagctcgaccgcaaggcgctgcctgcaccagagttgtcagcagttctcacccgggattatgaagcaccgattggtgacgtggaaattgcattggcacaaatctggcaagaattactggggctggaacggatcagtcgtcacgatcacttctttgagctgggtggtcattctcttatcgcggtacggttaataaactgtatgaacaagcaaggcatggcggtatcactggcaacattattctcttacccgatattatgtgatctggctcaggcgattaatagtcaatcagctaaactaagctctcctcttgatgccaatcccgtgcctttaaggcctgaaggtcatttaccaccattattcctgatacacgaaaccacaggtgatccgctggtgtattcgcgactggcaactttgctgccagccgaactgcccgtttatacattgcaggcgatgggtctacacacagtggagaatccaccagcgtccattgaggagcttgctacttaccatattgatgctattcgccggatccagccgcatggtccttatcgtctggcaggctggtccatcggaggaactatcgcttacgagatcgccctgcaattggttagcgatggcgaaaaaatcgattaccttggtatgatcgattcttacaacttagattcttacaatttcagtgatcatgaaacagactggcagaaagatatcaatctgcttatccagtctctgaataattacggagagcaacttgagggagacgattcggatgatctttatgatttccgcgattgtgaagctctgcaatggttgcctgcggacgttaaaaaagaggatattctcttccgcttgaatacccagaaactgatcctgcaacttgagaaaaaatatagaatttctgcttcctctctccccattcatctctatacctgcgatgatttagcggccggatccgactgctggcatggctggcacgacattgttagtgaccgctctgaacgccaccctattggcggagggcattacaccattatgcagccgccttggataaaccatctggccgattcaatgactgagcatttattaccggcttcttactcaccgcacatcattattcaacatggagatgactctgtttcaccacttttctgtattcccggcgcaggtgccagtgtttccagttttattgagctggcattagcccttcccccacagttgcctgtccatgctttgcaggctcgtggcctgataaatacagacctcccgccttatatcagtgtggaaggcacagcccgcgcttacattaaggcaattcgtcaggcacagcctcatggcccctattatctgctcgggcactcttacggcggctggcttgcttttgaaatagcattacaattacaaaagcaaggggaagagattgcggctctcacccttattgattccgatgggcctgaaccacaggagagcgcttcaaaaaacagccctcctaaggttattgaccggattgaaacgttaatgagtctgattgatatctataacatgatgctaactcagccattaacgctaacaaggcaggatttcgagaatctgactgaagacgaacagatcatgctcttgcttcaggctttggtggatgtagagctattccctgaaaatacagagaaacctttgttacagggtatcgttcaggttatgcaggccaacctgaattcaaactataccccccaaaactgctataacggccccgtttatttgattaatgcccagggggagaatattgatgaaatagctactcgagaaaatatctggcgtcagtatgtgactcagttaaatactgagattgtgcccggtaatcacatgactatgctatccaatcctcaggttaaacagctggcgactttgctgtggaaaattctgcgggaaaaattaatgaccgagataccggagcagaaatgatgacgtcaaccattaaacaaccggcttaccggattttgttctcacttttaaatcgttcacgttggatcctgcttattgccattttagccagtatcgttaatggtatttccaacgttttcctcatcacgttggttaacagaatagtcaccacgtctggcaatagttatcacttactcgccgtatatttctgtattattgcggtgctggctattgtcagtcatgtaatgagcggggtgattttcgccagactcagccagaataccatcgcaaggatgcgtgagtttatctctgagcgtattacccgtgctccttttcgccagatagaaatactgggcgcttcccgtgcccagtctatcatcaccgatgatacaaccaatgtttcactgttgtttttcaccctacccaatatcgtgacgcagagttccattatactgggttgcctgatctatctggcttggctgtcatggtcagtgttttttcttgtgttaacggtgatagtgattggctcacttggttatgctatcggtggaaccagcgcgctcgcatcactaaaagcagcaggtaagtcacaagatcgcctgttcaatcatttcaacgccttatttaccggagcgaaagagctaaagttacatttttcacgcgctcaggctttcttcacccattcacttggtcgtgaaattggtgcggttagacagcatcgtatccgtgctttcagtgtttatgcctttggtgccggctggatgtatcttctattttatatatttcttgggctggttattttcgctccggcggtaatagtgggactgaaagtcactacaatcgcaggttacgtgattgtctttctgtttatattgatgccgctggacagtctgctgaacagtattccatcactgaatgcggctcgcgtatcgctaaaccgcatcggttatgttctgtctgaactgactgagcaggatcacttggacgagcaggtttctgccagtgaatttggtgaagctaacttactgcaactgtcaggcattacacacaattattatcgtgagaaagaagacgatatgtttcagcttggtccaatcgatatgacgcttaaacgcggagaaatcacttttctgattggcggtaacggcagtgggaaaacgacactggccaagctgttaagcgggctgtatacaccggaaagcggcacaattactgttgacggaaatttgattactgatagtaacagagctaactatcgtcagctgttctccgccattttctcggattttcatctcttcgaaacactgataggtctgactgatactgattcagtactggatgcacgagcgaacgccctgctcgctaaattacatttggagcacaaggttaaaattcaggatggttgtttttcaactcgtgagctttcacaagggcaacggaaacgcctcgctttagtggttgcttatttggaagatcggccattctatctgttcgatgagtgggccgctgatcaggacccactatttaagattgtattctatcaggatctattgcccgaattggcggcacgcggtaaagctgtactggctattactcatgacgaccgttttttccatttagcggatcattgcatcaagctggaaaatggtcagctgaccgggcagaaatctgatatacataatggcgttacagagcatcaatcactttgaattcgatgacaacaacttccatttcaggtgaaaatgagccttcacgttcaaagaaatgttgatgttcctgttgccagtgcttcaccgaacgatctccctcgccttctttccaggcgagttcggttgtcatttctgagaattttatgaggtgtaaggccatcactctgacaacacaggctggcgtatctttgctgttcaatacaatgtattcattaccaattaaaatactgctgctacagtgtttataggaggaaaatgaacagctggttgcagttttaatttctttggagactaattcagcaagaacgtcctgtagttcaggagaatcaccaaacttccagtgttctgctgccggatatttgtttttgactatattcatcattttatgagattccatcgttacaactattatgtgacaactactattagcggcaatattttcacttaggtctttgccataaggaagaagacctgggaattatatttgtgttacgtaaaattaaagccaaaataccaccagaaaaaagtaaagacagcttttctaaatgagaagtatgttggcgatgatcccacgcctcttctcctgcccgctgcacttttactccaattttatggtaacacttatatgcgctggctattgcccacgcagagcgaattggtaaataacgtagccccattaatgcggaagcataatatgattccgccgcagtaagaattcgatttgaaacatgggataacgctatacgattttcccttgctgtcagtgatgtcactgtcggttctaaaccttcttgttcaagccaatcaaggggaagataacaacgacctattttcgcatcgtcgattatatcacgagctatatttgttaattggaacgcaattccgagatcacaggctctatctaatactaaaggctctttaactcccataattctggccatcatcaatccaacaacacctgcaacatggtagcaataatctaaagtatcattaagacttttatactttactccccgaacatccatagcaaatccctccagatgttcaagagcctgagataacggaatttggtgtttagtgacaacttcttggagtgcagaaaatgcaggtacttccatcggaagacccagataaacgtcattagtcattttttttagaaaattaagtttattaattttattttccagtggattaattaaacattgcccccccaaatcctgactatcaataacatcatcacaatacctgcaccatgtatataacattaacgtacttctacgcgtatcattattaaatagacgagaagccgcatcaaaactctttgagccagatgacatacaatgttcagcatgagaaaatagctcaaaattcattaagataaatcctctatcattcaactcgcagtgtttttagcacttt

SEQ ID NO: 341 - DNA, 28207 bp, Xenorhabdus sp.
  CDS (19629)..(26336)
gtggtgaagctgaggatgtgtctgaaccagttcacgcaagccagcaagcccatctctgactagcggggagtgttcgatgaaattcggcgaaaaataacgttcaagtgctcctgcatcacggtcagtaaacagctcgcggtgcgcgcgagctactacattgcgtgctacaacatcgcgtgaagatataacctgattgatagcctgattcattatggatgctcccgcattagtcgttggaactcatcacgtgtttgatacgcgtatattcatcgaaactataagccgacagatctttaccgtatccggagtgcttaaaaccaccgtgtggggcttctgccgcaagaggaatatgggcgttgatccagaccgtgccaaaatcaagctcacgggacaggcgcaatgttcgagcatggtcacgggtccagacactggaggctaacccgtatttcacgtcgttggctttctcgatagcttcttcttctgttctgaatttctgtactgtgataaccgggccgaaaatttcggtctgaatcatttcatcgtgctgctccagaccggtgattaccgtaggttcaaagtaatatcccggacgttcagcctgacgtccccctgtttcgatacgggcataagcaggccgacgtgcaataaatcccttaacctgttccagctggcgaatattgttaagtggcccatatagcgctttttcatcttcaggatcgccaaatcgggttgctttagctgccgcgactaatttcgtcacgaaggtatcgtaaaccgattcatgcaccagcacgcgcgaagcggctgtgcagtcctgaccggcgttgaagtaccccgcaatagcaatggtttccaccactttgtccatatccgcatcggcaaaaacaatgaccggagctttgccgcccaattccagatgtgatcgggtgagattggctgctgccgaagaagcgacctgcaaaccagcccgcacagagccagtgatagaaaccatagccggggttttgtgtgaaacaaccagagcgcctgcgctggcattgcccagtactacgttgaacgtaccggcaggaaagaacgttgcagccagttcagccagcaataaagtgctctccggcgtagtatcactcggcttaaggacaatagtattgccagcggccagagcaggggcaatcttccatgctgccatcatcaatgggtaattccatggagtcacttgccccactacacccagcggctcgcggcggatactactggtcataccggaaagatattccgttgttgccttactttccaaaaagcgggctgcaccagcgaaaaagcggatatgatcagccgaagttgccacttcctcagaggcaatcagatgtttgagctgcccggtattgcggctttgcacctcaaccagacgttcagcgtttttttctaccgagtcagccagtgctaaaagcgccttctggcgctcagaaggggtactccggccccatactttaaatgctgctttagcagatgcataagcattattaacatcttcagcattcgcattaggagaacgtgcataagattcacccgtgaccgggctgatcaaatcaaaatattcagagcctttagattcaatatactgtccattaataaaatgcctgagagtggctatcgacatgcttatctcctgatagggttaatgtataaaatataacctacaaattaatatatttaatggttacaccacagtcaaatatgtataaaaaatgtaaaaatacgtgagccattagatacatacgtgtaactttcaggcatttccggcaggaaaattatgcgaatctgtgagaaggatcgaagatttcaggcatgctgaggcgggtgattctgtggtgggtgtagctaaaccaataactgggtacagcttaaaagtcgaggtgagacatttaaataactttaattatcgtttgttttttgagctacgtttgttcgtcggacttctttatactaacgcaaataggtaaataacctatttgctattattcattgtcatttcagttctctattagtgatgaagtaataagaattcttattttaaatattttcatcaaaaaagggggcgatatgaacgtcttatttaatataagttttgatggacttatctttgataagccagctctgaccaacttatttgatcggagaacatcaaaatgcaccctactcactatctgaatgcccgtataaagggtcaaattcacgctgcgagactaatcatgcagcctgtacaaactcgtcagataagttgccatgctggaactcatgttcctggttgtatttctacgggctaccagccgctgtcatgctcccaatagttagatctgttatgaaatagagtattcacgctcaatgaacgtccctaccactttgtcatgcatctcttcggatttggaataacctattgtctttctattcagcctctttatccggatacgaagcgtaagatttgttctctcaatacgttgggtaaatttctttccctgaccgcaaaaacgtctttcagcgtcaaaactgcggctcctctattagtgcataaacaaaaagattcaagcgaccggaacgataagataaccctctctggaacagcaactccgggggctaccgtcaaagttaccactaaacaagggcctcggtgtctggttaaagtgaccgcaaacgcttcaggattgcacatccctatgccttggtcatgcacattggacaacgctaatgccggaggattagatttcacggctgtccagatatacggttctattatcagcgccccaattactggttcaacaaataacctataatgtagccccattttagtgaacacagagataggcataattaccggctgacttcatcgtcagccggtagcttcctttactggaacacatgatgataatgatgaaacatgaaaaatcatttctaaaatggaagagcaacttttaaaaagagttgcgagcctgccgggcgattagtcacgatcaggtctttttgccatttcagggccaccagcaagcctttatcattagcgtaacggaaggaaggacccagaccaaatgcgctcgctttaccctgcgctgaattgggtccgcggtcatttgtgacctgctggaatgcatagccaccaaccccagcgaccaaaccattgccgaatccccagcccagtgcataatctatatgaaaagcccgaccggatgttgtattggtctttttatttttcagattaaagtcatacatcacttttaagtcggtattgtaaccgtaagccggaaagtagcttatcgcccagacaggctgaaatgcccagtgattttttcccggactggaaggatcatgacgattatagctgcctgttggtgcactgatatcaagaccgataacataacctaaatccggagccggatgatacccaagagccgggccaaaagtgatatccccaatccctttactgtcgctgcgtttacccccagcttctgctgtcacactcagtaaaggcacaatagtatgataagccagttgcccccccataatttgttgatctgtgaccagaactagccggggagcaagaacattcacattcactttaaaaccgggaacaggaagccgggaaccgttatttcccctgagttggttatagtgaatattgccaccataaagcagtacatggacacccggcggaggcaaggcgcctgacagataattatctaacccatccggatagataccaacaccaccgccttctgtcgccataacaggatggcttgcaactacagcactcataacggaaatactgagtagtgataaaacggtaagccgagtcgctctccgatactttcttattcctgtgtttatcagttttgcttttattgccgtgtatatttttatcatgacagatcctccgaagtgggaagtgaacagatatcgtaaatagggaatgaatgtgatcagtgccgcgcaagcctgcgagcaaccagatagccggaggttcctgctaatccgggtccgggatgtgctgatgcgccaatatgaaagacattacgaataaaagtctgatgtgctttcgtcctttttgaagacgcaaagggacgcagccagaaaaattggtcaggggtgcaaatccctgaatagggatctccttccaccaaattacagttcagtgtctgtaaatctgccggagaatatgccctgcggccaacaatggtggatgaaaaccccggaatgactctctccagacgagcctgtacgcgatctgcgaacgcttcacgaacaacatcattccatctgccatcttcaggaacagggatttctcccagtgcatctcctttcagatgagtgggcaactcctgcatctggatccataaaatccatccaccttcaggagcccgccccggatcaagcgcaaccggctgacctatagctaatgtcgggtgctccggcaaataaccattattagcctgtgttaccgacagacaaatttcttgcatactttctgttaagtgaataagcggcacatggcataatttgggatcgctccatgacggaggagaattcagggcaaagtgaacctgcattccaccacgcccatagcgatatcccttcgcatgttgttgaactgtctgaggaacgttatccagtaagtggccataaagctgttgcggagtgacattgcaaaccacggcatcggtagcgtgataaaccctttccccggcgatgacaccagaagcacggtactttcgcccccgctgatgagtgataatgtgatcaacattggtatgcgtgagaagctgtcccccatgctgctctatgatcgttttcaacgcttcaacaatgctgatacttccccctttaactaccggcattcctcccgctaccaccgcagcaaaagtgagttttccaatcagggcagaactggcatcatccggccccagacctgtatgtaaggcccatggtgcaatcagggtacggatgaaatcggactgcaattcacgttcagaccagcgccggaatgtttccagtgaatgaccggcaaattccaccagaccatcaataccacgttttcgccattcactaaacagtaacctgagtacgctgaaaccataagggttttgccccagtaaactgaagaccaattcagcatcatcatgaagaatttgctgcaccatgtagcgaaatgcttctccgtcttttccggcaatttcatcaagctgcaatgcagcaggtaaaacgccccgctttaacgcaattccccggccattcggctgaaccagaccagtggaataatcactttgcatgaactctatgcccactttttctaattccggcttcagcacctgataagccgggctactcaaaaataacggataccagcaggagagcacatcatggatataaccgggaaaaagttcttctgtccggatacatcctcccagcaccgcattccgttccagtaccagaacagattttccccagatagacagtagtgcggcacataccagtgagtttattccactaccgatgataatgacttgtggtttagaactgttcatagggttgttccatcaggctgttcaaccagtgccagaactcgcagcggacttcccgagcctcctgcaattttaaggggagcggcaataataacggttccgactgggggtaataaatcgaggtttttcaggcattgcagaccgtatttatttgctccgtgcatcagagtgtgacaaggataagccacgggccatgaataagactgcccggcatcagtattgatagtttccaccccaaagccccggatattacgtttatggataagccactctactgtttcctgatcaggccccggtgtatgggctccgtcaccatgcatattgaggaaacgggtgggatcatctgctcgttttgaccagtcagtacggaacagcagccatgctccagcagggatctgcccgtgtcgattttcccattcaagcaggaagtcaatggtcagcaaccaatccggattatttgccacctgttggctggcatccacaacgactgcgggtgccacaaaattatgcagcggaatgctatcaacggtattatctgaataatctttgccgctcacccaatgcgctggagcatcaaagtgtgtgcctgtatgttctccacaactgaaattattccaataccagcccggcccgttttcgtcgtaacaagaaatacgctccattttgaatgaccagacttgcccatattgttcaggtaactgtaaagccgggaaatcaggcgataaagtctgtgtaagatcaatcaccttcactcccccctgatccagcgctgtagtgaacatatttagcaggcttttcatgcatcctctcccatattacttcccacatcatgcaattccgtaaacataccgcagtgaaaaaccaacggcttaccttcgaggctggcaatacgtttcacctgaccaatcatcaacaaatgatcaccaacatgggtttgctgatgattcgagcaaaccagtgttgctattgcgccacaaattgcagggatcccctccggcgtttcctgcacaggaatatcctgaaacttgttttcaaccctcggattagcaaaacgcagagccagttcctgatggtcacagctaagaatgctgatcgtaaaatattcacagttctggaatacagccagattgggagagtggttgaccagactccagagtatcagcggtggctccagtgaaagtgatgcaaatgaattgatagtcaggcctacattgcgcccgtccgccgttcgtgtcgccacaatggcgacaccggttgggtagctccccagaatggtacgcaatgcccttgcttcaaattcggttattccccattcagtaccgggtaacatggcttcgctgttctggatgttcatggtcatgttgactttttccacactgaaattctccacactaaaaccctgcttttcaggtagcttgttaaatcgcttccttaattaagaattagccgcctgtgcatgttgtgtctgtgagttaatgtaggcttcacaggcatcactgtcccgccaccacggaaacagtaccggaggatggttgaaagcattggcaattgtgctggcaagtgccggcaactgctgagctgcgcctaatagatgcaggatatgaggtttgggtggaatgagcagactgtttgtccattccacaacatactggctgtaatcccagaatcgctcaaaggtatcgttcatccactctgccgtaaaaagtttatcaccacgggcaagaatcgattcgtaatagatctgacaggctttggtcgcattgttggagccttgtccggtaagcggatcgtttgtcactaccgcatcacccagtccaaagacctgacgaccagacggtaatgtcagtaccggtttgcgcactaccggtgcgaaacgtccggccagaatgccgttatcatcggtcagttctactttttcgcaacgtgcggcttcccacggcagaaaggttttaaggatgtggaggctataagccagatgttcctgcggcgttctggcttcctgccagccatccattgctcctcccggtatcccttcaaagaccataatgtcacagggaccactcagagtcagagcaggaaaaacgaaatactcgcccactccggggatcaggttgaaagaaacgcgtgaatattcaggcaccggcagcataccattcacataagtcagtgccagtgcacgctgcggcttatcatagggggaacgggttacatcacgctccagcaatctcacaacttcccctttcccgcccgccagaataaccagctcgtgggtcgatgccagttgctccaattcattaacacctacatcaagaatcaccaaattaccgccacgggaagcaaacaactccatccagaaaggcattttaatacgctgatcaaccgcctgtgcgtacttatcaagccgggcgctccagtcaattgctttagtattcggcatttccggatgcggaacagcgaaaccgataccttcaactggcgagcatagtgcttcccatttattcagtcccagcttccgctcaaactgtaaagaagaatcgaacatacactggctcgacatcacccgaccattccggacatcatcaggggtgcgattggtaactacggttacctgatagcccttgtcaagtagaccaagggccagaggcagtccggcctgaccacctcccacaatagcgatacgacgcatggtatttttctcctaccttatgtttcattacgacgatgttttgtaacaatcgtgttttgtgacaagaacgatttgcgactattccgccagacggcaaatggcaggttttgcctgctcaggtcccatcactgaataaccaccatcaacggagtaatcggctccggtcacaaaactcgacaaatcagaaagaagaaaggacacgacctgggcaatctcttcaggatcgcccgcacggccaagtaagtgataatctgcggcaacctcatctgttttccggcgactgccctgagtcagttcatccatgacccgggaccaagtccaacccggtgaaacggagttaacacgaatgcgatcagcggcatagtccattgccatgctgcgggtagcttgtaataaagcggcttttgaggcgggatatagccaacggcctgtctgggcaacagaggatgaaacgctggtgaagttaacaattgctccacctccggctgccataaaataaggatgtgcaaactgagctgccttgatggcgctgaccacattaatattcagtgccgtcagccacatttcgcggccggagtcggcaccattatccagataagttgcagcaagattaacgagacagttaaggtggccatagtaagctgcaacctcttgtatcccctgagagagctgtttgtcatcagtaatatcaacaggccagaaatgaatatcatcaggtcggacatcgcaggctttttttccgccttcacgatcaatatcaaaaatagcaaccttaacaccatattcactcaatactctggcaacagccgcacctattttagttgcaccaccagtaacaatagcgaccttattacttaatcctttcatgagtgatccccttgtacatatatctgccactattcagggcaaactatcaggacaaattattcggtcggaattcagggcattaagaaaaaacaaaattttgactgaataacttttgttcgatagatcgtgactgaatagccgatcagagatataaacaccgaatatccaatattttgtatatttagtgtttttataattaataaatcatggtgggtatcattacgtgaaaaagataagaacaaatagccgatatttgcaggaaatatccatccagcgcaggtattaaaaaatgtattcaatagatttcagaatttagaaataatatattctttgtttaacttattccatcaccgaacacgctgaaatagtaacccacggaactaatcatcctgaagttccggatctcgtgaatgacatcatggttatgagttgcaactaatccgtttctggtctatcgaagaaaaatacttctgcctcgagctagataattataacctttggctatatatatatttcagccaacacttcactaacaataaaaagcatcaataattaaatactcctataagcaataaaaaaacaaggataataaaaaacaacatagacattaattaaaaaacaaccagcattacattataaataacagcctccataagtaatataaaacaattatattcacataaaaaatatactctggtattttggggaaacaaaatactaactattaaataagaactctatttcacgaggatgagtgttgaaagattgcaaggttatttgtaaggacatcatgagagatgatgctacgttctaacgtgcaaattaaggtcaggaaaatcatcagccctattcattttgtactatcaactatgactaacttgtaagcagaacacactcatataaataattatgagaaaagctgaggatcatttgaatccagatttatatcacctccaccctactcaggagaatatattttacgaacaacttctttatgagaatagcccagtacataccctaaactggtataccttaatagaggaaaatgttgatattaccctcttgcaaaaaacattgaatttactatatcagcatatcgatactttacgtttacgtatattcatcaatgccgacaatgaagcggttcaatacattcaggaacaaagtattcccacgttaatcaatgaatacgatgtttcaaaactgcctgatcctgaaaatcacgcacttctgtggatgaagcaacaaaacaatatcgctatagattacttaaatgaaataccctaccagttcacattaatccgtctcgccaatgaaaaaaattattttttcactacattccaccatattttcattgacggtgtcggattataccgatttcacgagtatgtttataaactatatacatgccttaaaaatggaacatccacaacgtggttatctgaaattccgcaatatctcacggcagtaaaaaaatcaagaacctatttaaataattttaattatgaagatgacaagaattattggctgaattttttaaagaaaaatgaaatacaccaattaacaccttattaccataataaaggctctgataatcagacgctgacattaccactctcagttaaaaacgatttacgtactttttgtcacgaaaataaaactaatttacttgccgtcttttccacgcttgcttctattgttatggctgaattaaccgggcaacaagagctggttttcaacacgacaacccatggaagaacaacaaaatctgaaaaatatgttgtcgggatgcaagcaaatacgtatccagtacattgccctatttcacgaacttcttctattattaagcaaattaagcaagtagagtcagcgctgaaaaacagctatctccacggaaagtttcccaattcacatcttactcgtcttgcgaaccaagatgggttttctttacccagcattctgattttatatgaccgtttttcagcatcggatactgaaactgaccaaattcagcattttcatatagacactgaatttaatattaatcccatcttatttcggctgaaagatcatggctatgatcaggaattaaaattaaccatccaatatttacaaacctattttagtgattcagaggtcaataatatccttgagcgattaaataacctgctaacggctattattgacaaccctgctattttagtcagtgaattacctatcctgttagagcaggaacgccataccctattaaatatctggaaccagaccgatgccccttatccgcaggataaaaccctgccacagttgtttgaagcacaagccgctcagcgcccggatgcgactgcaatcatctttgaaaatcaaagcatcagctatggcgaactcaaccggcacgccaaccagctggcgcatcatctgattgcactgggcgtagaaccggatgatcgaatagctatctgtgttgaacgcagcttagatatcgtgatagggatactggctattctcaaggcaggcggtgcgtatctgcctctcgacccggattatcccaccgaacgattgagctatatgctggatgatgcagcaccggtagctttactgacgcaaaccgcactggcggataaactgaccacgtcagtccccaccgtgtggctggataatccggctcaagactttgacacgcagccggacaataacccggatgcacaagctttggggctgacttcacgtcatttggcttacgtgatttacacctccggctccaccggacaacccaaaggcgtgatggtggagcaccgtaatgtattgcgcctgatcatcaacaatggttttgcggatatcggcccggatgactgcgttgcccattgtgccaatcccgccttcgatgccgccacgtgggaaatctggtcagccctgctgaatggcagttgtctgcatattgtgcctcagacggtagtactcgaacccaccgattttcgtgaggcactaatcaggggaaaagtaaccgcattatggttaactgccggtttgtttaatgaataccttgatacattacagcctgtgttcgggcagctccgctacctgctggtcgggggggatgtcctcaatccgcagaaaataaaacaggtgctgtcggcagaccatccgcctgctcacctgcttaatggctatggtccgacggaatccaccacctttgccacaacctatgcgatcaccgtgccaattgatggtatgcagtctatcccgattggccgccctatcgccaatacccggatttacctgcttgacgcccatcaacagcccgtaccgatgggagcaccgggtgaaatttatatcagtggtgaaggagtagcgcgaggttatctgaaccaaccggaactgaccacagaacgattcctcgccgatcccttttcctctgagtcagaggcaaaaatgtataaaacgggggatctggggcgctacttgccggacggcaatatcgactatctgggacgcaatgattttcagattaaaatccgtggcttccgtattgaactgggggaagttgagaatgcgttagcggcacatccgcagatcaaacaggccgtggtgattgatcgtgatcatcacggacagaaagtactggcggcctatctggtcattgagggtctcttagctgatgaagatctactcacgcatttatccgcgcgtctgccggactacatgctgcccaccagctttacctttatcgacgcgatcccgctgacgtcaaacggcaaagtcaaccgcagagccttgcccgagccggttttcggtaacagagacagttatgtcgccccccgcaatgtgctggaaactcagctttgtgcgatttggcaggatgttttagcgctggaacgggtcgggattgacgataacttcttccgtatcggcggcaattccctgaccgccattaagctgattgccgccattcgccgtaccctgtctacggatatttcactggcacaactgtttgaattaaagaccatcgccgggttagccacacagatggacgcacaaattcgcacggttatcccgccgctggcacaagcgcgctatcccttatcatttgcgcaggagcgcatgctgtttatcgagcagtttgagcagggttctgatgtctaccatatcccgtatctggttcagttaactcaggatacttcgctgactgtactggaagccgccattaaccgattagcggaacgtcatgcggtgctgagcaccgtgtatcgcagtgatgatcacgatcagatgtatcagcaggcattggagacgcatttcgtgatcccgtctcaggcctgtgacgacagggcgacgttactggctaacgtccgcagcgaaatcgcgaccccctttgatttagccaccgaaccgagcctacgcctgcggcattatcaggtcgcagaccgtcactacttattactgttatggcaccatatcgcaatggatggctggtccattgatatctttatggcggaactggcggagatttaccacgcgctgcaagcaggccgtgacagccagctccctgagttagagattacctacggcgattacgcggcctggcaacgggattatttgcagggggacatccgcgaacagcaactggcttactggcaacatacgctggcaggctatgaaacgctagccctgcccaccgatcacccccgaccggcacaggtcaattatcagggacgggacgtccactttgaactgaacacccagttgtctgaacagctacggacactggcaagaacgcaggaaaccaccctgtataccgtgctgctcagtgcgttttacgtcacgttggcaaaattaaccggacaggatgatatcgttatcggcaccccaacggataaccgccaccatgcgcaaacactgcccctgttaggcatgtttgttaattcactggcgttaagggcacagctacaacacaccgacggcgtgaccgcgctgattgcacaagtacacaaactggttagcggtgccaaagcccatcaggatatgccgtttgagcaactgattgcagccctgaacattgagcgggataccgcccgccatccgctctttcaggtgatgttcagtgtgcaggctttcggtgaaaacccgtcagacggcaatctgccgtttagcccggtcgcactggatgaaacgttatacagcccggccaaatttgacctgagcctgtttttgtccgatggcaaaaccgcgattaccggttgcctgaactacgccctgagcctgtttaacgacaccagcatcacccgtatcgcagaaagttaccaacgggtattgcgcgcgtttgtggccgaccagcaacaaccgttatccaatattgatattttatcggcacaggaacgtcataccttattgcaccgctggaaccagactgacaccccttatccgcagaataaaaccttgtcacagttgtttgaagcacaggccgctcaacgtccggatagcacggcaatcgtatttgaagaccaaagcatcagttatagcgaactcaaccggcgcgccaaccggctggcccatcacttgataaatctgggagtcaaaccagataatctcgtcgccatttgtcttgaacgcagtatggatatggtggtcgggatactggctattctcaaggcaggcggggcttatctgcctctcgatccggcttaccccgcggaacgattggcctatatgctggatgatgcagcaccggtagctttactgactcaaaccgcactggcggataaactgacctcgtcagtccccaccgtgtggctggataacccgtctctgcaccttgaggctcagcctgatagcaatttggatacgcagtcactggggctgacttcaaatcatctggcttacgtgatttacacctccggctccaccggacaacccaaaggcgtgatgatcgagcaccgtaatgttctgcgtctgatcatcaacaatggttttgcggatatcggcccggatgactgcgttgcccattgtgccaaccctgcctttgatgccgccacctgggaaatctggtcagccctgctgaatggcagttgtctgcatattgtgcctcaggcggtagtactcgaacccaccgattttcgtgaggcactaatcaggggaaaagtaaccgcattatggttaactgccggtttatttaatgaataccttgatacattacagcctgtgttcgggcagctccgctacctgctggtcgggggggatgtcctcaatccgcagaaaataaaacaggtgctgtcggcagaccatccgcctgctcacctgcttaatggctatggcccgacggaatccaccacctttgccacaacctatgcgatcaccgtgccaattgatggtatgcagtctatcccgattgggcgccctatcgccaatacccggatttacctgcttgatgccgctcagcagatggtagcgccgggagccatcggggaactttatatcggcggagccggtgttgcccgcggctatctgaaccagcccaaactcacagcagaaagcttccttcctgaccctttctcttccgtgtcagaagcaaaaatgtataaaacgggagatctggggcgctacttgccggacggcaatattgactatctggggcgcaatgattttcaagttaaaattcggggtttccgtattgaactgggcgaaattgaaagtgcgctgatggcctattcacagatcagacaggcggtcgtgattgaccgtgagcatcagggtcataaagtactggcggcgtatctggttgccgaggacgcagtctccgatgaaatgctgctggcgcacttatctgatcgtctgccggattatatgctacccgccagttttacttttatggacgctattccgctgacgccaaacggcaaagtgaaccgcaaagccttaccggaaccggttttcggtaacagagacagctatgtcgccccccgcaatacgctggaaacccagctttgcgctatttggcaggatgtgttagcactggagcgggtcgggattgacgataacttcttccgtatcggcggcaattccctgaccgccattaaattgattgccgccattcgccgtaccctgtctacggatatttcactggcacaactgtttgaactgaaaaccatcgccgggttagccacacagatggacacacaaattcgcacggttatcccgccgctggcacaagtgcgctatcccttatcatttgcgcaggagcggatgctgtttattgagcagtttgagcagggctctgatgtctatcatattccgtatctggttcagttggctcaggaggcttccctgcctgtactggaagccgccattaaccgattagcggaacgtcatgcggtgctgagcaccgtgtatcgcagtgatgatcacgatcagatgtatcagcaggcattggagacgcattttgtgatcccgtctcaggcctgtgacgacagggcgacgttactggctaacgtccgcagcgagatagccatcccctttgatttaaccaccgaaccgagcctgcgcctgcggcattatcaggtcgcagaccgtcactatctcttactgttatggcaccatatcgcgatggatggctggtccattgatatctttatggcggaactggcggagatttaccacgcgctgcaagcaggccgtgacagccagctccctgagttagagattacctacggcgattacgcggcctggcaacgggattatttgcagggggacatccgcgaacagcaactggcttactggcagcacacgctggcaggctatgaatcgctggcgctgcccaccgatcacccccgaccggcacaggtccattatcagggacgggacgtccactttgaactgaacacccagttgtctgaacagctacggacactggcaagaacgcaggaaaccaccctgtataccgtgctgctcagtgcgttttacgtcacgctggcaaaattatccggacaggacgatatcgttatcggcaccccgaccgataaccgtcaccacgctcaaaccctacccctgttaggcatgttcgttaactcactggccttaagggtacagctgcaacacactgacaatgtggccgcgttgattacgcagacacacaaactggttaccgacgccaaagcccatcaggatatgccgtttgaacaacttctggatgcgctaaatattgaacgggataccgcccgccatccgctatttcaggtgatgttcagtgtacaaacttttggtgaaagtccgtcagacggcaatctgccgtttagcccggtcgcactggatgaaacgttatacagtcccgccaaatttgacctgagcctgtttttgtccgatggcaaaaccgcgattaccggttgcctgaactacgccctgagcctgtttaacgacaccagcatcacccgtatcgcagagagtttccaacgggtattgaccgcctttgtcgccgaccagcaacaaccgttatccagtattgatattttatcagcacaggaacgtcataccttattgcaccgctggaaccagacggatgcgccttatccgcaagataaaaccctgccacagttgtttgaaacgcaggcggttcagcgacccaatgcgattgcaatcacctttgaaaatcaaagcatcagctatggcgaactcaaccgccgcgccaaccagttggcccatcatctgattgcactggggcgtcaaacctgataatctcgtcgccatttgccttgagcccagtttggatatggtggccgggatactggctattctcaaggctggcgggggttatgtcccactggaccctgcttacccgaccgaacgactgacctacatgctggaaaattcatccccgcagatcctgctgactcaggcagcacaagcggaaaaattgttcctctcgacatcggtgataactgttccgattatggaactggacactcaggcatcgttactggcagaacaaccaaccgataaccctgatactcaagcactgggagtgatgccacaccatctggcgtatgtgatttatacctccggctccaccggtcaaccaaaaggcgtgatggttgaacacaccaatgttacccgtctgctggcggcgacacaggcgcggttccggtttgatagcaacgatgtctggacgctatttcactcctttgctttcgacttctcagtatgggaattgtggggagcgctggcttacggtggcaagctggtggtgattccgactgaatgtgcccgctcacctcagatgttctatgagctgctttgccggaagcaggtcactattctgaaccagactccaagtgccttccgtcagttgattgcggctcaggagatgatgccgcatgagcagcacacactgcgctgcatcatattcggcggcgaagcattggaactgcataccatcgccccgtgggttgaacgcaatcctaccgaacagacccgtctggtgaatatgtatggcatcacggaaattaccgtacatgctacctatcgtgaactgacggaagcggacatccacgcaaggcatggcagcctgattgggcagcctctggaggatttacgcatctatatccttgatgcttatggtcagcctgttccaataggcgttgctggcgaactctatatttcaggtgctggcgttgcccgtggctatctgaaccgccctgagctgactaccgaacgtttcctgcccgatccgttctccggtaaaccgggtgtgcgcatgtataaaaccggcgatttaggccgctggtcatcggatggcaatatcgaatatctcggccgcaatgactttcaggtcaagatacggggcttccgtattgagctgggtgaaatcgagacaaggcttgaacagtgtcacggtgtacgtgaagcggtggttatccttcgtgaagataaacctgagaataaacgcctcgttgcctatctgctgccccaaaacggcgctgaacttgatccggcggttctgcgccgccagctggcagaacatctggcggaatatatgcgcccagtgcctatgtcgtgctgaccgctttccctctcacaccgaatggcaaactggacagccgagcgttgccggagcctgaactctctgcggtggtgacacatgaatatgaagcgccacagggaaggatagaaacagcactggcacaaatctggcaagaattgttagggctgacacgcattagtcgtcatgacaatttctttgagctgggtggtcattcactgatggttatccggctgataacccacataaaaagtcagttcatggtcagtattcctctgacctccctgtttgtttcacccaaattaatggaacaggcagacatcatctttgcagcacaaatgagtgcaatcggcgacaacgacattgaatcaattcaaagcgatcttgatgcgatgtcagccgaagagttaatggcaattttaggcgaaaacgatacccgtaaaaaagataccggcggagataacaaataatgacaaggactactatgaatctcgatgatctgaaacgtgctgttatggagaaaaggcttgaagagcaactgaaagcacggggttatcaacagcagcagtcaatgataaaacccgcggatcgtaaccagccactgccattatcttttgctcaacagcggctgtggtttctctgccagttcgaaccggctgccagtctggcctatcatctgccggtaatactccgccttagcggtcagcttgaccgccatgcgctgagcgcatcactcgaccgtctggttgagcgccatgaaagcctgagaacccgttttgtgtcagtggagggaaaaccctgtcaacacattgatccggccgatatcggctgtactctgtcttatcatgacctgagccagttggctccggttttacacgccgagcgtatcaccgagtttattgataccgaagcgcaaacccctttcgactttactcaggaacggctgattcgcggccagctacttcgtctcagcgataaagagcatattttattactgaccctgcatcatattattaccgacggctggtctaccggtgtgctgatacgggagttaggggatttctatcgcgctgcccttgatggtcatgatatctctttatcaccattacctgttcaatatgctgactatgcggtctggctacatgaacaggcgcagggaaatagcctcacgaaacaacgcgatttctggtgtgaacaactcaaagatgctccgccgctactgacactccccattgatcgcccacgcccggcagtacagagctatatcggcggcaacgtctcctttcatcttgatgtccctttactggcatcactgaaagaactggggaaacgccataacagtacgctgtttatgaccctcctgaccgcatggagtatcgtactgagccgccttagtgggcaggatgatattgttatcggcactcctgttgctaaccgtccacaccgtgagcttgaagggctgataggcttcttcgtcaatacgctggctttacgtatcactttcaataacgatctgagcgtggcggatttactcactcaaatccgggagcaatcactggcggcctatgcccatcaggatctgccctttgagcaggtggtggaagctctgcaacctgaacgtagtctcagctacagcccgatttttcaggtgatgatggccttaaataacacgccggctcaggagcttacactgccggaactgcaactcacaccgattgagcagaagcatcggggtgcgcattttgatttaaccctatcactgaacgaaatcggaacaggtttagccggggatttagaatatgccgccgatctgttcgatcacccaactgctgagcgtatggtgggttatttaacccatgtattagctgcaatggtgtttgatgataaccagcccgtaaacacattgccgatgttgccagattcagagcggcaacaattattagtggatttcaatgccactcagacagcatttccacaagatgcgctcattcaccagttagttgaagcgcaggtgttacagcgccccgatgctatcgctataagctacgaggggcagacactgagttatgctgagcttaactgccatgccaatcgtctggctcatcacctgctggcactgggtatacgcccggacgatccggttgcaatttgtgccgaacgcagcccggagctgatagtcagtctgcttgccatactgaaagcgggtggtgcctatgtgccactcgatcctcattaccctgctgaacggctgagctatatgctggaggacgccaggcctgtagctctgctgacgcagctagcatggtacgacaaactggacacctttgtgcctgtcgttttgctggataatttattgagtgagcaggaagcacctctggctggctatcccactcacaatccggatattcagacatcaggtctgacctcgcatcatctggcatatatcatttatacgtcaggctcaacgggccagcctaaaggtgtgatgattgagcaccgcaacgtaattcgcttacttatcaataataacgttgccgatattactcccgatgattgtgttgcccattgcgccaatatttcatttgatgcggcagcgtgggaagtctggtctacgttggtacatggcgccagactccagttaataccggaaaataccttgttacagccagtttatcttggtcagtgtctgtcatccgcaggtatcacaactttatttcttaccactgccctgtttaaccaatatgcaggcttgcttgcccctgccttgccgggtctgcgttatgttttgtttggcggcgaacaggccgatagccgcacggctattcagttatgggctgatcattcgccacaacatttattgcacatgtacgggccaacggaagtcactacttttgccaccgcttataaaatcccctttatcgaaaggtttcatactgaacagattgaaaaagagataaaaattcccattggtggcccgattgccaacactcagatctatattcttgattccggcaagcaacctgttcctcttggggtaacgggcgaaatttatattgccggtgaaggagttgctcgtggttatcttaaccgtccgcaactcaccgctgagcactttctggttaatccgttttcctcagagcctgatgcacgaatgtataagaccggcgatctggggcgctggctgccggatggcaatattgaatactgtggtcgcaatgattttcaggtcaaaatacgcggtttccgcattgagttgggggaaattgaaagccgcctctcccagtgtcatggggtgcaaaaagcactggttctcgcccatgaagaagccggtgatgagaaaacaggcgctaaaacaggaagtcagaaacggttgattgcctatatacagcctcagccgggagtgataccggaaccggccgaattgcgtcagcagcttgccagacaccttgctgattatatgttgcccagtgcttttatcatgctggataatttcccgctgaccgctaacggaaaaattgaccgtgatgcgcttcctgctccagaggcttccgctttcgcggttcgccactatgaatctccgacaggggaaacagaaacttcgctcgcacaaatctggcaacaactgctaagactggagcagatcagccgtcatgaccatttctttgaactgggtggtcattcgctgatgattgtcagcctgatcgaagagctacgccgcgttggctggcaccttgatatccgcagcgtattctccacgccggttctcgctgatatggcgcaggctctccgccgtgatgctgattcttttgttgtgcctgagaacctgatccctgaagattgcactgcgattgttcctgagatgctgccattggtgacattatctcaggctcagattgatgccattgtcggaactgtgtccggtggcgctggtaatgtacaggatatttatccgctatctcccttacaggaaggaattctgttccaccatctgatgcagactgagggggatacctacctgttacagagtttgctggcttttgataatcgcgaacgtcttaaccagtttttatctgctttacagcaagttatcaaccgtcacgatatcctgcgcagcagtgttttctggcaagggctggagcatccggttcaggtcgtctggcgtcaggcaccactggaaattaacgtcttcactcccaatacggaaaataatattcagggacaactgctggctcacaccgacccacaccagcatcgtatcgatctgacccgtgctccgttattcactgctgatatcgctcatgatacggcacaaaatgaatggctgctggtattacgttttcatcatctggtcagcgatcatgtgacactggaactgattttcgatgaaattgcacttatcttgcacaagcaggaaactgccttgcccgcagtattgccttaccgcaattttattgcccgaacgttgagtgtgcctgtctcagcacacgaagattatttccgttcccggctggctgatattgatgcaccaactgcgccatttggcgtactttcaatatctaataacgaaaatccagaaacagaacagaataactctattacggaagcacaccttccgctttctcctgaattatcgggttccatccgtgcactgtcacggcacctgaaagtcagtccgagtgtcctgtttcatgtcgcatgggcgcaggtactggcacagaccagtagtcgcgatgatgtagtttttggttccgttttgtcaggccgtctgcaaggcggagctggagctgaccatataccgggaatgtttatcaacactctgccgattcggatttccctcgcaaatcgcagcgtacaggttgtggtacaggatacttatcaggatttaatcacactgctggaacatgaacaggccccgttaacactggcacaaagttgcagcggtgtagaacacgccataccgctattcagtaccttgctgaattatcgccactctcagaccagtgaagaaaaaacgcccaaaaatcgttggtcaggtatgcgggttatcgcggctaaagaaggcactaactatcccatcactctgtcagtggatgatttaggctcagatttctgcctttccgcccacgcggtagcgggtatcgaccctgtccggattactcactatctgcaaacagccctctgtggtttagttgatgccttgatgcatcatccccagcaattaattctgcatgtgccgatcctgccggaaaccgagcgacaacagctgttagtggattttaacgcgagtagctgtaaaaccggacaggctgacctctcacaggatatgctgatccaccagctatttgaggctcaggtattacagcgtcctgatgctgttgcgctgacttatgaagatcagacactcagctatgaggaactgaaccagcgcgccaaccgtctggcccattatctgattgcgctgggtgtacgtccggatgaccgggtcgcaatttgtgttgaacgcagcgcggaactgatagttggcctgctcgctattcttaaagcgggtggtgcatacgtgcctctcgatccggcttatccggcggaacgactggcattgatgctgaaagatgctacgccagtggtattactggcacaaacaacgcagctcgacaagttgcctgatacggtaccggtattcgtgcttgattcgccagatacctcattggacactcagccgactgataatcccgatacacaggctttggggctgacatcacgccatctggcctatgtgatttacacctctggttcaacaggacagcccaaaggggtcatggttgaacatattaatgtcaattatctggtgattaataatcattatgcagatatcggtgcgaatgactgtgttgcccattgtgccaatactgcatttgacgcatcaacatgggaagtttggtcacccctgctgaatggaggatgtctgtatattattccacaatctgtcctgctcgatccggtgcttttctgtgtttcgctgattagaggaaaagtcactgcactttggttaaccgctgggttgtttaatgaatactttaatacgctcaagccactgttcgggcaattacatcatttactcgttggtggggatgtgcttgatcccggaaagatacaacaggtgcaacaggctgaatcccagcctgctcatctgattaatggctatggcccgacagaaaccacaacgtttgcaacaacttatgagataaaatcgcctgttgatgtcgcacactccattcctattggccgcccaatcgccagtacccggatctacattcttaattcacgtggtcaacctgtacctatcggcgttacaggggaaatccatatcgcaggcaaaggcgttgcccgtggttatctgaatcgccccgagctgactgcggaacgctttattattgatccattctcttctgaacctgatgcccgtatgtacaaaaccggtgatttggggcgctggcgtgccgatggcaatatcgattacctcggtcgcacggataaacagatcaaactgcgtggtttccgcattgagccgggcgaaattgaagccggactgatgcagtgtcatggtgtgcgtgaggcgattgttctgagtcgcgaagacggggcaggacagaaacaactggttgcctatctgattgctcaggatggcattgaactaaccccaactgaactgcgctggcagctttcccgacaccttgccgactatatgctgcccagcgtttttgtcaagcttgaatctttcccgctgacttctaatggcaaactggatcgtcaggctctgccagcgcctgatatgtcagcgattgttacgcgccagtatgaagcaccgaacgatgaagaagaggcaacactggcaaaaatctggcaaagcctgctgggactggagcgtgtaggccgctttgaccacttttttgaactgggtggtcactctctgatggtaggtcagctcgcaacccgcattcagaatgaatttttggttgagatccccatcgcttcactgttcctttcccccagactggcggatcaggcagaaatcattttcgcagcacaaaaggaagcggtgggacaaaacaatattgactcccttcaggacacactggattcaatgtccgcagaggaattaatggccatgttaggtggagacagcgacaaatgataaagagcgatatgaatcttgaggatctgaaacgggctgttttgaaaaagaaacttaaagagcaattacaaactcagcagcaccagaaacgaccacctgttcatcacgctgaccgtgatctgcccctgccattatcttttgcacagcaacgtctgtggtttcttcaccagctcgaaccagcggccagtctggcttatcatattcccatgtcactgcgcctgaccggacaactgaatcaccatgccctgatagccaccctcaatcggctggttgcccgccacgaaattctccgtacccgttttatgcttaccgaaggtcagccataccagcatattgaccctgctgacacgggctttaccctgacttatcaggatctgcgtacgctggattcagaaacgcatatgcagcatatcgccgacattggcgcacttgaagcccgaacccccttcgacctgactcaaggcccgctgatccggggtaagctattacaattagctgatgacgatcatgtcttgttgttcactcagcaccatattattttcgatggctggtcaattggtgtactggcacatgaactgagtgccctttaccgcatggaatgcgatccagataataatgactccgataataataatgatacatcactcccgccactgcctattcagtacgccgattatgcgctctggcagcggaattggttacagggtgatgttctcgcggaacaacgtgatttctggagccgtcagcttaaagatgcgccggctttactgacactccccaccgaccgccctcgtcctgccagtccgggttataccgccggacaaataccaattcaatttgatgcatccttgtcagaggcactgaaattattcggacaacgccagcaggctactctgtttatgacgctgttggcaggctggagtatcgttctctcccgaatgagcggacaggatgatatcgttatcggcacccccgtcgccaatcggccgggaaatgagcttgagagtttaattgggttcttcgtcaatacactggcgttgcgggtcacattcagtgaatccccgacagttgcagagttactcacacaaatccgtgaacggtcacttgctgcctatgcccatcaggaattgcctttcgagcaggtggtcgaaatagtacaacccgaacgtagcctgagttataacccaatctttcaggttatgctggccctgaataatacaccggcaaaaacattaaccctgcccggcctgcaactgacgccggtggaacaggtacgttacagtactcattttgatctgactttatcgctgactgaaaccaaagccggtttattgggtgaactggaatatgccactgatctgttcgatgctgccaccattgaacgtatgatcgggtatcttaaacaggtcctgatggcaatgaccgcagatgccatgcaacccgttgccagattgccgatgctgtccgcttcagagcaacagcgattgttagtggagtttaatgcaacacaaacgcgccaaacagaaaaccctcaaaatgttctcatccacacgctttttgaagctcaggcagaacagcaccctgatactacagccatcatccacggggatcaggtaatcagctatgcagaactgaatcaatatgccaaccgtctggctcatcatctgattgccctgggtgtacgcacggatgaccgggttgctatctgtgtcgagcggggtccggaaatggtggtgggattactggctattcttaaggcgggtggtgcttatgtgccgcttgacccggcgtatccggccgaacgactggtttatatgctcaaagattccgctccggtcgcattattggttcagccgtcaacttgtcaggcc

SEQ ID NO: 342 - DNA, 25593 bp, Xenorhabdus sp.
  CDS (3)..(5600)
aaagcttccggaactttagagggcggcccccggaactgccaacccataacccgaatgctcaggcatgggggctgacctcacgccatctggcttacgtgatttacacgtccggttcaacgggacaaccaaaaggcgttatggttgaacaccgtaatgtgaatcatttggtgatcaacagtagttatgcggatatcggagcggatgactgcgtggcacattgcgctaatattgcgtttgatgcctcaacgtgggaaatctgggcgcctctgctcaatggcgggcgtctgtatgtgattgcccaatccgtgctgctcaaccccgagcatttccgtgacaccttgatctgcgggaaagtcacggctctgtggttaacgagcggcttgttcaatgcttatcgggaaacgctgatgcagctgttcgggcaactgcgctatctgctggtcggcggggatgtcctcgatccgggcaaaatacagcgggtgcaattggctgagtgccggcctgctcatctgattaacggctacggcccgacagaaaccaccacttttgcaaccacctatgcgataacatcgcctgttgatgctgcatgtcccattccgattggttgccccatcgccaacactcagatctatattcttgattcacataggcgactggtgccgctgggggtaaccggtgaaatttatattggcggtgccggagtggcgcggggttatctgaaccgccctgatctgaccgctgagaatttcctgcccgacccattctccactgaaccgaatgaccgactgtacaaaaccggcgacctcgggcgctggctgccggatggcaatattgactaccttggccgcaatgattttcaggtgaaactgcggggtttccgcattgaaccgggagaaatcgaagccagcttgatgcgttgcgagggagtacgtgaggctgttgttatgcttcgtgacaatgccagtgacgataatgaaagttcccagaaacaactggtggcttacctgctggcgcaggacggcgctgagctcattccggcggaactgtatgcgcaactatcccagcgccttgccgattatatgctgcccggtgcgtttattatcttacagtctttcccgctgacccctaacggcaaacttgatcgtcgggcgcttcccgtccctgaccccgccgcgataatcacgcgtgattatgttgcgccggtgggtgaggtagaaactacactggcggacatctggcaggatttattggggctggaacgggtcggtcgtcacgatcatttctttggactgggcggccattcgctgattgccgtcagcctgattgaacaactgcgcagccaagggtatgcattggacgtacgcagtatctttactgcaccattacttatggatatggcgcaggcaatacaggtgcgacgaggaacgtcggacaatcttattccccccaatggcattcctgacggttgcacagcaataacacccgatatgttgccactggtgacgctatcacaaaacgaaattgataccattgttgccactgtcaccggcggtgcggctaatgtgcaggatatttacccgctttccccattacaggccggtatcctgttccatcaccagatgcaggaaaacggcgatgcgtatgtgttaagcagcttgctggcctttgattccggtgaacggcgggaggctttccttcaggccctgcaacaagtgatagaccgccatgatatcctgcggactgctttctgctggcaggaattgacccaacccgttcaggtggtctggcgacaggccaccctgaaaataaatacttttactgctccggataacgaacaggatgtttcatctcagttactggcacataccgatccacaccagcggtgcctcaatctgaatcaggcaccgcttttctctgccgatattgcttataatccccataagaacgagtggctgctgtccctgtgcttccaccatctggtcagcgatcatactacgctaggattgattattacggaaatcagggaattactgtccgctcatggcaaagagcaccatcccctaacattacctcccgccctgccttaccgtaattttatcgctcagatccgcactgtgccgattgaaaaacatcgggactatttccaccagcttctgggagatgtggacgaaccaactctgccctttaacttacgcaatgtgcggggaaatcatgaaggactcaataagatagaggaagccagactgacactgggtgatcaattaacgcatcagctacgtgactgcacccgtcaacagggtgtcagtactgccgttctgttccatatcgcatgggcacaggttcttgcgcaatgcagcggacgggaagatgttattttcggtaccgttttattaggacgttcattacaaggtgcgggtgcttctcaggttcttggtatgtttattaacacgctgccagtgcgcattatgttgcaggaacgcactgtacaaaaagtggtacaggagactcacctgcaacttagcaaattgctggaacatgaacagactccgctgacgattgctcagcattgcagtggtattcaggcaccccacccccttttcaacagtctgcttaacttccgtcatagcccacgtagcaatcaactagccgagtcgccggtatgggaaggtattcagatattcaacagtgaagaacgtagtaattacccactgtcattggatgtggatgatttcgaagatggttttgcgttaacagcacaatgcaatcaccagattaatccggcacgcattaacgcttatatgaatactgcgttgaaaacactggtgacaacattgcaaaatatgccgcaacagaatattcaatccctcagtattctgccaccggcagaacgcagtcagttattggaagaatttaacagtgccagaattgactgcccacaggatatgttactccaacagttgtttgaacagcaggcgaccctcacaccggatgtcatcgcactgattcacgcagagccaatgaatcgagaagttcagctcacctaccgcgaactgaaccaaaaagccaaccagctggctcatgccctgattgatgccggtgtacgaccggatgatcgtgtcgtgatttgtgtcgaacgtggtgtcgatatggtgattggcttgttcggtattttgaaagccggcgcgggttatgtaccgctggatacgaattacccgaccgagcttctgaactatattctgtcagactgtacaccgacgttattactgacccaacaacacctaaaaacccgtttatctgccgatataccgatatgggtgctggatgataacaaccataccgaatgtatggcgcaacaaccgacacataatccggattcgcagcaactggggctggcaccacaccatctggcttatattatctatacttccggctccaccggtcagccaaaaggcgtgatgattgaacatcacaatgtggttaatttcatacacgttcaacgccagatcaatgaactaacaccagctgaccgcgtactccagtttacctccgttgcattcgacaccagcgtatcagatatcttcgccacactcgccaccggcgcaaccttagtgatgtgcccgtcagaattgcgtgttccggataatacttttgcccgattcctgcaacagcagcaaatcacagtcgctgatttacctacggcattctggcatctgtgggtacaggaaatggtcgccggacgttgtggtttcagcccgtctctgcggctggtgattgtgggtggtgaaaaagctgaactacgccacctgatgatctggcagacattgccggaaacccagtcatgccactggattaattcttacggcccgacggaaacgactgttattgctaccgtattgcaagttgatcgtcattctgcttataccggagaaaccctgccgattggttatcccattgccaatacgcaaatttatattctggataatcatggtaaacccgtcccaatgggtgttatgggagaactctatatcggtggaagcggcgttgcccgtggttacctgaatcgccctgaactgaccgcagagcgttttttgcctgatccgttttcaacagaaaccaaagcccgactgtataaaaccggcgatttagggcgctggttacccgatggcaacattgaatatctgggacgcaatgattttcagattaaactacgtggttttcgcatcgaaccgggggaaattgaggctaaactgactcgctatcccggagtacgcgaggcagttgtggtcgcccgtgaagaccagcacggcgataaacgccttgtagcttatttgattcccgaacaggggatagctgaaccggaggcaaaactgatacctgctgatctccgccagcaactctcccaagagcttgccgattatatgctccccagtgcgtttgttatccttgatgcctttccactaaccgtcaacggcaaactaaatcttcaggcattacccgcaccggatcagacagccgttataacccacaattacgaagcaccgatggatgctctggaaactacactggctgaaatctggcaaacattactgggtttagatcgtgttggtcgctatgacaattttttcgaactgggtggtcactcactcaatgcaacacagctactagcacgtatgcatcaacaaggcatggaaattcctctgaccacattgtttacttgcccgactttgtgtgaactggcaatcgccgtgcgtaaacagacgattacccctgcgttctcccgcaatatcaatccagtcccgctaagccctgagggaagtttgccaccactgttttttgtacacgaacttactggcaacccgctggtttattcatctctggctgccctgcttcctcctgaattacccatttatgcactacaggcgcttggtattcatacactcgccgaaccaccgatatctattaacgctctggcggcctgtcatatacaggctattcggcacgtacagactcacggcccttatcgtcttgccggatggtctctgggaggcgtaatcgcctatgaaatagccatgcaattaatgcatgatggtgaggaagtcacatttttgggcatgattgattcgggaaacatcagtcgatattccaccctgcctgataaattaatgaatacgacacaacaacgtatcaacaggattatcaaatatctgcaaatatccataccagagattaatgatcatacgctggaagtgctttatcagtttaatgatgttgaacagatcgttaatcattgtataaactgccaatggttacctacctattacacacgtgaaaatctcttcctgcatattggtacgattgagtttctggatcagctgagcacagattatattccacaggcgtcagagttaccgatccatctttataaagcggaaaactttattattgatggagatgaatggcacggctggcagggcgttgtggcaaactcttccacactccatcctatcggtggcacacactattcgattatgcgacaacccctgattaaccaactagccgactctgtcagtagaattctggtgcctcagaaaccgcaataaaagtactcaagtcacataactaacgatgcagttatgtgacttggaaattgacttatttattatcagggatgtatacatttcatcttacaggttgcctctttgttggctacatgccttgaaatccattgtgtatatactcgataaacttcaagttacaacaggcaatatgagatgagtccttatatctccccgcggcgcggggagatataacacgcatcttgaagttgaataggtatatatttcaaatacatcgccttgatttttactagtgaattgcttttattttactgattaacaggaagattttccaagataaaattaaacctataattatcttctttttcaaatttcatataaagaggcttggtttcattataagtgataatatcaatatcagttccattatatttaaaataaaccgcaccttgagtgactggaatattattctgatcaaaaacaacaacagaggtaatatacatctgaccatctttgggaattagaccaacaacttcataatctccgcctgaaagacaatctacaggatcaggaattgtataagtcctaatgttagccctaaacacttgattaatacctgatttgttaattaattttatagccagtaaatcacggtttaccgaagagactataaattttgataacccttcgatatcactgatatctggctggcttgtatcccattcacggtaaatttgcccagattggctatcactgccatgtctccaggcaaacacaatagaatttgttcctatttcaacagaaagaaatttatcatttaatggtgtaccaatcaaatttacttctttactattttctggatattcatacaagcttccactataattttttccagtataaaaaataacaccattatttaatgttttctttggcattttcatttcccttaaggttcattgtgagataaacctaaaggttaaacagattgattttatatatcaagccaatgaagcctcttatattaaactagaaatattaaaaaaacatccattccattttttcaccgagtgtgattaacaaataaatataccaacaagtaaaacacctgtaccaataatagttgttttatttctttaactcacataataagaataattctgttataagcattcatataactataactcctaaattttattcttctcctgcttgaaaaaataacacgccaatcataactgatatatatttcgtataattatacctttaatttatcaatagtgacgtataacaataaccactcagtgctattgttatgcgtcacgaagtagaaaatcacttcaatgctttgataggtaacttaaatgatcgaaatacatctaacttgcattactataatagaaaacagtactgcccttttaatttctcaaggctgatattcagtaaaataccgtcagccaagggaaatttattctgtttacttagcttctaatcaataaacttcactatttttatattccttacgctttttccgcatacgccataaaacctcaaggataacaaaccagattggcgtgccatacaaggcaatacgtgtatcgtaatcaaagatcatgataaccacggtaaaagcgaaaaatatcagagtgcaccatgtcataggaatgcccatcggcattttatagatggacttctcatgtaaatcagggcgttttttacggtaagccagataagcaagcaatatcatacaccagctataaacaaccatgatggcggctacagtggaaacaatggtaaatagcttcatcacatcgggaacgataaacaacagaagtacaccacttgccatgcaaacaacagaaaatatcaggctgaaaacaggaattgcactattgactgaaagtcgcccgaaccaaccatgagccaatttttcagtagacaggccatataacatacgggtacaggcgtatagtccgctgtttgctgaagacattgccgatgtcagtgccacaaaattaatcactgcggcggcagccggtaatcctgccagtgcaaatagcgtaacgaacgggctgacttccggagagatgtgaggccatgaagttacagcaataatgcacatcatggaaaacacataaaagataataatgcgaatgggaatactgttgatagatttcggtaaaatcttctccggctctttcgtctcagcggtaacagtacccactagttcaataccagtaaaagagaaaatcgcaatctgaaaaccggccagaaaaccaaatacgccattgggcagaaaaacctccggattcgtcagatggcgaacagaagccgtgacgccatttggtgatgtccagccaatagcaaccatacccacaccaacaataatcagtgcaactatcgccacaaccttaatcatggcaaaccagaattccgtctcaccgaacagcctgactgaaaaaaagttacataaacacattaatccaagaatgaacaacgcagtaaaccagagggaaatatcaggaaaccaatactgaatatagccaccacagaccacaacatccgcaatacagctcactacccagctcatccagtatgtccagccgagaaaataactggctttttcccctagataatcagcaacaaaatcagcaaacgtacgataatccaacttggagagcagcaactctcccatcgcccgcataaccataaaggcaaaaaagccgatcagcagataagtcagaataatagaagttcctgatacagctatagtcttccctgttcccatgaatagaccagtcccgatggcaccgccaatggcaatcaactggacatgacgttttcctaatccacggtgaagtttctgcgcacctgcggattgctccgcaggtgtttttaccgtattcgtcatcagtaacctccacagttgtctttttattatatgagtagatatgaattgatcaggttaattgctccaataacaggcctgccctcagaccaatggcaacgttagcgttaggaaataaaataaagtttgccggagaagtaattttccaggattgattttcctgactggcaatttcaaaaccatccggcagggccgtgaagttttttgtatcctccggaatatgaagccggaaactactgtcctgtttgataatggaatcgactgcccggtaacgttttatttccggtttttgccgcttcacagaaaatacgccagcaatcagcttctgtaatgctgttgtaatattgctgaatttagccagatcgttctgcccgaaagaatagactttgccaacttccatcgtacaactgtctacattgaaatactggctggtaaattggctgaatgttccgccttcacttttatgaaaaaccatcgcatcaatatcactgccttccagccattgtagaaggtcaggcgaatattcacgctgctggaaaggcagcaaggcaaattgttcatggcaggaaccacgaattgctgtatgcaggtcaagatgccagcggcgtgttgatgccataaccgcaggctcttgaaaaaatcgctgtatcacagattccagctcaactgcccgttgagtctcatttccggaaggaaaattctgatacctgccaccaaacatgcgattgagatcgttatggatatagcgcttactttcacgcatggcaggcaaattgccgaaaatgagcagcaggttatgctgcaacgacagactcccctgcaccagttgtgttaataactggagcagtatttcaatcggggccgtttcattaccatgaattcctgcggaaataatcagcgtatcgcttttactctcttgtgggatcagctgtaatacaccatctgccagccatttagcggttaatgtagacgggaaactcagtgtattttcaagcttcttttcaagtaatggggaaagtaaatccatcaatcctcctgattagcgctgaaattcatagattgaaccgagtctgaggatctgggttaattcatccagagcggaacagacttcggtcaacaactgtggatcggccagatcagcggtatataaagaatctcgataatggcgctcaacccagtcagttaagctcagatacagatccggtgtcataatcactgccggattaaccgccgccagttctttttcttgcatcgccacccgaagacgcaggcaagcaggcccaccgccattacgcatactttcgcgcaaatcaaagaaatggagttgactgatagggctctcatccgtcgcaaccagagactgtagataggatgatacgttggtattctgtcggcactcttccggtaaaatcagcgccatactgccatctgacaggcttaataactggctgttgaaaagataagaactgactgcatcctgcatggatacctttgatgcaggcacctcaacagggatcagtttttgcccgaggtgcgccagcttttcctcaatttcagccaagactgactgctgatttaaaaatgcttgctcatgataaaggaatacattcctgttgctgaccgcaatgacatcgttatggaaaacaccgctatcaatggcgatagggttctgttgagcaaaaacagtttgcctttcatctaactgatgtaagcgtgcaattgcttcactcgcttccagtgtctggcgggcgggataacgctctggtacaggccctgcccggaaagcactgcggccatatacaaatagctgcacacccgcttcatcatattcaccacaaaaacggttatggtttgccgcgccttcatctccccagtcagcatgttgaggcaatggtgcatggtgaacaaagtaattcggatctgaaaaaaccgcttttaacgcccgggatgtcgtcacactctccagtgaacgatggagtttgttatttaagtttgccactgtgaaatggacacgctggtcagcactgtcagcagaaggagatactgtggctgcgttagctgtccacatggaagaggctgaactgagattggataacagcaatggggagtattttgccgctttattcagcacctgtgcatcatttcccgtaaaccctagctgccgtaaagcagataaatcaggccgctgttgtggaggtaaaaccccctgcactaatcccatatccgacagtgctttcatctttgttaacccttgtaaggctgccttacgaggattggattgctgcccacgatgatttatcgaggcttcattgcccattgataacccggcataatggtgggtcatacccactaatccatcaaaatttgcttcaattcccgacatagtgacctctgttctccctgctgtccttagaaaaccagctggtctttggaagccggctggtcagaaaaaagctaactgaaaaaattaagagcggaaaaaatcaagcccggggacgaatgtgtctggcagagacagtttgtctgtcaccaaagatgccattggccatgcacaataatcagcagcatagtaagcactggggcgatgattgcctgatgctccaatcccaccaaaaggtgctttactggaagcgccggtcagtggtttgttccagttcacaatcccggctcttgcttcttcctgtaatcgaaggaaaaggctttcatcaggtgaaatcaaccctgtcgccagaccgaaacgggtatcattggcgatggaaatagcttcctcaaaggtgtcataacgctgtaaggtcagcagagggccgaaatactcttcatcaggaacctgactaacgcctgtcagttcaataatgccgggagtcataaaggttgaatgcggatccggttgtgtgagtgtcagcagggccttgccgcccagtgccagcaaccctgattgagcattcagcagactttctgccgctgccaaagagatcacaccgcccataaaaggctgaggttcagcatcccagcgggacgggactatctgacgagccgcttcggtcagccgttgaatcagggcatcgcccttctcaccctgttttaccaacaaccggcgggcacaagtacagcgctgacccgcggaaataaaagcagactggataatggtataaactgccgcatcaagatcatcataatcatcgacaatcagggcattattcccccccatctccagtgccagcattttttccggctgaccagctaacagacggtggaagtgaaaaccggttgttgcactgcccgtaaacagtattccgtcgatttcccgacaatccagtaacgcaccaccggtttcccttcccccctgaacgaggttcaatactcccgcaggtaatccggctttgatccataactccacggttttttctgctgtaatcggcgttaattcacttggcttaaagattaatgtgttaccggcaatcaaagcgggaacaatatggccgttaggtaaatgaccggggaaattataaggcccaaaaacggccatcacgccgtgaggacgatgctgtaatattgcctttccatccggcatggcggtttctgaataacctgtccgttgctgccatgcctcaatggaaatagcaactttaccaatcatagactgaacttctgtccgggtttcccacaatggtttgctggtttcttcacttatcacacgggcaattgtttctttttcctttgccagtaaatcagcgaatgcctgaacaatggcaatacgtttttcaactgccagctttgcccagtctgaaaatgccctgcgtgctgccagaccagcttcttccacttgcttaacagaagcactgcgggcctgccacagaatttgctgatcaataggcgaatgtttaactacctgtacaccctgcccggttacccacttaccatcaatgtaatttgcctgatcactcattgtgaagtttcctcggaaaaaagagcagcacagcgaactaaatccccttcctctacctgaagtgcttccatttctgcgccagtcaggtgcagttcatcactatcaatagcgtcagagatattcagcagcaacgctttaaaatcctgaaaatgtaggttagaaacaatgcatagcctgccatcactctgtctgaaggcattctcttttcttttaacagacactagccggctggcttttacggttcgcacatcatcgatctcagcctgcaaaatagcgccggcatcaaaaatatcgaccataccgtggtaggaaaaaccttctttttccagaatcgcgcgggccggcactgtattctcatgtacctgcccgatagcccgctgtgcctcttccggcaacaaaggaacataaatcggatggaacggcatgagttcagcaataaatgttttggtgccaatgcctgtcagataatcagcctgcgcaaacgggacgttgaaaaagtgttgcccaagtgcattccagaatggtgattcgccctgttcattaactactccgcgcatttccgcaaaaatagttttcggaaaaagatggcgaaacgctgaaataaataaaaagcggcttctggaaaggaaaataccattgcgccccccatgataagccgggtcaaggaacagggtgcacaactcactgtatccggtgtgatcctgccctacaatcaaagtctcaaacgaattgtaaattcccaattcacgggatgagcgcaccgatttatgaacacggtaattgtagaaaggctcctccagcccaaccgcaacctccagcgcactcaccccaacaacacgatgcttttccgtgtcttccagagtaaacaagaatccctgttgtgaactctcgcgcccatcgtggaatgaatcaatgctgcgtgaaatccgggccgccagatattcctgattatttggcaacgacgtcaaacccactccagcgcgagacgagagatcgaggatatcccccaaatctttatgttgaacggatctaaatagcatcatgatatcacctcaaaaactgcgtttattcctgaacaaatcgcttgagggcattttcaagccgggcaaaaccgtcgttgatatcctgttgttcaatatttaatgccggagcaaaacgcagtacattcggcccagcaatcagcgcgattaacccttcttccgcagcaagattggttaatgttttcgctttaccctgatatttgtccgccagttctgcgcccagcaataatcctttaccacgtatttcactaaacacttggtaacgctggttcaaatcagtcatatgccggatgaattcctgatggcgctcctgcacacctgccaaaaacgccttctggttcactatgttcagcactttatgagcaactgcacttgccagtgggttaccaccgaatgtcgtgccatgtgagcccggctggaatacttctgcgacatgctgtttaaccagcatcgctccgattgggaacccaccgcccaatccttttgcactggtcagtatatccggctcaattcccgtttcttcataggcatacagataccccgtgcggccaattccggtctgtatttcgtcataaatcagcaatgcctgatattgatcacacagctctcttaacgccttcagaaaatctggcgttgccgggataacaccaccttcgccgataatgggttcaacaatgacggcacaggttttgtcagaaatatgtgctttaatggcttcaatatcgttataagggagatgagtgatttgttgtggaagaggagcaaaatcttgtgaatatttaggttgcccacctactgtcactgtaaataatgttcttccgtgaaaagagttttcaaatgagataatttcgcttttatggctgccatgtttatctaaagcatattttctggcaattttcagcgcagcttcatttgcttcagcgccggagttacagaaaaaaaccttatcagaaaaggtattctcgactaaatcttttgccagatttaagaccggttcattggtgtaaccattaccaatatgccagaggttttccatttgattgcttaatgtttcttttaattcattattagcatgtcctaatgcgttaacagcaatacctccagcaaaatcaacgtattctttttcatcctgatcccatactctggagcctttagctctgacaggaataaatggagctggtgcgaaacaaggaaccatatactgttcaaaccaatttctctgaatttctttcgtcatttgttttacctcgaataattaacaagaaaggtggtaataggcgtgtatttaaagagtctttaaaattaatggatatactcatattttccattaattatttctattaatttttagttttattcattcattgaatcaatgcttttctgaaacttaaaattaatctttcaacacctttcattgccagacctgattaacaattaatcgcatcatctctttgatttttaacaaagtcaacacaacaaaatcacaatgaatttacttttttgatgtttttcacaatttataaaaatgattttttattcagtttatgcataaactttgcataaaaaataaataaaaggaggtatataattaggcagagcgaaaaacagtcgtgttttgctcggtaattattcatttattgaaggtacattttacaatcaggtatattaaaaaatatttgcaaatacgaatttttacaaaaaaataaatataattatttaaaatcaatcaattacactaattgaatctcagatattatcatgactattcagataaactggcctgatgatagttcaacaacttccggttacatgaatgatcttcccgttaatcaactaaataaagggaatgtactttttcagagaactgaaacagaaaaaagtgcagaagaatattgatacttctgcactgagtcgagtcattgcctgagcattgcgtacatcatgggaccattgaaaggaagcggatattcagctgtgacttcaaaccccagccgctcataaattctgacgtttttttcatccgaggtttcaagaaacaccggaaaaccttcacgttcagctctctcgagtccgggatcaataaccgcacgactcagtccctttccctgaaagtcaggatctacggcgactacccccaaaaaccagcacggaaaatcagggcgttctttcgccataattgcttcagatgcctgcattatgttcgctctttctcctgcgatcttttcaaattcaacggacagcggaacaaaaacagacgctgcatcttcaataccgggagccgtccaaatagacacagccgttccatcatcagtagcccacacatgccctactgccataccgacttttcgaagaaaggtctccagataacgctgtactctctgctggtgactgtcctcagccagaaaatgccgcatcaaagaatatccatcaaaagcacgtgtcaatgtttgtatgcaacgcgttagttgtatttctgatatttctttagactcacagacgctcatgttttcgctcctttatcttattaatacccaattaattctcggatatattcagttcagaatggcaaaatacatcttttaacagcgataaaattactcaacaaaccatcatgcatcaattagatatatttatccaattaacgcaataataattcaagtgaattgaaagcatctctcaatcaggataaaaatccaaaaacaaaacaattcacttataaaaatacaaaatgaaaataacaagcagcaacagtgaagtttttttatctgataatgatgttaattacacaaaaaaaatcacattgcattcagaatattcttaacaattgaagagatagaaaaggaaatcatcatataccatattactggctttaaatatcatcaagcataatttattggaaataatattaagaatatacataaacaaaaaacaaatcggtttaacaatagtttaaacatcccaagtaaaatatataactctgtttatttcttgcgggataaacatttccgactatatattaatattcagcatattcgtttatcttcttttagttttccttttgtatgtaacccgaacacccttaaatatcaggtaaaaaaatgcagcaaacaaacttatctatctggcgttatttaatatcacgggatgtgatgctcaacatgattataccgattattctgtatcatgttgctttctctgtaggcggtgtaggtactgccttgctgctgacaacaatatattcagttattctaaaaattatcagtaaaacacagagtctttgggtagtgatcgctctgttgttagtatcagggttaagtcattatctttatatacacggatataccctgtttgataaaaaactggaggaagttttcggttcaattagcagtgctgcatcactggttgcagttttctgtttttattcactaataggaaaaccggctgcgaaaacaatggcggagcaagccatgccgggattaaaaactatctcagtttatggcaagcccatctatgacagagtatggcacgaagtttctatcgtctggattttggtctacctttcaaaagctgtcgggatttatattcttgcaaatcgaaccggctttcccattgatacaatgatcactttttgcggaacaccactgaccatactgatgatcctatacagtttttattggcccagatatcgctggcgctcgtatcgtaagaaacaggaacgcaataaatcagaataacgatattcctgttactttttttcgcggaaaacaaaaaataatcctgtgattatcgctaccattccaatcatacttaacgtagagagtgcattacctaaaaataaataatccattaatgcggtaacacacggtacaagataaaacagactagtgacattaactaaattgcctgcattaataagccgataaagtaataactgtgcagctacagaaataactaacccaagccataaaacagagataataaaaccagtggtgaattcaatatgaaaaggtttaaaaggaacaaacaataagcatgctattaaacttacaccatattgcaaaggcagaacttctgaagacgactgctgaatttgtttctgaaaaatagcgcctaaactcatacaacctaatgctgacaaagcaaaaaacgtacccagaaaagaaaaattagtcattaccagcccctggaaaacaactaatatcaatcccattagagataagaacaaacccagtaaacggcgaacggaaaaatgtttttctatcaccaacagagtaataataggctggatccccatgactgttgctaaaattccgggggtaatgccatgctctaatgcaagaaaataaaaaatagaatatccggcaatcatcaataagccagtacccgcaacttttccgatacttcctgacgccggtaagtaatgttttctgaacacacaaagtaataaaaggcatagaaaagcgatggcaaaacgtaccgtcaaaatggcaaaagaagagctataatccaacccccaacgagaaaagattgcaccactgctccacaataagacaaaaagagaagttgaaccgtaggttctccaaatatttttggagttcatatcaaacacacctattatcctgtataaaggactaataattagcatttaattaggcatttgtcatcaatcttcatttattcattcagctacgtatattcatatctcgctaattctataaccttttggttaaaaacgttttttcaatatattcaacaataatatcactcgcattatgttcaaagatatcccgggaaaaatgagcgttaattttctctttcgagagaaactggtcaatcatctccagagcgcgttttctttctataggacgattaataaataaatcgatgcatttatcagttaacgctagcccctctctctctgataagtaagcggggagctcagggtatccatattccggctgccatagaaaaccatactcagggggataataatgttgaagatatatttctaactgcaattgctggctataattttgtgggggcaagaaaaaaacatctttattaagcacaacacattcataaaatgtggtaagccccgcattcgataatactttacgggcccgccgtaattttttgagaaaatcctgtcttgaaaaacaatcaacatggatatgaggatgtgtttcagcgagtatattcttcaggtttccgattgttcttcctccacctgcaatcgtaatatttttttcatttttcagattgggaatagagagtaattcctgaagaaaatggtagtaaaaatctgttgtctcgctgtaaaccgtgtcaatgccaccaagagtaattaatacgccttctaatggatgatcatccattaaacattgttgcaaagaatcagaaataatggggggtataacttgataatcaccaagtttatcacggaatttagcaatatttcgttctattccatggaagtcctgaatgaacattttttcagtttggcgcagatcagcgtggagattactccacatccaaaatagcgtatcgatatagacaataggtgtacccagttgcgaaacaaaattgattgagccgggattggtattattaatgtaaagactggctcctgaaatcagctcagaatagcgtgaaagctcggtaacagaagtcgtatcacactcataaataatatcaaataaattcgatttttcacctaattgagaggaagtgagtgtacctaataaaattaatttagcatctgatatcaatttatttcgatgctttaattgctccacaatatttaatgtagtagatatcgggccaaaacagaatggttctgcgtcaaaaataatatacggaatattttttaacatattataatctcataagttaatatttacatttcctatatcagatagctttccatataacttttcatataactaaataaacaaaaaaccagagtagaatattgctattatctgttttttcaagtggctgccaaagcagccactgacagatttatggctttagccagtttaagtcgcgttagcgtcttaaacataaaaccacccgctttgcgggtggagttcaaaggttataccaagaaaaacacctttccgttacgatatagatgttcaagctaatattcgtaactcaaataaggaaaggtgtttatgggcattaaagcacaaagctcagcgcatacaaagtggctgtgtaaataccatatcgtcttttcgtcgaaatatagacggaaagtgatttttaataatattcgttcaagtgtgggagagatcctcagagacctttgtaagtataaaggtgtggaaataatcgaaggtcatctcatgccagctcatgttcatatgttggtgagtattccaccaaagctaagcgtttcaagctttatgggatatttgaagggtaaaagttcgttgatgatctttgatagacacgccaatttaaaatataaatttggcaacagaaagttttgggcggaagggttctatgtcagtacggtagggctaaatgaagcgacaattcaaaagtatatcagagagcaagaaaagtcggatttaatctcggataaattgagtagtaaagagcatgtagaccccttcaaggggtaggccaaagcagcaaagacacttagcttgaacgaagagaaagcagcgtcatttaggcgcagtcggtaacaagcccttatagggcaagagcaaaccacccgttatacgggtggttatgattaatgttttttaatctcactttctcatatcgcttgaataaaaaacgttaattgaataaataacattcagtcaatgcacaggtatccctgaacatatcagggaatagactgatgctcacggggtgtaatatgaataatcagatcgattcattaacatactatgcagcaactaaaaaatatgatcttcgctttccaacattgacagaagatctggatgttgatgtcgttatcattggtggtgggttttctggtgtaaatacagcattagagctggcagaaaaaggcattaccaatatcgcgattctggaaggaagaacgcttggatatggaggaactgggcgtaatggcgggcaggttatggctggcattggtcatgatttggatcggattaaacaccatgtcggtgagaaaggtctggagaccatatttaaaatcagcaatatgggcgcaggaatcatccgggagcggattgccaaatataatatcaatgcggatttttgcccgggttatggttatttagggtataactccaggcaggataagacgctgcaaggttggctgaaagagtttcaggcctcctgtcccgataatgaaattgagctttataccggttcagatgttaaaaaagtcatcggttcagatctgttcacctctgcattgaaacatatgggaggtgggcatgttcactctctgaatctgttgttaggggaagctaaggctgccacagaatatggcgtcaaaattttcgaaaacagtcaggttttgaatgttgaatatggcccaagagtgaccgtccgtaccgcaatgggttctgtacgggcaaataaaatgttgtgggcatgtaatgcgtttctgaatggccttgaaccaacaatttataaaaaaacaatcaatacttacgcatttcagttaatgacagaagagctgtcagacgaaatgatcgaaagagtcagccctatccacggagcttatagtgatatcagtcccatcatcaattactggcgggtgactaaagagaaccggctattgtttggtagcgcaacgcagtatctcgaatatatcccttctgatttaaaagcatggaaccggaatcgcatgctggatgtttatccctacctgaaagacgtgaagattgaactggcatggggaggcccgatgtgctgtagcgtcagcctgttcccgcaaataggttctttgccacagcataacaatgtcttttacgttcaggggtattcagggtttggagtaacaccaagtcatattatctgtaaagtgctggcagaaggtatgagtgagggctccgatcgttattctttgctgagctctatcccgcatatgaatgttattggtaaagagcaactgagacatgtctatctttctctcggaaagagctggcatcagctttcaggctactggaaagggcgtcgttagttttactgatttttggattttcactgttttttgcacaataaatttcttttttgcacaataaattctgaaaggtaaaagtcatgataaagccgttattgttagagaaatcacttcctgaattaatgccgattggcagtgtgactaatcttggttctgttgtagtagaaggtgatccacaggcaagtgttgccatggttcacggggaaccaaatgataatctgacctgcggtatttttgcctgtaccagagggaaatttaagatggtttatccctttgatgaaatggcaacggtgcatgaaggttctgtgaaactgacggatgttaaaaccggtgttgtggccgaatatcacaaaggtgattcatggtttgctgccaaaggtacggaagttttgtgggaaattaccagtgaacgcttcgtgaaacattatatggcgtgtatcaattctcagattttcggctgacggagggtaatatcatgagtgacatcactttgctggcgtccgttacggcttttttgcagcgttctcatggccattacattaatggacaatccgttcgtggtcagggagacaaaaccttttcagtcgtcaaccccgcgtctgatgagatgatcgctaccgttaatcagggaagtgaggtcgaagccaatgctgctatgcaggctgcatctgatgcttttcatggttcatgggcccggacttcaccgatggaacgtggaaattgcctgatacggctggcggatttgctgcaaaaacatagcgaagaacttgcccagttggaaactctatgttcaggaaaaaccattcagttatcacgtatgctggaggttggagcttctgcccaatacttgcgttattttgctggctggtcgagcaaaataagtggtgaaacactgaatgtttctttgccatctttcaagggtgaagaatataccgcctttacccgtcgtgaaccagtcggcgtggtcgtcgggattattccctggaatttctcgatcatgattgccatctggaaactgggggcagctttggcctgcggttgtacgattgttctgaaaccaagcgaatataccccgttaacaatgctgcgcgtggcggaactggcaaaagaagccggaattcctgatggcgtgattaatattgttaatggctccggagccagtgtagggactaaactgttaactcatccgctgtgttccaaagtgtcttttaccggatcagtacctacaggtaaacttataggtaaatctgttatggaacaggggcagttccgtgcaacgctggagctgggcggcaaaaacgcagcggctttcctgtcagatgtccccgtagagaagatagttgatggaatattggaagccggatatctgaatcaggggcaaatctgtgcggcagcagaacgtttctatattccttctgttcatatggatgcggttttgaagttactctccgaacgcctgtctacgatgaaaattggctctccccttgatgaaacgacggaaatggggcctttagccaataaagagcactatgaaaaaattctgtccctgtttgaaaaagcgcgtcaggaagggaatgaaattgtttatggtggtcgtgcactggaagggaaaggtttttttgtaatgcctactgtgatccgagccaaaagtgcagatgatacgttgatgaaagaagagacattcgggccgatagggactttcctcagttacgatgatgaggaggagctgattgctatgatgaacgcaacgccattcggtttatccgccagcttatggacgaatgatctcagcaaggcgatgcggatgatcccgcgtattcaggccggtgttttgtgggttaacatgcatactcatcttgatcctgctcttccattcggaggaataaaatcatcaggactcggccgcgagtttggcaaggcattcatcgagtattacacagaactgaaatcagtcatgatacggtattgatagccgcaggatattgatgcttaagcggtttaaagttgcttcgtcgcggtcaaaacgaggcaacttaatcgtttatcaatgttgaaaaatggttttaggctgatgctttcaaagccgttgatccaaaaaaaatatttccataatactgtataagcattgtcataaatgtgtcattgcggtttcacaaaaatgccatattgggtgtttactatttggctagaaggtgttttttaattctcccgatcataaggaatcacctatgtcctgtaatgacctgtcccatcgctctacatttcataatcgtacaaaaaacattcttgttatgactgtcgctatattagcgtcaggcgtatgtttatctgcgcaagctaacaatagtgcggataatatcatggcagaaaaacgttccgcccatggtgatcttactcagtttggtggagcccgtcgcctgactcaggatcaaactgatgcacttaaagcagccttaaataatacaaaagcgaagaatgtcattttatttattggtgatggcatgggggattctgaaattacgctggcccgcaactacgcacaaggtgctggtggttttttcgagggaatcgatgctcttcctttcacggggcaatatacacactactcactggataaagagacgaagaaaccggattatgtcacggattccgctgcttcggctaccgcgtgggcgtcaggagtgaaaacctataatggcgcgctcggcattgatgttgtcggcaagccgcatcagtcattactggagttggcaaagcagaatggaaaagccacaggaaatgtgacaacagctgaaattcaggacgcaacccctgccgcgctatatgcgcatatcaccaaccgtaaatgccgggatccacaggaaacttcagaaaaatgcccgacagaagtgttggataaaggtggcagaggttctatcacagaacaacttttgacggcgcgtgctgatgtcactctgggaggaggggctaaatattttgatcaacaatcaacagccggagctaataaaggaaataccctgaagcaacaggcactagatcagggttatcaatgggtaacggatataaaatcactgagcaatattaaagaagccagccagaaaaagccgttattaggcatatttaataatggaaatatggatgtggtctgggagggaccaaaagcggtttatcacggtaatcttaatgaagcgccggtgaagtgccaaattaatgcaaagcgtagctctgatgaaccgacattggtacagctaacagagaaagcgattgatttgctcaagactaacaaaaatgggtttttcttgcaggtagaaagtgcttcgattgataagcaagaccatgaagctaacccatgtacccagataggggaaacagtggcactggatgaagctgttcaggctgcgctgaaatttgccagacagcatgaagatacgttagttatcgttaccgctgatcatgcccattccagccagattattgctaatgatgttaaatcacccggcctgacccgttcattgattaccaaagatggtgcggttattacggtcaactatggcaacgcagaagaaggcaaacagaatcatactggtacgcagttacgtgttgcggcttatgggccacatgctgctaatgtcgttggcttgactgatcagacagatttgttctttaccatacgtgatgcgatggggttgaaacaatagaaaaacgtgaagaataaaaaggaaagacgtattaaaaggaattaagctgaatagataattgacagataaatagtaacagtggtgcgaagggggggacttgaacccccacgtccgttaggacactaacacctgaagctagcgcgtctaccaattccgccaccctcgcaggtactgttatttatctgatttgtttaatgataactatctgatttggtgcgaagggggggacttgaaccccctttagagcac

SEQ ID NO: 343 - DNA, 26355 bp, Xenorhabdus sp.; identical to SEQ ID NO: 139
  CDS (688)..(1878)

SEQ ID NO: 344 - DNA, 26092 bp, Xenorhabdus sp.
  CDS (12281)..(13480)
agcaaaagcatccacattctgcaaaatttgcagtgaagcaactcggaaatcaggtacagggtaagggtcaatataagcaatcttcattatttttttatagtgtctaataaacggtttgcagaatgctcccaggtatacagggattctattctctgacgagcacgtttccccatatcttttcctctatccggtaaagaaaggagatgattaacggctccggcaatagccgtctcattacccggtgcgaccagaataccagactggttttcatttcccaccacttcaggtattccaccgatataactggcaataacagggcgtccgcatgccattgcctctgcaatagtaataccgaatgcttcatcgccaatactcggaaatatcccggcatcccctgcggcataaaactcaggtaattggtcatggctaacaggaggatggaaaatcactgattgttctaatcttaactcagcaacttttctttcaagttgctttagttcttcacctgcgccaataattaataatttaacatccttatctcgcagcaaggccattgccttgatagcaactttcatacctttccagcccactaagcggccagcaaaagtcagcaaaaacgtattttcatggatccccagcttgctcctgatatcagaatgagcgggtttaaatttatcaatatctactccattgtagataacatttgggaattgtttgaaatgatgctgaatctgccaaccattaaaatggctacaggctgcccaggctgatatttttttccctaacagccgatcacctttaaaaaagctggttcccccgctcatataacaaaacttagtacgggaatgagttggcatcattctgggccagaaaaaatcaaaaggttttgtcagtatgacccagtcaaaattttcagcaatcaccgcctcacgggcatgacgcgcaaacgagtaacgttcaacaattcgctgaaagcgacgaccgatattgattacacgttctctggggataaatgggaaagtatggacccgaatatttcgattgcccaattctggtttaatatcccctgtacctccgaaaatatggatctcatgccctgcgtcagtcaacgccttcgctagctcccaaactgcggtctgaataccaccataggacatcgtcacggtgacatcaataaaccctattttcatcgtttttattatcctttagtcttcggcttccaatatgcttttcactgattgccagacctgttccaccgatatatctgacatatgatcttcgcgagttgcctgacgataatccaccggatgctcgatgacagccaattttgcatgctgttgtggagcaagaaagcgaccgggatgaaagctatggtacatagcaaccattggtatccccaatgctccggccaaatgcgttgttcccgtatcaacaccaacatataaactcagttgacttataatcgccgcgttttgacgcatcgtcgtttttccagccagagatatacacctttgtgtgcctaattgctcagacaagcgttctgccacttcagcactatcctgactgcccagtagtaaaatggaagctgacgggtaatgagaataaattcgttcagctagttcataaaaagagtctaccggccagtcacggtaagatttcgctggaaaactttgtaactggaagccaatccttaatttatcttcaagcctatggagatgtaaaaaagagtgggcatactctgcttcactcggactcacgcaatatttcaaacgccagtcatgaatctctatcccaagggcatttgctaataacgctctttcctgctgagcccgcataagctcttgcggtttttctacagataattcatttaaattttgacgggaatgatcagaaaaacaaacaacaacattcgcttttcttctggcatattgtaacaatggcttatcattactatataccaatgccaaatcatagctatgacgagaaaaccatcctctccacttcgcttttgtttttgaaaaagcaattattgaattgatttcatcaatattctcaagaatctcttttgttcttttatgcaccaatacatcaatattggcttccggccagtttagtttcaaagctctaatcactggtgtgacgagtaatgtatcgccaaaacgtgcaatattgatgatcaaaatatttttaggctgcataatgatgaattataaaattatccattaaagagattactcaaaaaagccgaggtcaaggttatttaatatgtattggtgaaattaactatcaattttgctttaatataataattcatgctgcatttgataaagcaatgataagagcataaattactattttctgccactggtaataaatatagattccattttatccagcatattatccataccaaattcagctattgcccgtttcagtgaggcatctcccatctgtaaacgtagttctgcatttcttattagtaattctaacttattagttaattgttcaacacacttaggctcgataatatagccagtttcaccatcaatcacagcctcagaaatcgcgccaaccgatgtcgatatgaccggtaaaccacaggccattgcctgcataataccttgcggcactccttcgttaccaaaagaaggcaatgcaaaaatatccattgagtttaaacagtccggcacatcctgccgattgccaagaaagataacactatccgtcaggccttcctgcttaacccatggttcaagattttttcgctgtggcccatcgccgacaaacagtaattgccactccggataacgttgatggagagctttccagctatccaacagatagcggtgccccttccaggttcgcattgttgccacaatcccaattgtcggtttatctgcaattccaatacgttggcggcacgcctgtttattttcaggatgaaaacgggtcagatcaatgccggtgggaacagatgtcatatgggataaagggtagcgattgtttgtgtgcagggattggcgcaatttttctcccgtcgtcacaatatgacggcaagattttaaataaagccagcgggtcgctatggaagttgaaacattagtggaaacatgtcgggtccgaactatcgggggcattcgctttaatgtggcactcgccgcagctaccagccaggaatcggtcgaactgtgggtgttaatgacatcaaaccggtggccttcagcctttaaccagcggcgcattgctgtaaaacatgagaggcgttttttttcaatcggcaacgccacaacaggaacaccataatggtgggcctcacgatagagtgtagaagtaagacagcaaacgataaccacatgatgcccacggcgcatcataccctgagattccgtcagaatacgaatctcctgtcctccccaaccacatgatgattctgtgtgtaagatatttaaggtttttctagtcattttcagagtcatgcctgacgattcatatatcaaaaaaacgtagtataactgaacgactgtttacgttcacgagtaaccgtatctgtctaaatatatgaaggtttcaatgacatcaggcataaaaaaacccagcaatagctgggcttttcaatccactaaaattatttaattttagcttctttgtacattacatgctgacgaacaactggatcaaactttttcatttccagtttttcaggcatagtacgcttgttcttcgtagtggtatagaagtgaccagtaccagcagaagaaaccagcttaattttatcgcgaatacctttagccatttttcagctccttagtatttctcaccgcaggcacgcagttcagcaagaactgtatcgataccctttttgtcaatcacacgcatacctttagcagttacacgcagagttacaaaacgcttctcagactcaacccagaaacggtgagagtgcaggttaggcagaaaacgacgcttggtcgcatttaatgcgtgagagcggttgttaccactcacaggacgcttgccagtaacttggcagactcgggacatgtctattctccaaaaatcaattcagctcgagctttgtattgggtatggccgcctcgtcaggcttaggagcccatctcagcaaattttctttactgataaaaaacgttgctgaaaagactcacaatctctcagcaaaaaattcactgagataggctcttctcgccaggcccaagatcctcaaaggtggcgtagtatacgccctcattcgccgatgctcaagtcccgaacagctaagatctgatcggttcgtacaaaaaccgtattaaatccagcctctttctacaaatgaaacacaatattgtttgccaataacaatatgatctaaaactttaaccccgattaaatcacaagcctcaatgattttttctgttaccagtttgtccgccagactgggttccgggttaccggaaggatgattatgggccaggataattgatgcagcatttactttaactgcctgttttacaatttcacgcgggtggacttcaactttgtttatcgttcctttaaacatttcatcatgacaaatgactttatgctgatttgtcaaaaacaggacgacaaaaatctcccgatcctgccaggataataaatcctgcaaataattttgagttgcgaccggactgctcatcacatcttcatggataaattggctggagaagaaacgctttgccagttcagaaactgcctgtaactgcacgtatttgcataatcccatgcctttatgtgagcaaaaatcagcataatcagctgaaagcagatggtacagagaaccaaatgattgcaataggtgctctgccatttgtacaacaggcacacctctggctcctgtgcgtaaaaatatcgctaacagctctgcatccgtcagggcaacggcaccatatgccagtagtttctcccggggagcaagatctgaattcacttcatcgcttttttccaccatcgtgatatccattctctgctccttttacttatcctgtgtctggtgaacagccatcatggcgcatactgccgatactcacatcgctaatatctcatgatgaaaaaacgaccgccagagctattcttatgctttgcgtaacgcttcgcaaacttgtcacttagtcatcacaaaacagaggcgttctcaacgccatattctcagtaccttattttcttatgatagaatcttggtaatcgtaacttacaggtggacaatcagaatggcaggactttccggcaacgaactttctggtaagcatctttctggtaaacagattgtgctcggtatcagtggcggtattgctgcttataaaacagcggagctggtacgtcgtttacgcgatcgcggtgcacaagtgcgcgtagtgatgacaccagcagcagaagcttttattactcctctgacattacaggccgtctcaggccatccggtttctgatgatcttttagacccagcggcagaagcggctatggggcatattgaactggcgaaatgggctgacttgatcattcttgcccctgctaccgccgatctgctggcccgtttaagtgctggtatggcaaacgatttagtaacgactatttgcctggcttcagcagcacctctggcagttgttcctgcaatgaaccagcaaatgtaccgtgcccaagcaactcagcataatctcaacatactaagagagcgtaatgtgctgatttggggtccggatgaaggcagtcaggcctgtggtgatgtagggccgggaagaatgattgaaccgacggagattgtcgagcgggcaactcagcacttaaaccctgtcagagatttggtgggccttcaaatcacaattactgccggcccgactcgtgaggcattagatcctgtccgttttattactaatcatagctccggaaaaatgggcttttctatcgctcaggcagcggcaaaacgtggtgcggaagtcacgttgattaccggccctgttaatttgccgacgcctctaaacgtcaaacgtatagatgtcaccagcgcactggaaatgcacaaacaagtacaggaaacggctgcttcacagcatattttcatcggctgtgctgccgtctctgattatcgcttcaaacagactgcaactgaaaaactcaagaaacagggtgatgaaatcacctatacattagttaaaaatcctgacatcgtagcgagtgttgcggcaatggaaaaacatcgcccctttgtcgttggatttgcagccgaaacccggaatgtggaagaatacgcccgcggaaaactcaggcagaagaatctggacctgatttgcgcgaatgatgtatcgctggctgaacacggctttaacagtgataccaacgcattacagctgttctggcatgatggcagcattaatttaccacactgtgataaattacaactcagccaccgcttattagacgagatattcaaacgctatgatgaaaaaaatcgacgttaaaatccttgatccccgcatcggacaagaatttcctttaccgacttacgctactcctggttctgcgggtttagatttacgtgcttgtctggataatgcagtggaactggctcccggtcagactgaacttcttcccacggggctggctatccatatcgcggatgaacaactcgctgcggtcatccttccccgctctggtctgggtcataaacacggggtagtactgggtaatctagtcgggctgattgactctgattatcaggggcaactgatggtttctgtctggaaccgcggagataaaactttcgtcattgaaccgggtgaacgcattgcacaaatggtaattgtgcccgttgttcaggctgagtttaacttggtagaagattttgaaagcagtgaacgtggcagtggtggttttggtcattccggtcgtcaataattttcctaacgcctgataccattaacccacttttatatttttgcccatctttgcatgggcaaaatgtatacccaatcagttttgagttgcgatttatacccaatggatttcaagttgcatcgcggctgcaagggaatgacaaattcgtcgggaacgaatttgcccagccaaaggctggcctccggtgagaggcagaagcctctcagtaatccccgggagcatagataactatgtgaccggggtgaatgaatgcagccaacaaagaggcagcttgaaaggcgaaaggtatagatattttgctgtcttagcaggggtattaccagacatggcagaaatagaacgtacaaaaaagaaaaacagacgtgaagaaatcttgcaggcactggcacatatgcttgaatccagcgatggcagccagcgtattaccacagcaaaacttgccgccaacgtcggtgtttctgaagccgcactttatcgtcattttccaagcaaaacccggatgtttgacagcctgatcgagttcattgaagactctttgatttcacgtatcaatctcatcctacaggatgaaaaagagactattccccgactccggttaatcctgatgctgattttaggctttgcagaaaaaaacccggggctgacccgtatcatgacaggccatgctctgatgtttgagcaggacaagctacaaagccgcattaaccagctgtttgaacgcattgaagtacagcttcgccagatcttaaaagagaagaaaatacgggatggtcagggtttcagttatgatgaaaccgtactggcatcacaattgctggctttttgtgaagggatgctctctcgcttcgttcgctctgaatttcgttatcgaccaacgaaagaatttgaagtgcgctggcctttgatattaacgcaattacaataaatcacgcttaccacttttcatgatagaaatttgataacaggcgtttttttacattaatttgtgttaacatgatttggctagctgagttgactacccaatcgctcagtaatgacattccagccatattatatacggaatgttatttctactactcaccccgcccaccattgggcgagggattttttttagcctgctattacggcagaacttatcaatcagataccatactcgcgacggtaagcttccacagcttccaaatgagactgcatttccggattttcccgcagataagtgatcaaatcatttaaagtaatgatagagaagacctgacaatggtaatcacgttcaacttcctgaattgctgaaagtgtttcccgcccgcgctcctgacgatccagacacaaaataacgccagataacgttgcaccatgttgtttgatgatttccatcgattcacgaatcgcagttccggctgttatcacatcatctaccactacgactctgccttgcagtgggctaccgaccagagttccgccttccccatgatctttcgcttctttgcgattaaagcaataaggcatatcaatatcatgatgctccgccaatgctacagcggttgtcgttgcaattgggatccctttataagctggcccgaacagcagatcacacgggataccactatcctgtaatgctgcagcataaaaacgaccaatcaatgccaaatcacgccctgtattaaaaagacccgcattgaaaaaatatgggctcttacgaccggatttcagcgtaaactcgccaaatttcagcacttgctttttcagtgccagttcaataaattcgcgctgataggctttcatgggtttctccttttgtgcattattatcattcttgttgctgttattacagacataaaaaaggcgactcttcagccgcctgatctatttacttttctagcgcatctcgctgcgccgcaaaaatagtttccaatcccccttttgcaagggaaagcaatgagagcagttcatcatggctgaatggttcaccttctgccgtgccctgaacttcaatcatccggccatcatccatcatgacgacgttcatatcagtttcagccgcagagtcttctacatactccaaatcacaacggccttcaccttcaacaataccaacagaaacagctgctaccattgatttcagcgggctttctttcagtttgccatcagcaaccaatttattcagtgcatctaccagagccacacatgcgccggaaatcgcggcagtacgcgtaccgccatctgcctgaataacatcacagtctaatgtgatggtatattcacccagctttttcagatcgactgccgcacgcaatgaacgggcaatcagacgctggatttccattgtacggccagtctgcttgcctcttgctgcttcacgggcattgcgggtatttgtcgcccgcggcaacattccatattctgctgtgatccagccctgcccctgacctttcaggaaacgggggatcccttcttcaacggaggcattacataacaccttggtatccccaaactcaaccagaactgagccttccgcatgtttagtgtaattacgggtgattgtaataggacgaacctgctctactgctcttcctgccggacgcattcctatctggctcatagtgttctctccgctgttaatactttattgggggcgcattatacggcctaacgtggcgaatgcctatcctgcatctgcatggagcgttataatctttcatcattttataaattgggaatgagttatgatccgtagcatgaccgcttttgcgcggcgagatatcaagggagactggggaaacgcggcctgggaactgcgttctgtcaatcaacgttacctggaaacttacattcgtctgccggagcaattcagaagtctggaacccgtcatccgtgagcgtattcgttcccgcctgactcgcggtaaagtggagtgtaacctgcgctttgaactggatacccgcactcagggcacactgattcttaatgaaaagctggcaaaacagctcgttgaagccgctggctggattaagcaacagagcaacgaaggggaaatcaaccctgtcgatatcctgcgctggccgggtgtaatgtctgccgaagaacaggatctggatgccatcagcgcacaactgctggcagaactcgatttggcactggatgcctttatccaaagccgtgaaactgaaggtcaggcacttaaagcgctgatcgagaagcgcttagatgccgtaacagtagaagtgggtaaagttcgtgaacagatgccggccatcctgcaatggcaaagagagcgtttacaaactaagctggaagaagcccaaattcaattagaaaataaccgtcttgagcaagagcttatcttgttggctcagcgtattgatgtggcggaagagctggatcgtttagacgcgcatatcaaagaaacacgtaatattctgaaaaagaaagaagctgtcggccgtcggctggatttcatgatgcaggaatttaaccgcgagtcgaatacgctggcatcaaaatcaattaattccgatgtaacaaattctgcgattgagttgaaagtgttgattgagcagatgcgtgagcagattcaaaatattgaataacgtttcataacctctcacaacatttcacaaagccagtaatatctgagtattactggcttttgttatcctaacgaagcacgctttcttcctgtggaagcgcggatttgggcaatccgaaaattttgtcaaaagcccagttaaaaaagaacgtataaatagggatgaaaataatcagtgcgaaatccagtatgagcgcctgaagcaagctgattgaaagccaccatgcaataagcgggattaagaagataaccaaagttaactgaaataaaacagcatgtacgactctacgccggaatgtccggatgcgtgactgctgacgtgattcccagaattcaaacaatgtattgaagataaaattccaactgaccgcaatggttgtaatgaccagcgccagtggacctgtaacacccgccgaattaccggataagaaagcgagtgtcagcgatgaaatcatccagccgataacttcataagcagtaatgaaaaccactttacgtttaatgccctgcatattttattcgaaacctgtttttgtgctgttattttgaaactggcaagttaaatcaacaaacgtgataataaaagttaactactatcagttttattgaaaggttggatatgccattcaccagtgacaacttgctcgtgttcctgacagtattagataaaggctcattttcagccgcagccagagcactacaccgggttccttctgcgattagcatggcaatcgctaatcttgaagcggaattgggatttgccttatttgatagaaaaagccgggaacccgtaccgactgagaaagcaaaaacgttggctccttacgcgcgggagattgtcgataacttacgacagcttaatgttttttcacatgaactgacgcaaggagtcgggagtacactcactattggtatatctacgggagttaatccacaaaaattattcctcgctttacatacaattaatcaacgttatccattaatgaatattgagattattaccgctcctcaggatgatatcctgcctttactgcaccagaatcgtattcaattggcattagtttttggcggattacatgttaatccacaggaacaaatttattgcattggtcatgaatcatttattgcaacaatctcatcatcccacccctctttatctcatcagacttccctttatattgaggatttagtccaaacccggcagattattattgccagtcatcatcgtgaaccaagtgatcttcgtactcaggtcgcaactaaatattggcgcacggataatttttcgatggcactcggtctggttgaagcaggtatgggatggggaaatcttccttactctctcattaaagaaaaattaattgatggatcactgaaacaactggaattccgtaatacaaaaaatggattagtattacctatacatgttgtgagcctgaaaggaaatgcgcttaagcgtggtgcacaggagtgcgttgaattattgcagcggaatttacaaccacatcatgacgaacagataaatgccgctcccatcacaattagataaaaatagttagaaaaaatgaatcatcgtctataaagtatccatcgtaatttaagactctttgtctctcaaattaacaggataacccgatgagaatggtcaacgaatacacaacagatagataagccgcaacaatcctcgttttttcgattgttgcggcgtcctcaagaacctatcaattctatgagcacgccgccaaatccttaactttaggagatggattcgtgcacacaaaagatttttcctggcaatattctcttaccgccacaatattattgttatctccatttaatttactgccatcgctggcgatggatatgtatctgcccgtaatgcctttcatcgctgatgcacttggtgccggaacaggaacaatccaactgacgttgacgatgtacatgatcctgtttggagtcggtcagcttctctttggcccactgtcagacagattcggtcgccgcccggttttacttagtggtggcgttgtttacacgttagcttctttcggccttgccatcacttcatcaccagaaatttttttgggtttcagaattattcaggcctgtggagcttcagcgtgtctcgtagcgatgttcgccgctgtgcgcgatatttattctggccgcaaagaaatcaacgttatctatggattgctcggctctatgcttgccatggttccggctatagcgcctttgctcggaacactggttgatgtctggctgggttggcgcgcaatttttgttttattgggaattgcgatggcagctacggttattgtgtacgggatattctgcccagaaacccggcaacaaaggacggcagcattaaaatggtcgcagctacttcttcctgtaaaaagcatgaatttctggctgtacacattctgctacagtgcgggtctggggagcttcttcgtcttcttttcaaccgctccatgggtaatgatgaaccggcaaggattatcacaaatgactttcagtttgctgtttgccacggtggctatcgcaatgatggtggcagcgcgaagtgtgggaaattttatcgtccgctgggggctactgaatacattacgaatgggtatgttttgcctgacagcaggagcattgttgttatcagccggagaaactttcattcctaattcagtattgggtttcattatcccgatgtggcttgtcggagttggagtcgctatagcaattgccgtcgcacctaatggtgcactacagggctttgatcatatggccggaacggtaacggcattctattcctgtctgggtggtgtgttgttgggaattggtggaacactcactattacacttttctccaataccactacctggccgattatcgtttattgtctggttctggcaataggagtgttttgtttttcttacattaatagtaggcaatctgagccacgttattagcggattaacctgaaaatatcacggcacgaacggcttctttctgaaagttcgtgccgcattttctggtaataaacttatagtttatgggtaatacccataatataaatacgctctactaaggagtaataaaatatgtcttctgttccatttgtaacagcatttgcagctgaagatcatctaacactcatcggaacagatattgatactcatgctcataagcacacttttctgcaattactgatttccttagatgacaaacccataacggttactatttctgggcaaactttacaaactaaatcgattttaattaatagcgatgtcattcatgatgttacattgaataacaggttttattggctgacattgattaaccacacatctcctttaggattgtgtttaaaacatcagttaatcaatggagaaatcaattatatactattggattacaataaattggcatccgtgtgtaaggcaatatcagctcaatacacttcattgcaggaaaaaacttatctcatatactgggataatctacataaaaagatactgacacagacttgcaatcttaatcacacaataggtgataaccgtttaaaagctatattaggacacctaattttttcacaaaaaacctatcatagtgtcattgatatatcagcaaaaacccctctttccccaagtcgtttatcacatcttttttctgaaaaaacaggaggaaatctaaaaagttatattctttttcaccagcttattcatgctctatttttaattgccgaaggtaaaaaagtaacagatgctgccatgcaatgtggttttgatagtgcttcacacctttcctccacagccagaaagttgatgggtataaaaccaagcttcgcgaaaaaaatcagcggatttttgaaagttttctcctcataaattttttagtcttaagtaatttaaacgaggagaaaataggtaatgaaacagtatctttcatgcacacctttattagatttttatgccacaaatattcagcatttaattaccgagaaaggctggttaaacctgactcagactgaaaaaataaaagcaatttataattttgttaaagatgatattacttttggatttaatgaggatgattcacttacagcatcaaaaatcttacatgcgggttatggtcagtgtaataccaaatctattttatttatggctctccttcgtgcgctaggccttccctgtcgcttacacggctttaccattgataaatcactacaatacggaattatgcagggaaaaatatatgaaatggctccgcaggagatttatcatacatgggttgaagtctatattaatgggcaatggctaaactttgaaggtatcattttagataaaggctatcttacttcgctacagaaaaaatacgcaactcataaaggaaactttgtaggctatggtgtggcgattgatgatttagctaatgctcctgttgaatggcatggagataatagcacgtatattcaacaggccggaattgtacaggatttaggtctgtttgattcaccggatgatttctttagcaagtatgagcagaaaatgacatcacaggaaaaagaaatatttgcgaacaagatacgccatgaacttaactaccacctactgaagtaggtgggttagcgcacttcggtgctgacgactgaaagtcgtcgaaccacgcacctcgtaaacgcgcgtaggtcaaaacattaaagtcaaagtcaccgtctaaagacggtggttttaacctgtcatatggaaaaataaatcggaatattaatcatattcgtgacagctaagcagctctaatcgttatttaccagattcccctaagattgaattgaagcacactatacctcaatattaatagttccccgccagatggcggggaaaatatcgggcttaaaatctgtaacctactccaagattaaatccatttatagggctgttcatatccgccattttgaacgtagtaccttcataacccaggttgatcacgaaatcatcaatgggattaatttcaacaccggcaccatacgcaaacgagccttttttcttggttatatcaccgctatctttatcatgctcaaaattaatcttagcattggtataagccaaacccactaagccatacaaactcacctgaggatgtattcggtaagccgggccaacaaggaatgaggtgtatttaatatcaccttcatgttttttcaaaccttttgtcactgatttattagataaaccacccttgcctgccatataggtcacagagccaataacactgataggatcatcccattcatatcgatacttgagatttacccctttaatatctttgaaattttttactttactttgtgcataaccaatggaagcgttttgtgaatcagcataagcaaaagaacccaccaccaatcctgatgtaagcaaagacaacaaaaaaacttttttcatatccatgcccttttgtaaaaaagaaaatgtaaaaaaattcattttagccagccataaaatatgactgactaaaaataaccctttatattctcttgacagcttcccgaaaaaagcaaaaaaaaaagagcttttatctacttattttggctaagatcacaaaaataaaaatttcatatcccaacagtagataaattacagttattcatcaatgctgtattcctaaccaaataaatcaccagctatctgaggcacccttattatcactcttaccgccaccaccagtgaaaatgtctttattatcagaaagctctgcattttcgacgaatatatcggaactactaacaggagatgcagaacccgagccaccaaagaagcgtttaaataatcctcccaccaatgatgcgccgaaaaagagcacaattaacaccagaataactggcaggaagaaaatcagcagataatatcccagaggaagagcaggaaatacacctaccagactgagtacaaacgtaataacagcgactgttgaggcgcatttgagaaaacgtttaaaccagccacctgtacggaacaccgccaatggcagaactaccataccaagcagccagaggatcaacggagccgaaaagtcttcacctgatgatacgttatctaaaatattgtcgttatcgccagcaatgttcgatacaccctgcggtgctttttcttgccctgcgttttttatcaataccccaatggaatcaatactggttcgtatcccttcgtaatagtcaccctctttgaaggccggttttgcatccttactcagaatatttgctacctttgaatccggcagctgctttatgaggccagaaccaatagtaatccgcatcttgtggtcatcgtatgccaccaaaaacagaatgccatcattacgctgttgactacctaacttccactcagcaaatacgcgggaagaaaaggtttcaacgctatcgcttcctatcgttggtacaatcaaaaccgccatttgtactttatattccgaacgcagtttttccagctggcgagtcagtcgttgatgttcattcttcgtcaagatattgggtatatctgtaacactctgactaagaaccggaacttcaacgagcttcgtttcctgtcgaacttcttttgcggatacactgcttatgctcaaaagcagcataaataggataacaatatgttttattattgagtggctgtatctttggggggatgtcttactggtactaaaaccatccgttggttggctgaaaatcatgaacatcaaatatccttaggttatttttctaatatatcgcagcaatatattatatttatctttccttagacgtctaataccgtaattatttaaatgatttacctaataatgccgaatttaatatggtgcgaagttatgaaatagcgctatttcgcctacattggcttttctgaggaaagccaatgtagcaatcatatacgtaatggatttcaggctgtgcctgcggtgataacctgtttctatcggctctctgcggtaatctttgctgatttccatgcagtaaatagtgccagtatgggcgcaacagcaaaaagtaaaaagagccagtgggaagcagaagccgctccttccagaccacccggctgataaaacccgaagatattggtcaccattccggccagtgcagagccgaatgcagtagcaaacaactgaaccgttgtaatggatgaaccggcaatatttctgtcagcctcactggaaacctgcaaaatacgggtcagtaaatgaggccagccaaagcccacaccaaaaccaaatagtcccaaacctaaaatgattggtaatatgatttgccattcacctatggatttataaggcagcatcgcaagcagcagcagcatccccaccagcataaaagcagggccgcttacaatcgcaaaacgcattttcgccccctgccaactggcactcattacttccccaatagtccagccaattgctgccatcgcgaccatataaccagaggctaaaggagactgctcgtgcagaacttgcaaaaagtagggtacaaaaacatctcccgataacccaatcaccaagaacatcatagtcgcgaataagatgagatgaggtgaattcagactcagcgcattttcaggcagtaacttcacagaagccttacgttcatagagaactaacagaaataccagtactgccgccgtcataatgccgagaatattcattttcacatcttgtgacagactccctgaggaaacagcaagcacagcaacagataatagaatcagctgggtaatgggcaaagccattttgcttgtcttctgtttttgcttcggaggtagaattcgatagctaaataaggcataaagcaaaatcacgggtaacatcatgccaaatgcataacgccatgcattcatttcagcaaaaatgccaccaatagctggcccgattaaagttgccactccccaggtaccggaaatcaacgccatcgctttaggccagagagattcctcaaacaccagattaatcatcgaataagaaagtgcgaataaaaatccgccaccaagtccctgaatggttctcccaactagcatggattccattgttggcgccaaagcacaccataaacttccaattaaaaaaatcagggcagcaaccaaataggcatttctcgcacctgatgtatgcagtaatctcgctgaaagtatagaaccaataatggatgccacaacaaacagcgttgtattccaggcatagagatttaatccaccgatatcctttacggcagaaggcaggagcgtaatcgcaattaaggtattggcggccatcagcccgataccgatcgaaagtactattgcactgggtgcgtttttactggaaaacagatccctccagcgattttccttcgttattatcatgcttattatcctgaactcaggttgagttgtgaaatatcttacgttaaattaaacaaggtaaatcttggaataaattactgtcaggttcaacaatatgtcaagcattgacttggaaaatagcactatttccgtacaatccgttagtgaacggttattgatgctgttaaaaacacaaggcgctatgcaagccgcagatgccggtaagctcttaggcacgacaggggaagcagcccgtcaacaatttgtgaaactggctaaagaagggctggttgaaggatgctctgaaacaaggggagttggccgccctatccagctttggcatttaactgacaaagggaacgccaaatttccggatacacacgcagatttaaccgttcagatgattacgattattcgtgagcaattaggtgaatccgcactggatgtagtgatccaatcccgcgaacaggaaatttctgaaaaatataaaacagcgctaaaaggcgctgccgatctacaagaaaagattgagcgtctggttaaaatccgctgtcaggagggatatatggcgcaatattttattcaggaagatggcactattttatttgtcgaaaaccactgccccatctgtgccgctgccagtatctgccagagtttttgtcgtactgagctgaaaatgttccgggacattcttcaggcacaagtagaacgaactgaatatattctgaatgacgataggcgttgtgcttaccgcattacgccactgagataaacctatacacttcgtctttcaagttgcctctttcattggcggcggcgaagtgtatagccagacagtggttactccttacccgccacagataactgctggtaaatataatgcttatagctttctaccagcgccttatcctgacagtcgttaagctcccccccacacaaatgacgcatggtcatatttgcctgatagaaagcgggaacgctcaaccgtgctctttccaaaatcataccaccgagaaaagagatatcggtcagtttaccggtcgttatcggctctccctgtttcaggttatccctcatggtaaattgcgtcagatgtgccggatcagaaagggtagaagcgtaatcgttaaaatggatatttggctgatgatcaccgaatgtgagaaaaatggtcggtttgtcgcgtttagccacaaactcactaaattctctgatcgatgggtctgatgctatgattttttccatataatgactgaattttccgacagcggatgaattttccaatttgcctgccagcccataatcatcgctatggctctcttcataaggcccgtgttcatacatggtcagagaataaataaagatgggtttatccgtttccttagccagaatagttttcacataagacaacatatcctgtgtgctgattttccacaaattctcatccatacttgccggataacccagctcttgtggctgaataatgcggtcaacacccagtgtctggtaagcatgcccggcatgataagccgatttattgaatggagtcagtacaacggtgtaatagccattatctttcatcgtacggaacaggctgttttgcaaatgatcaaccacaaaataaaacacgccatttttacgcgagccaaaatcatctgtatccagtcccgtcagaacagagaattctgataaccacgttccacccccaaaagtttgcacccgcagcaaaccttgcgcgctcacatcggcatcatgcccgaacataaagagattaggtaatcgggtacctgttggtaattgataaatatgtgggtcgaccgtagattcttgcaataacaccaccacatcaggttttatttctgactgtgcttcaggcagggagacattttttgcttgctgcaaaaaataatcagctgatactccaaattggggaggctgatattgtgcatcccgggctgacatgaccatattagtcatcgttccgcgcccttttggcaactctgcctgccattcattatggtaagcactgactgtcatattgacatcccagaccccgacagcaaccagtaccacgcttaatccacgccacttgatacccggaactggctttgcacttttccagctcaggaatatattgaagattagccagaccagcatagctgcaacagccagacctgccagccaataatgatgtaatgtttcctgatttgaaggatcaagcataatattcaaatcagaaaacatcagttgatctttgtagtaatgaacttttagctggttgaggaatttgatgataatgaaaagagttccggtaaacaccacggaaaataaccagcgcgctgaaagcagaaatgtcaggccaaaaagaatgctgaataccccaacagaaatcagtgcaggatagatatcactgcttttttcaaacaataacagcaaggatgcaaccaacaatagtccaaaatagcatcctgaaattatttttttattcatactctgagttccatgtatgagtgtataagaccggtttaacatcagtagatgaaagtagcacaagtttttcaacatactacaaataaaatgaagccactcactccagagtgaatttatcgttcagatgataagactgagttttggtgagaatttacatctgccattttatctttagtaaattgatcaataagttaataataatcagctaccagcttatccattcactgaataaatacgcgattaagacaacaataacaggtatcatcagcatgaaatcccgctaattctgagtttacaatctagattattcatgttcataaaaaaacagaagggtggatttgacagtaatcatgatcactcttttagttcacccctcaatagttaaagagcttagtgatgaaaataacacctgaaacattatcctctgcaatagaagaatacgccaaaaagcctgagcagaaacagcagctaacccctcagcaaacacgttggttttccgagccagagaatgtctttatgttgatcactctggtgataacactccctgaagaaatgatggatgatatcagaagtgccgttaaagactggcttgatgttgccatcgcagaactagagttagtcgcgattcattccccgaagggaaccaaagaacaatttgagcaggctgttggattagttttggaatattgcaaagaaaacttcgagcttaatcacaagaatgtcctgttatgtatctcaatcctgaagcgatatcagtttcatatcaggacggatcttgcacagctgatggaaaagtctgagtatcctgatgaggctaatgttacccctttcccgcaaaaaccgcagaaaatcaggcaactgattaatgagtttaacctgaaatccagtatcgaattcattgaggtttttgaaagtggtttttctgtcgcaccacctgaagtactgccttatattctgacggaagtcgttcaatatccatggggtattgatgctttgcttctgctgacgcaatattttgaagaatctattgcgcttgccagtgctgaaatgctggatcaatacccttcttcggcctggaaaaatttatcctatttgcagcttgtgaacctgtgtgcccatttcaaccgacatccttcagtgaagtcttatatgaagcgatggaaaaaacgcgctatggcacaccataaagcacgggcagccgctgaaatatatgaaatatacgcttctgaggtggatggcaatgactgtgccagtatgatgatgaaagtcatgctgaataatcaggaatatcagctaagtatgatgctcgattttaaatcaggcatcagagagagcatgctgaatatcgatcctgaccaacccattcctgagttgttagaacagttaagcagcgatatcaacttcactccggtttctccggactggctaaaacagatattgccctggatcctttccgttcagcaaaataagaacacaccactcgacctctattcgctgtattggatagcccaacttcccatcgactggacgcagccagaagcgtttgatcttgagcaatggagccagaaactgagttatgaggtcaatcctaagcgacaggaaaatagccgtcttggttacgccaattacggtcacaatgtgcaatcatcgctcatgatgacttggctgccacctgaagagtatctactgaaagcgaaaaaacccagagatttactgaaactctactattatgccaacaaagacatctttgccggacgactgacctactcggctgctatcgagaaatataagctctcatcagaagagcgctgcctgaccaatgaatatctggatttggctcacgcgctttacgaccctgccatcaatcgtaaaaggtttggcttattcgacaacctgtcagaagccagtttccagctctttgctatggggctaactgatacctcagactcaatactccctcaggggctggttgttaaaatcagcttagatgaagcaagcccagcagtctggcgccgggttcatctcagtaaccagatgacgctgagtgaagtgcatgatgtgatacaggctgctatgggatgggaagatgcacacctgttctgttttgaggtcggcggaataatgatcccggaagaaaattatgatcaggtctgtctcggcctatttttacgtgatgtcgggagtgagcttcactaccaatatgactttggtgactgctgggatcatcagatcacagtagaaaaagttctggaaaaagacatcattcaacctaaagtcaccgcaggaaacgggacatgcccgattgaagactccggcggtatctggcagtggaacaatgtactcaagttgagaaaaaagaaactgctgacggaagaagaagcagaatacctagaattactgggactggatccgcatcagccactagagccttttgataaacaagaggccaaccataaacttggagccttattcagttacctggattatcagggctaaatttgtacccctgagaagcaaacttttacttctcaggggtattattccgttaagcagaatattttatcagtcgatcagccagagcctgtgcaaatcgcatcgccccactctcagcaaagggcaggttcagcgaaggctcacatatttctatttccagtacaatcggcttaccaccattatcccgcacaagatccacacgtccgtaaagcaaagcatgatcaagccccatatgccgaacagcggtatcaagggcaagtgaagcaactgcacgttcatcttcatctgccactcgcgccttgcgaaattcctgtaatgggaaattcactgtgccatcggacataagcaaagcacctttacggatagcatggctataaataccgtcgaagtaggtcaggtcagtctcgccctcactatcgattgaagccagatagggctgcaatattacgtgacaacctttttctatcagataagtgatgtgctcgacagccttatcctcctgctgtcgtttatagcgctgaatatccttcgaataagctcctacagtaggctttatcacaatttcgtcagcttccgtatgctcagcaagaaatgcccgcaggttctgtaagatattcataccggggctaataaacctgctaggtacaaccggcacaccgtgcgccgcgagatcagccagataaaacttatcaagattccagcgcactactggcaagggattcagcagttctgttaaaacactaatacgttcacaccagaccagaaattcaggtaaatgatcgacgtagctccacggagaacgcaaaagcaccgcatcaaaacgtgaccaatcaatagtctggtcctgccatgaacatatctcagtgctcagcccgatagtgcgacaggcatcgagtaacaacggcatatcataatcttctggcaagctggcttcatcagtaatcaatgcaactgtattcattaagcaatttccatcagatcaaatgtcctcaacaatgattacagagatgccagccactcatcatctgacccttcattcatcccttcgaacaaaaacgtggaaagataacgttcccccgtatcaggcagcattgcgagtaataccgaattttctggtgcactttcagcaacacgaagtgctgttgccaaagtcgcccctgcggaaatacccacaaatatgccttcttccctagcgaggcgacgggctgtatcacgcgccgatatttcatccacggtcagtagcttatcaataacgcttttatcgagtatgtcagggataaaatccggtgccagaccctgaatttgatgtaaattccaagaattacccgccagtacagcggcattttcaggttcagtagcaataatatttacgtcaggccgcgccagttttaacatctgaccgactccggtcagagtaccgctggtaccaaaacccgtgacaaaataatccagccgttttccggcaaaatcactgagaatttctgctgctgttgtttcacggtgataagccggattggcagggttttggaattgattagcacgaaaccagccatgttttgccgcaagcttatcggccagacggtttccaccactacttccttcatgaccgggggagagaataacttttccgccatacatacgtattaatttacggcgttctaccgaataactatccgacatcaccgccacgaatttgtagccacgggcagcagccaccattgctaaggcaatgccgacattaccggaagtacattcacaaattgtatcgccgggtttcagtagcccttttgcttctgcatcaaggataacggaaagagcaagcctgtcctttaccgaaccgccaggattgaaagactccaccttcacatataccgtggcatggctgggagccatacgatttaatttaacgataggcgtacggccaattgtctcaagaatactgttgtagagaggcataagaaaattgttctcctgctatttcacttttgctgctgtttcaaatacaggagcaacaatatcgagaataattgaaagtgctttttcgttcttttcttcatcagttgaagcattaaactcagacagttcgactcccaaaagctgttccaaaggcattgcttcaaatattgcctgaatttgcgatggcaacataccatccggcactgaataatccgccggtaaaaagccgggctcaagaacatcccagtcgatatggatccagaccggcgcgccattaat

SEQ ID NO: 345 - DNA, 39957 bp, Xenorhabdus sp.
  CDS (7529)..(8713)
tttctgttattgtccttttttgccctgcgtgaatttatcactctcaccccgactcgtcgtagtgaccatgaggctctgttctggtgtttctttggttttctgccggttcagtatgtgttagttggaatgcagtggtacgggctgttttcggtgtttatccccgtttatgtttttctgtttttaccggcccgtattgctttggtcggtgatacaactcactttctggaacgtaccgcaaaaatacagtggggaatgctggtaacggtgtttgccattagccatgcaccggctttgttgatgttagatatagcggaatatcaggggcagaatattaagctattgctgtttttgatgattgtggcgcaaatgtctgacgttttgcagtatgtgtttggtaaattattcggcaagcgaccgattgtaccgaaattaagcccgaataaaacggttgaagggtttatcggcggtatcttagcttcggtattgctgggaatctcgctgtattggataacgccattttctccgtgggtagcaggagggatgtcactggctattaccttgatggggttcatcggtgggctgtgtatgtcagcgatcaaacgtgacagcggcgtaaaagattttggtgagattattgaaggtcacggcggtatgttggacagaatcgattctctttgcttttctgcccctatatttttccatttaacgcgctatttttatacttgatacagaccatcctgaataactctgagggctgtgaatatgggtatgaattatggccgatgggtcagtactgctgcactggtggcgacaatactggccagtgtattgttagtcgtgaaaattttggcctggtggtttaccggctcggtgagtttattggcggcactggtagattctctggtcgacttggctgcttctctgactaatttttttgtcgtgcgttattccctccagcccgcggatgaagaacatacttttgggcatggtaaggccgagtcactggctgctcttgcccaaagtatgtttgtttccggctcagcgatttttctgtttttgaccggctttcagcatttattttctccccagcctttagagcatgccgctgtgggtgtttgggtaatcatcattgccattgtttcaacaagctgtctggttatttttcagaaatgggtgattaataaaactcaaagtcaggccattcgtgccgatatgttgcattacaaatctgatttattaatgaatggcgcgattttggtggcattggttttgagtgtctacgggttccgacgtgcagacgctttattcgcgttgggaattggtgtgtatattctctatagcgcgttaagaatgggatacgatgcgatccagtctttactggatcgtgccttgccagatgaggaacggcaggagattatagagattatcagaaattaccccggtgtttccggtgggcatgatctgcgcacccgtcaatcgggtccgacgaggtttattcagtttcatcttgaaatagatgataatttaccgttggtacaggctcatgctttagccgaaggaattgaaaataaattgcgtgataggtttcccggtgccgatattattatccatcaggatccctgctcagttgttcccgatgaacgtaaaaacaattgggattgataaaagaatttattcataatcaaaataatgtcaaaaagtagacaaaagattgatgcagactgaatgtttttccgtatcatgggtgcggttgaatcaattcagctaatgaattggcaaccaaaagttgagtgaaataatcgtcgtgaaccttcccttttggaagggcagtcagcagattaggcaaatattacatctataagtcagaggtcatcatgatcaacaagattaaaagaatcggagtcttaacaagcggtggagatgcaccgggtatgaacgccgctattcgtggagttgttcgtgccgctttaaccgaagggttagaggtttatggtatttatgatggctatctggggctgtatgaaaacaggatgaaaaagctcgaccgctacagtgtttccgacatgattaaccgtggcggcacgtttttaggttccgcacgttttcctgagttcagggatgataaagtgcgtgaaattgctatcgaaaacatgcgtaagaatgaaattgatgcgctggtggtaattggtggtgatggttcttatctgggagcgaaaaaactgactgaggcgggtttcccctgcattggcctgcccggtacgattgataatgatgttgcgggaacagattacacaatcggttattttacagcgctggatacggttgttgaagctattgaccgtctgcgcgatacctcaacctcccacaagcgtatttctattgttgaagtgatgggacgttactgcggtgatttgacgttgtctgcggcaattgcaggtggatgtgagtttatcgtgctgcctgaacgtgaaattccgtttgatcgcgaagaattgttagctgaaattcaagcgggcatccagaaaggcaagcgtcatgccattgttgcgattactgagcatgtctgtgatgttgatgagctggcaaaatatattgaagcggaaacacgccacgaaacgcgggcaacggtattaggtcatattcagcgtggtggtgcgccagtggcttatgaccgtattctggcatcacgcatgggggcgtattctgttcagctgttgctggaagggtgcggcggccgttgtgttggtatccagaacgaaaaacttgtccaccatgacattattgatgcggtgcagaatatgcagcgtatcttcaagaaagattggttagaaacagcgaagaaactttactaacttccataagagcatttttcagatacagccatatgatatttatatggctgtttttctttttatctctctcctttttatacgccatattcccataatgaataagtggaaatttaaaattatttctgcggcataacgctttctgtcaattttacgatgaaaatcatatccaatattgaggagagcatttccgatgattacgcctatgaaatggaagaggataaaatggagaataagccggtattcccccttaatggtgctattgctggttattctgatcggaggaaatgcctgggcgaaagatttacagctcctgaatgtttcttatgatccgacacgtgagttatatcagcaatataatcaggcattcagccaatactggcagcagaaaaccggagatcgggtcacaatccggcaatcacacggtggttctggcaaacaggcaacttcagttatcaatggtcttcaggccgatgtggtgacactggctctggcctatgatgtggatgcgattgcagagcgtggccggattgccaaaaattggcttcaccgcttacccgataattcagcgccttacacatcaaccattgtgtttctggtaagaaagggaaaccctaaacatatcaaagactggtcagatttgatccggcctgatgtttcgattgtgaccccaaatcctaaaacatccggaggtgcacgctggaattatctggctgcctggggatatgcgctggctcataacaatcaggaccagtcgaaggcaaaagccttcgtgaaggcgctgtataaaaatgttgaagtcttagactcaggtgctcgtggcgcaacgaatacatttgttgagcgtgggattggggatgtgttgattgcatgggaaaatgaagcattactggcaattcatactttggataacggagagcaggggaaagggcaatttgaaattgtcactccgggtatgtctattctggcagagccaactgtagcggtagtcgataaagttgtcgataagcgaggcacgcgtgagctggcaacagaatacctgaaatatctgtattcaccggtcggacaggaaattgctgcaaaaaactattatcgtcctcgtgataaaacgattatcgaaaagtaccgtgctgtttttcctgagctgaagttattcacagttgatggcgtatttggtggctgggaaaaagcgcagaaagaacactttgccacaggtggggtatttgatgagattattcgccgttaactgacaggtaagaaaaggataatcgccacggcattctgcggtggcgattatctttgtaagctcttaggcttttttcgcttcagctgctgcttttacgataacggcaaatgcatcagctttcagtgatgctccgccaaccagagcaccatcgatgtctggctgagtaaacaattctgctgcgttgctggcgttaacagagccaccgtattgaataatgacttgctcagcgatagccgcatcctgtttagcaatgtgatcacgaatgaatttgtgaacagcctgtgcttgtgcaggagtagcggattttccggtgccgatggcccagacaggttcgtaagcaataacggtgtttttaaacgcttctgcgcccagtgtgttcagaacggcatcaatctggcgcgcgcagacggcttctgtctggcctgcttcgttttcttgttcagtttcgccgatacacagaaccggaataagcccctgttctttcaggatagcgaattttttcgcaatgaactcgtcgctttctttgtggtaagtacggcgttcggagtgaccgataatgatatattttgcgcctacatctttcagcatttctgcggatgtttcgcctgtatatgcgccggaaaggttaatgcctacatcttgtgcgcccagagcgatacggctaccagccagggcattatttgccagagtgacataaacagttggtggtgcaatagcgacgccacagccgtcaacgttgctcagttctttacgcaggcctgcaatcaggtcgttaaccgtgtgggtactgccattgagtttccagttacccataactaatggatgtcgcatgtttttccctccaaccagaaaaataatcaaattgcgaactaaatgaatgtgctttcgtgagtagcgatacgccattctctatacccgtcgtctttcaagttgcctctttgttggctgcgctcgctcactccggtcacatagttatctatgctcccgggaatttgctcccttgccgcctcgatgcaactcgaaatccatagggtatataaatgcaaggccgacagtataaagatcatcggctcgaatagctctgcgctatgtcactaattttcatttgctggtacgtcagatagtgatagcttaatcggttcaatagcgaaggtcattatattttcgctgctgtttacgatgatatagcgtatcgccccgatttttaggctgtaaaaaggttgtgtttccgccatcttaaaaagtttctctgtttgtgtctgagcctgctccagagaaagtgtgggttcaaactggcgggttatggcggcgatatactttttcgtcaggagcaggttttgttctttttcctgtgtgagttgggatggcagcaatgtaatttgcagacttttaattttttcactgcctctttccagtacggcggaagagtagattttttcgttgatcttgctggcagcacggataaaaggcagagagatatcggtgctcgtaataactttatattcgtgcagcagaatatcaggatgacttttattgtatttttcccggaaggtcgggatattgtcttcaaaagtcggggaatcaggcaggagatacattaactgtgggcgcagatctggtgtgacagaaggctcacctgcagtgcctgagaatggtaaaccgataccaaaagcgattaatattgtcagcagaagtttatttatgcctgttttcatgttgttactcgccgaatgtaagtcgcggaaaaagtgtcaatggcagaaaaacagtatccacaattgggaaagaatacatgacattacaacaatggggattttcattcaaaggtcgcatcgggcgacgggagttctggatcggaattggtatctgttttgctctgatttttattctcctcacgctgcatggaatgaatgttctccccatgaattttgcggcagtatgcacggcactgatattgtatccgacagcggcgattttttcgaagcgcctgcatgatcgcaataaacgcggaggatgggcgttattgctgatattggcctggtttttgctctctctcgactggaatatgttagcgcccatatggcagtggggaattggccgttttatcccgacactgatttttgtcatgatcatactggactgcggagtattccggggtacggaaggtgcaaaccgttttggtgaatcggcagaaatggttgagtacatctctgccaaaaagaacgctgaataacaatatttaacttgatgagttatttatataaatcaccagtattgttcactggtcacgcatcccggcctacggcgcaggtgctttgtcatgccacgttgttctttaagcaactgttgggtatccctgaccatctgggggtttccgcataacatcacgtggctgttttctgcctgcattgataagccgatagcggattccagttcaccattttcaatcagtgccggaattctccccattagcgaattctggcattgttcccggctaacgatggtctggatccgcaatttcccctgaaacgttttttccagttgccgcatgagaggcaaataacttaaatcctgctccagcctgaccgcatgaactaagataatattttcaaaccgctccaaatcacttccctgctggagaatggaaagataaggccctatacctgttccggttgagagcatccagaggttttggcaatcagggatttcatcaagaacaaaaaaaccggctgcctgttctgtcaccagaacttcatcaccgacctgcaaagtggcaagctgagggctgagttttccattcggtacagtgactaaataaaactcaagactattgtcattgggagcgttgatataagaataggcccgctggatacgttcctcttcaatttcgagagcaagttttgcaaattggccagcagtaaatttttctattggtgcatgtagcttgatactgaatagtgaatctgtccaattggtgacgtcagtgacttttcctgtaacccagtttgccattgcatttagcctctctgcactattacgaaagaaaattatacgaaataaaattttacagaatgaaattgtacgaagtgagtgacttatcaactggtgattctacgcgattgagggaaataggcttatcgattacgtgttgcagtctaattaactgtattttcgttgtattttaagatggatatgtacacttttattgacattatagggtaatatgactgcaattttttcctcatgtaaaattgtatactgccgataaaaaatatacattgctcgggaaaatttaatccagtgaagtctgtagtcaggtttgttcattaataacctgagggcttctttgttgccgttatacccatctgattgatagggaatgtaccttaatcaggcggtatattttgcttaaataaaattgtatgtaaatgcgatgagaaaaatagcacatttcaatttattgctgatgttaattgcgttagccgctgttgggcagatgactcagacaatttatgttccggtgattgctgatatagcgaatagcttcggcaagccggctggggaagttcaacgggttatggcggcctatttgtttgcttatgggttttcacagctcttttatgggccactgtcggataaagtcggtcgtcgccccgtgattttggcaggaatgtcagtttttctggttgctacgatatgtgcactgttttcttccagtttattggcattggtgatagtcagtgtatttcaggggctgggaacgggagttgcaggcgtaatgatacgtactgtgccaagagatttatacactggagcatcactgcgttgtgccaatagtctgttgaatatggcgatactggtcagcccgttattagcaccgatgattggtggtgtcgtgggccattattttggctggcgtgcctgttattggtttttattgttgctgggttcaggcgtgatcctgtttttattccggcatttcccggaaacccgtccggagcagacaacgcagagcacaatgctggtttctttccatcagctgctatccaatggcatttttgtttcttatctgattatgctgattggcggtctggcgggagtggctgtgtttgaagctagctgtggagttttgctcggcgctgttttagggctggatagtttaacagtcagtattttgtttattctgcctattcctgctgcatttctgggggcatggtatgcagggcgtgaaaacaaaacgttttatcagctggtgtggaatgcggttatttgctgtctgttggcggggacgctgatgtggctgcccggctggttcagcattatgaatgtctggacgttgttgcttccggctgcgctgttcttttttggggcgggtatgttatttccgctggcgacgacgggtgctatggaacccttcccttatctggctggagcggcaggtgcgctggtgggtgggttacagaatgtaggttctggcgtggctacatggttatcggcgatgctgccacaaaatagccaattcagcgtgggtatgctgatgttctgtatggcgttacttattttattgtgttggctgccaatctctcagaggatccagcaacaggaacgtactgtctgagatattcattgaattatcggatactaaaaagctctgacgctaatttgtcagagctttcgcatatatgcgctttttaagcgcggtcttcccattcctgagcacgggcaacagcttttttccagccattgtatttgtggttacgctctgtggtttctatgccagggcggaattctttttcgatggtcgctttacttttcacttcatcaagatccttccagaagccgacagccagaccagcaaggaatgccgcacctaatgcagtactttcacggacttcagggcgctctacacgagtgccgaggatgtcagactggaactgcatcaggaaattattcgcgaccgctccaccgtctacgcgcagcgcctgtaaacgtgcgccggaatcagcctgcattgcatccagtacgtcacgggtctggtaagcgattgattcaagcgttgctcggataatgtggttgctgtttgctccgcgggtcagcccaaaaatggcaccacgggcgtacgggtcccaataaggcgcaccaagcccggtaaaggccggaacaacataaacgccattgctgtcttgtacttttgtggcgaagtattcggagtctgctgcatcagcgatgagtttcagttcatcacgcagccactggattgaggctcctcccacaaacacggcaccttccagagcataattcacttctccccgtgggccacaggctatcgtggtcagcaaaccgtggctggagcgtactgcatcggtgccggtattcatcagcaggaagcagccagtgccataagtattttttgccatgcccggatggacacatagctggccgtacagtgcggcttgctgatcgcctgcgatacctgcaataggaatacgagtaccgcctttaccaccgatattagtctgaccataaattgcagaggaggccgcaacttttggcagcatcacgcgaggaatatccagttcatcaaggatcttctgatcccagtcgaggtcatggatgttaaacagcatagtgcgggaagcgttggtatagtcggtaatatgtacgcgaccttgtgtcattttccagaccagccaggtatcaacggtaccaaacagcagttcaccattttcagcacgttggcggacaccctcaacgttatccagaatccattttatttttgttccggaaaaataagggtcgataaccagaccagtgttatgacggatatactcttccagaccttcttttttcttcaggcgggtacagatatctgcggttcggcgacattgccatacaatggcattgtaaacgggtttacctgtctctttttcccagacaatcgttgtttcccgttgattcgtgatcccgatactggcaatttggtctgagcgaatatcggcttttgccaatacctcaaccagcgttgagctttggctggcccagatttccatcggatcatgttccacccagcctggtttagggtatatttgcggaaattcacgttgtgaaatactgacaatattggcatcgtgatcaagaatcaccgcccttgagctggttgttccctgatccagcgcaacgatatattttttatcagtgatattttctgttgtcataactataacctggtcttatttaataattttttattttttaatctgttatcatctctaaatataggcaaaactaattttcacgtggtaaatggcgggaaattaatttgcggtaaccaaatgcacccagaatggcgccaataataggggctaccaatggaacaaggaaataagggatgtcccgacctccggtcagagcaatatttccccatccggcaaaataagcaactaatttaggtccaaaatcacgagcaggattcagtgcaaatccggtcagaggaccaaaagaaccgccgataacggcaatcagaataccgataatcaatggtgccaaagggccacgtggaataccgttgccgtcgtctgtcagagccagtatcaggcaaagcaaaacagccgcgatgataacttcaacaataaatgcatggaatacggatatttgtgttgcagggtaagtggaaaagacgccagccgtgaaaagactttcttgcgacccacgagcaatgttgtgaacttgctcataatcaaggaaaaggttgtaatacatcatatagacaagagctgcggcgacaaaaccgcctagcatttgggcaatgatgtaagggagtactttttttctgtcaaaactggcaaataggcatagagcaatagttactgcgggattaaggtgagcaccagaaatgccggcagtaaggtaaacagccagggcaacaccaaagccccagataatgctgatttcccatagtccaagttgtgcacctgcaagacgtgcagcagcaacacagcctaagccgaagaaaacaagcaatgctgtacccagaaactctgaaatacattgacctgataatgttggagtggtggtctggcccatttctatatcctataaaaagtacagagaggagattaattattagtcctttcttgctgcgttctgattacgcagagaaaggtggtgtgaatttatcgttaatgagcggaaacgagaaatagcgaaattgaaatctgcgtgttgcgtcaacaaaatgagcgaattcgcatttaattggggttttattcatcgttaaaatgtgatcttatcttcatttaggattagtcactatatttctcgtcatacccggtaaatttcgggttacctcatgtcataaataaggaggtcgctcgcaagatgaagggtatatgccacacattagaagtatgaaactagacagtcgttaacaggctaaatacaatcaaggcattgcttataagaggggctcgagaatgtcatttgaagtttttgaaaagctggaatctaaagttcagcaggcaattgataccattactttgctgcaaatggaaattgaagaattaaaagaacagaacgcagtgttatctcaggatgtccagaatgcgacagacagccgtgattcactggtacgtgaaaatgagcagctcaaacaagaacaatcagcatggcaagaacgcttacgtaccttgttgggtaaaatggaagacgtgcaataaagtatccgctggctttaccgaaagatagttttgcagaaattattttgcaaaaaaagggcgataattactgcgcccttttttatcaatggtaaggagtgatggctgggttataagttatgacacttcatcattatcttcatccccatctatttccagcggaacttctgacaaaatcattccagtgttgtctgcataaagataatcaccggaaaagaaagtcactccgccaaaattcactctgatatcgctgtccccgatgccttcactgctggagccagcaggaattgctgccatcgcctgaataccaatatcaaattcagcaaggtaatctacctgacgcacagcgccataaatgacgataccttcccattcgttattgacagcaagctgggccagctcggcatcgagcagggccttgcgtaccgatccgccaccatcaaccagtaaaatgcgcccgcgtcctggctcttccagcaagtcatagagcagcccgttgtcttcaaaacatttcaccgtgatgatttgaccaccaaatgaagtacgcccaccaaagttagaaaataatggttctaccacattcacatcttcttgataggtatcacaaagttcggaagtatcatatttcatgggatttacgtctggtttatgcaaggaacggacagtatatccttttaagactagcgttggcaaaatcatcaatcttaaaacgtgaggataaaattgatatgtactcgcttaattaagtatcagcccaatcgaaaacaggatattggtcaggagtgccactttgaccatctgtactaattgaggacgcataccttcggctgttggatcgcgcagtacctgtagtacatgcttcagtagcatggggaaggccagcagaaataaccagctatacccgctgttgttcaggtacagaagtgtaaaggcgataaagcaggacatagcccctgtgagcagggctgcatgataatagcgtgcttttttgccaccgagcctgactgccagtgtattttttccattctggctgtctgtttcgatatcccgcaggttattaatattcagcacagctacagagagtaaaccacaggccgttgctggcagaacggtacttaaggaaaaagtctgggcctgtaaataatacgtgccaagaacactgagccagccaaagaatatcaggacagaaaggtcacccagccccatatagccataaggtttggcgccaacggtataagtaatggctgcaataattgccagtaaacctaatcccagaaaaccgataatatcgccaaggttatgacaggctgcggcgataagagcaatgcctgacaaacaggagagcagcacggtaatttttaacgcggttttcatttgttgggctgtaatcagacccttctgcataccccgcattgggccgatacgcttttcggtatcactgcctttggcgacgtcaccataatcattagcaaggttagacagaatttgcagcagggaggctgtcaggaaggctaataatgccacaggccagctaaaatgaccggtccaggaagcaagggctgaacctgtcataattgccgctattgccaacgggagggttttaggacgcaaactttccagccatgcctgcatttgactgcttgtcgttgttgagttcatattgtcatcaaatatgtcatatgtgataaattttgatttaagcagaatagagaaatgggaggcaagcctcccattccatttttactgttactaagcaggatccagatcaattacaggatgaatcgactcagatcttcatcagcgaccagttcgtctaagtgtgatttgacgtagtcagcgttgatttcaactgactgaccctgagattcactggcgtcgaaagagatatcttccatcatgcgctcaagaacagtatgcaggcggcgggcaccaatattttcggttgtttcattaacctgccatgctgcttctgcgattttgcgaataccatcagtggtaaattcaatgtgcatgccttctgttgccattaatgccttgtactgttctgtcagtgaagcatttggttcagtcaggatgcgttcaaaatcttcagtagtcaatgcttccagttctacgcggataggcagacgaccctgtagttccgggatcaaatcggaagggctggaaacctgaaatgcgccggaagcaatgaacagaatatggtcagtttttaccatgccatgtttggtggaaacggtacagccttcaaccagtggcagcaggtcacgctggacaccttcacgggaaacatccgggccggaggtttgaccgcgtttacaaattttatcgatttcatcaataaagacgataccgtgctgttcaacagcatcaattgcctgctgtttcagctcttcagggttcaccagcttcgcagcttcttcttccaccagcagcttgaatgcgtctttgatcttcatcttacggcttttttgacgctgaccagacagattctggaacatagactgcaactggttggtcatttcttccatgccaggaggagccatgatctcaacaccaaccggggcagctgccacttcgatttcgatctctttctcatccagctgaccttcacgcagtttcttgcggaatgcctgacgggtagaggattgttctggttgctcttcagcttgcccccagttgtttttcgctggtggtaacagaacatccagaatacgttcttctgccagttcttcagcgcgatagcggtttttctcaatggattgcaagcgtaccatttttactgccgcatcagtcagatcgcggatgatggaatcaacttccttaccgacataacccacttcagtgaattttgttgcttccactttgataaaaggtgcattggccagtttagccagacgacgggcgatttcggttttacctacaccagttgggccaatcatcagaatatttttcggagtcacttcataacgcagtgattcatccaactgcatacgacgccagcggttacgcagagcgatggcaacagcacgctttgctttatcctgaccgatgatgtggttgtcaagttcgctgacaatttcgcgaggagtcatttcagacatgctatctatccttacgcttttgaaggcagttcttcgaagttatgattttggttggtgtagatacagatatcgccagcgatagtcagggcgcgttctgcgatttcccgggcactgagttcagtggtttccagcattgcgcgcgcagctgcctgtgcatatgaaccaccggagccaatagcgatgagatcattttctggctgaatcacgtcaccattacctgtaataatcagagatgcattttcatctgcaacagcaagcagggcttccagcttacggagcattctgtctgtccgccaatcttttgcaagttcaacagcagctttggtcaggtggccctgatgcatttccagtttgcgttcaaacagttcgaacagggtgaaggcatcagcggtaccgccggcaaaacccgcgataaccttgtcattataaaggcggcgtaccttacggacattgcctttcataacggtatggcccattgttgcttgtccatcaccaccgatgacgacctggccattacggcgaacacttacgattgtagtcacgagttagcccctggttacaaaatagaagatggtacacacgatacttttgcttaccaagaccttggctgtaagccacattgtttatcaaaaacagcgtgtgcacgttattagacatcaagatgggggaactttttggtttttcaacccccggcagggcggagaatacagctgggaatacctgtattagtcacacgtctgtgcattttttctgcactttctctgtttttatacggccctaataccacccgattccaactgtccttggttgtgatcttactctcaatacctgccagcgcaaggttggcacggacagattccgcctgttccatcgtacggaacgaaccgcattgtaacattattcgggaaccattcgtctctgtcttgggcttagtggtttcattggatgcttgcgactgaggtacctgagcctgaggcgactgtagtggcactgacggcttattttgctgtggcgcgtattctgaaggcggctgttgtgacggtggattgataatcacacgtgagcgaggtactggctcgctgttataggggacttcagtcaattggacaggcgtctggcgcatgtcggcctgcatctgttcaagtaactggcgctgctctggggtcagttccgctggccggttgtttggctggcctgttgttagcgatggatcctgaattgatggcagacctacaggccggttttccagctccttaatatagctccagcgttcctctggttttggtggcagactatggcctttaggctggtgagcaactgtcggtatatttttttcactttcgtgtttagtgtgtacgatgaaataaagcccgccaataaatgtgacgaccagagctacagcaatgactaatagtgttttaggcagccctttagcctgattttttttcttaccagaacctttcttgcggggattagaatgcccgcgacccacataatctcgttgtgccactgtatttaattcgctgagttataaaaaaattaaggaatagatacctaatgttactgaacatgcctttctttgcctagcttttaggcgagcaagtacttcctcgaataagaagttctgcatccagtaatcgtgaacctttcgaaaccatacggccctgaagctgttccagcaacaaaagcattgagttatgcccaatttcataacatggctgtgccacggttgtcagagggggatcgctatattgcgctgtgctgatattatcaaaaccaataatggaaagatcttctggtaattttaaccccatttttttagcttgccacattgccccgatggccatgacatcactatggcagaaaatagcactgggtggatttgctagaatgagcagcttttccgctaattcagcgccactctcatgggtgaaatcgcctctgataatgtattcatcccggataggcagcccggcgcggcgtaatgcctgaatgtaaccctgaagccggtattggcacaggggcattgattctgggccggtgatacaggcgatgcgcttatggcccagtgtttgcaggtggtgtgtggcattgaaagcagaggtcaggttatcaatgtggacggttggaagttccagctcaggtgcaaattcgttggccatcaccataggaggcatatttttctgttcttctttggaaacatcgaatggaatgtttgaaccgagcagtatcatgccatcaatacgtttggtgataagcaggttaataaaggcatgttcctgctgttgctggtgtttacagtcaccaatcagaaccagataaccatgttgtgctgcggcctcttcaatgccacgaataatttcattgaagaaagggtcgcagatattaggaacaatgaccagaattgctctggattcattccgccttaaatttttcgcgagattatggggatagtaacccacttccaatactgcattttctactttttggcgggtgtgcgcagaaactttatcaggattcattagcgttcttgatacagttgcggtagaaacacccgctactttggctacatctttcattgtcgccaatgcacaattctttttttccatagccactcctcgctttctacaggcagtgaaacgattgctatccgcaaagttaaaaaagttaatgtcaaaaaacgaaagtaaaaaaacgccagccatttctgtggggaaacgctggcggattcgttttctacagtcatattaataaatccattttaaacagattaacagttcaagccgttactttgtttgcataaaaaatgtgatacgcatcatttcttagagctgcttcgcaaattaaggaaataagtttcactgtttttcatggggttctgcttagttttgaatttttattagccttcagtcggatcgacatcaatattccattttactttacgtgccagaggcagtgctgtaatgcccggatagacctcagtcatcattttctggagataaatacgcgaaggatgctgcaccagtaattgccagcgataacgaccactgcgttttgcctgtaaggcgggaacagggcccataatccagagctggtcattatacagggggtgttgttcaagtagttggcgcatttgctgtaaaaaagcaggagactgctgattatcgtgatcttctgatcgtagcatgatatggctgacaaaagggggcagaagaacctgctggcgttcttctattgcttgtcgggcaaatgcgtctagcctttttccagcaatacctgcaaaagcggatggtcaggatggtgagtctgaaggacgacttctccctgtttgccagcgcgtccagcccggccggaaacctgagtatatagttgagcaaagcgctcagcggcacgaaagtcggcagaaaacagggcaccatccacatccagtaaagcgacgagtgtgacatcagggaaatggtggccttttgccagcatttgggttccgattagaatacgggctcctccctgatgaacgtcagccagttgttgctctaaagcccctttgcggctggtggtatctctatcgatacgggtaaccggaatatcgggaaatagttggctgataccatcctcaagttgctctgttcccagccctaccgggatgagatttgttgtcccacattgtgggcattggcgcggaatggggcgttggctgtcacagtgatgacagcgcagatgacgatgattctgatgaagggtgtaatagtgatcacaacgctgacattctgctatccagccacattcatggcagagcagggcaggcgaataaccacgccggttcaggaacagaataacctgattatcagcttttagatgttctctaatgcggttaatcagtggctgagatagaccgacagtcagcggtaatcctttcatatcaagcaggtgttgagtagctggtttggcgtgacctgcccgttttgtcaaagtgagttgccgatatttaccctgctgtacattgtgcagtgtttccagtgcaggtgtggcagttcccagaataatgggaatgctctcttttttggcccggaataccgccagatcacgggcgtgataacgccagccttcctgttgtttataggagctgtcatgttcttcatcaataatgatgacacctaagtgggcaaaaggtgtaaacagtgcggagcgggtgccgataacaatcgcattttctccccgtctggctcttaaccatacggataacctttcactgtcatttaaagccgaatgcagaacatcgacaggtgcattgaaacgttctctgaatcggcggatagtctggggtgttaaaccaatttcaggaaccagaatcagcgcctgttttccctgctccagaatattttccagtacactcagataaacctcggttttacctgaacccgtgataccagcaagtaaccagggagcgaaagttttatcttctgcgcgaatcgcgccaactgcggtggcctgttcggtgttgagtttcagccgttcgccgataacctgaaaatgttcccgccagttctccgcttccggctgtaccggatgcaaatcaatgaatcccttttttttcagtgcctgtagtgcactttcgctgatttctaattcagaaacctgatggcgataaacggattgctggcgcagtttggctaatgcctgttgttgtttagctgagcgtttaagttgttctggtggcacttgctggccggtttctgtgatttgccattgccagagcggggaaaattctgctggtttgccctgccgcagcaaaacaggcatagcatgaaaaagaacttccccgagtgggtagtgataatagcgggaagaccattggagtaattgccagagatcgtcagggaacagggttgcttcatcaagaagttcagtaattgatttcagttgttcaggcgcgaattcactgttgtcggtgatcccggagacaacaccaattgcactgcgtttgccaaaaggcacccgtacccgtattccagaggcaggaacgggcaatccttcgggtaacaggtaatcaaaagagcgggccaaagggacaggtaacgcaacctgaacaactgtcataaagtgatttccggatgattaatggcaaacatataaacaaagagtatcatagcaactcagcagatttcattgcgcgataaaacgatattctgtatgatccgccgcctttggtataaaaattaccaaacttattttaatcaacacgacgtgtggtgtctggcggcaataaggccggatagcgacacggccttaacagaggttttccccatgagacaaggtattcaccctaaatacgaagaaattactgcatcctgttcttgcggtaacgttatcaaaatcaaatctaccggtcacgatgtgaacttggacgtttgtggtgcatgccacccgttctacactggtaagcagcgtgacgttgcgactggtggtcgtgttgatcgctttaacaaacgtttcagcgttccaggtgctaagaagtaattcttactgccaacaaaaacgcccggtgtatatgccgggcgtttttgttttaaacgaatgcaattttaactgcctgcatctgattgatttcaagtcgcagtacagcatataaacaacgacttgagataaaagagatatcaatattcccaagtatcgggatcaatcccacactcacgcattatctctttggctgcttcaggaatttcatcatgacgctctttgcgtaaatcgtcgtcgtcaggcagaggctgtccggtgaatgcatgaagaaatgcttcacacagtaattcgctgtttgttgcatgacgcagattatttacctgacggcgggtgcgttcatcagtcagtatcttcaatacctttaatggaattgaaaccgtaatctttttgacttgttcactttttttgccatgttcagcataagggctgacatactcaccattccactcagccatgagataccttaaatagttttaaatcaagcaattgaaatcagaaataaaagaaattatttctgaactatgttcgtgtcgataattccgcattttagcatatttcccctatcgactatatcgctacggttaaggatttcagaaaatatgccctaatctgacatcaaaacaggggtaatagacggattgtattattaaagctcaaatcattttggatgtctagatgtattgacgtctatatttctgggggttattcttctgtcactcctaaaatacaataatgggtagagctatggggtttaaacaaatagcgggttgtaaacaagcaacggctgcagttcaaagtggtattaatgttgacgaacaatatggctgtgttgttcctcccgtctatctttccagtacgtataatttcacaggattcaatgaaccgagagcgcatgactattcccggcgcggtaatccggggcgtgatgttgtccagcaggttctggctgaactggaaggcggtgcaggggctgtgatgaccagcagcgggatgtcagcgattcacttgttatgcacggtgttcttacagcccggagatctgctggtggctccccatgattgctacggcgggagttatcgcctgtttgacagtttaagccgccgtggagcctacaatgttatttttgtggatcagtcggatggtgcagcactgaggcaggctcttgcccaaaagcccaaactggtattgattgagacacccagtaatccgctgctgcggatcgtggatatccggtacatctgtgaactggctcgtgaagccggtgcattaacggtagtcgataacacatttctgagtcccgtcttacagaaaccactggatttgggcgcagatttggttgttcattcctgtacaaaatacctgaatgggcactctgatttaattgctggtgcggtggttgccaaagatcccgctattgccgaggatttggcatggtgggcgaataatatcggcgtaacaggcggggcttttgacagttatctgctgttgcggggaattcgtacattatcagcccgggtacttctacagcaaaataatgcggctgccattgcggaatatctgcaacagcagccacaggtgaaaaaactctattatccggggctgaaagatcatccgggtcatgaaatagcactccggcagcaggccggatttggtgcgatgctgagttttgaacttgctggtgatgagcaaacaatgcgtggctttttatctgcgttaaaattatttactctggccgaatcgctgggtggtgtggaatcattgatttctcatactgcaacgatgacacatgccggtatgtcggcagaagcaaggaaacaggcgggaattacggattcacttcttcgtatctcggtgggaatagaagacagtcaggatttaattgctgatctggatagtgcatttcaggcagcggcaacgaggtaagcattcattatggttgaactggcaatagcgggggcggaatcgggccgccagttacataaatttggcggtagcagccttgcggacgtgaaatgttataagcgggttgcggatattatggcgaactacagccagccgggtgatttaatggtggtatcggcggcggggagtacgacgaaccagctgattgactggctgaaattgagccagaatgatcgtatttcagcgcatcaggttcagcaggccttacggcgttatcagcaggaattaatccggggactgttgccagaagctgtcgccgaaacactgatcgcagattttgttgctgatttggaaaggctgagtgcattactggataaaccggtgagtgatattacctacgctgaagttgttggtcatggtgaaatatggtctgcccgcctgatggccgcagtgcttgaatctcagggtatttccagcgcatggctggatgcgcgtcagttcttgcgggctgaacgggcagcccagccgcaggttgatgttatcttatcccagcctttattgagccagttattagttgagaattctgataagcgtctggtggtaacaggtttcatatccagtaacaacaaaggagaaaccgtactattagggcgcaatggcagtgactattctgctactcaggttggggcattagcaggtgccaaaaaagtgactatctggagtgatgtggccggagtttacagtgccgacccacgtaaagtcagcgacgcgtgcctgttgccattattgcgtctggatgaagccagtgaactggcgcgtctggctgctcctgtacttcatacccgaacattacagcctgtttcgctcagtgatatcgatttgcaattacgttgcagttaccagcctgaacagggttctacccgtattgaacgggtgctggcatcaggaatgggagcaaaaattgtgaccagccacgatgatgtctgcctgattgagttacaccttttttcggccctcgattttaaacaaacttataaagatatcgactcattgctgaagcgcgcccaaatcaggccgttggcgacagggctgcatactgactgcaatttgattcagctttgttatacctctgaaatagttaacagtgcccttgaagtattacaggatgcctctttgccgggaaaactttccttgcgcgaagggttttctctggtggcgttggtcggggcaggagtatgtaaaaatccgttgcatagccaccgtttttatcagcagcttaaagaccagccggttgagtttatctggcatgctgaagatgatatcagtctggttgctgtactgcgcttgggccagacatctcatctgattcagggactacatcagagtttgttccgggcagaaaaacagatcggtttggttctgtttggaaaaggtaatattggttcacgctggctagagctgtttgcgcgtgaacagaaaaatatctcggcgcgcagtgattttgaattcattctggcaggcattgttgatagtcgccgaagcctgctgaattatcaggggattgatgcaagccgggcattggcattcttcaatgatgaggccaccactcatgcagatgatgaactgtttttgtggatgcgggcacacccttatgatgatttggtcgtacttgatgtgacggcgagtgaggagttggcgggtaactacatcgattttgccagttatggtttccatgtgattagcgctaataaggctgctggtgcctccgacagtaatacttatcgcatgatccgggatgcttttacaaaaacaggccgccactggttatataacgcaactgttggtgcagggttacccattaactattctgtcagggacttgcgggaaagcggcgatacgatcctgtctatcagtgggattttctctggtacattatcgtggctgttcctccagtttgatggcacagttcctttcagcgatctggtggaacaggcatggcaacaagggctaacagagcctgatccccgcattgatctttcaggtcaggatgtgatgcgtaagctagtgattctggctcgtgaggctggctatgagattgagccggatcaggtgcggatagaatcacttgtaccaccagaagccagcgttggctcgattgacgagttttttgaaaacagctctgcgattaatgagcagatgcagaaacggctggaagctgcgcgtgaaatgggcatggtactgcgttatgtggcgcgctttgatgccaaaggtaaggctaaagtaggagtggaagcggtgcgttcagagcatcccttagcttcgttattaccgggggataatgtgttcgccatagaaagccgctggtatcgtgataaccctctggtcattcgtggcccgggcgcagggcgtgatgtcacggccggcgcgattcagtcagatttgaatcgtttatcgcaacttttatagtaatccgcactttctatcagaatatttgatttatgcctgttccatcttttatttttgattggagcaggctcaagtagcccccatttaccagcaaaagttcgttgtttttccttcagtgttgggaattttcaaagccaatagtctgactcaggttaaagaaagttttgagcaaaatttcataaaatccgcccaaattgtttgttttctgatatgaatagtagattaaatatacccaatgaatttcaagttgcatcgcggcggcaagggaaatcatccccgggagcatagataactatgtgaccggggtgaatgagcgcagccaacaaagaggcagcttgaaaggcgaagggtaaatatgcatacagcaacacaaggtcagaactcacatgaatcaacaatattccgcaatgcgaagtaatgtcagtatgcttggtaagatactgggaaacacgatcaaagaggctcagggaaaggatattcttgataaagttgaaacgataaggaagctatccaaatcatcccgtgccggaaatgacgctgatcgccagcaactgttatcgacactgcaaaatttatctaatgatgaattactgccggttgccagagcgtttaaccagtttcttaatttggccaatgctgctgaacaatatcacagcatctcaccgcatggtgaagcagccagtaacccggttgcattagcagcactctttgaacggctgaaaagtaaaaacttcaataatgatgatttggttcaggcggtcaatgaactttccattgaactggtgctgaccgcgcatccgacagaaattgcccgtcgcactctgatccataaactggttgaagtgaatacttgtctggcacagctggatcatgatgatttggctgattacgagcataacaatatcatgcgtcgtttacgccagttgattgctcagtcctggcatactgatgaaatccgcaagatccgtcctaccccgattgatgaagcgaaatggggttttgcggtagtggaaaatagcctgtgggaaggtgttcctgcgtttttgcgtgaattcaatgagcaattggaagaatctatcggttacagcttaccggtagagtctgtgccaatccgttttacttcctggatggggggcgaccgggatggaaatcctaacgtcaccgcagaagttacccgccatgtgctgttacttagtcgctggaaagccgctgacctgtttctgaaggatattcaggttctggtatccgagctttcgatgtcggaatgtacgccagagctgcgccagctggcaggaggagatgagattatcgagccttatcgtgaaattgctaaacagttgcgtactcaattaaataatacgctggcatatctggaaaaacgcctgaaaggtgaacaggttatccctcccgcagatttattgctgcataacgatcaattgtggcagccgctttatgcctgttaccagtctctgaaagcctgcggtatggaaattatcgccgatggtcagttgctggatattctgcgtcgtatccgttgtttcggtctgtcactggttcgcattgatattcgtcaggaaagtacccgtcatactgatgctatcgccgagctgacccgatatctggaaatgggcgattatgcgagctggtcagaaacagagaaacaggcctttttgttgcgtgaactgaattcgaaacgcccgctaattcctcgtcactggcagccaagtgcagaaacccaggaagtattggaaacctgtaaagtcattgcagaatcgccaccggatgcgattgccgcctatgtgatttctatggcgaaagtcccttcagatgtactggcagtgaaattactgctaaaagctgcggattgttcattgtcattacctgttgcaccattatttgaaacgcttgatgacctgaataacgcggaaagcgtgatccagcaattgctccatatcgaatggtatcgtgaactgattcaggataaacaaatggtcatgattggctattctgactcagcaaaagatgcgggcgtgatggcagcatcgtgggcacagtatcgtgctcaggatgcactgatcagagtgtgtgaaaaagaaggtgtgaaactgacactgtttcacggtcggggaggaacaatcggacgtggtggtgctccggcacattcggcattactttctcagccgccgggcagcctgaaaggagggttgcgtgtaacagagcagggagaaatgatccgctttaagttcggcttgccacaggtgacgattagtagtctggcaatgtacgccagcgccattttggaggcgaacttattgccaccaccggaaccgaaacctgaatggaagcaaatcatggatacgctttccgatatttcctgtgatatgtatcgtgattacgtccgcgagcagccggaatttgtgccttatttccgttcagcaactcctgaacaggaactggcgaagttaccgttaggctctcgccctgccaaacgccgtccgacaggtggagtagaaagcttgcgcgccattccgtggatttttgcgtggacgcaaaaccgcctgatgcttccggcatggctgggggcaggggctgcattacagcatgtgatagaggctggtcagcaggatactttgtctgaaatgtcccgtgactggccattttttacgacgcgtatcgctatgctggagatggttttcgccaaggctgatttatggctggcagaatattatgaccaacgtctggttgataaaaaactgtggccgctgggtacgaaactgcgtaatcaacttttagccgatatcgagactgttctggccgtttcacgtgatgggcaactgatggcggatctgccgtggatagctgaatccatcgcattgcgtaatgtttatacagacccgctgaatgttttacaggcagagttattacaacgctcccgccagcaggaacagcctgatcctcgtgtcgagctggcgctgatggtaacaatagcaggggttgcggcggggatgcgcaatacaggttagtatttcgttttcttgatgagaaaaaaggtgaaaccggatgggaaactgtccggttttgcttattgtatcggtagtccattcaaacacaaattacagggagtgaattcgcttattacctatctgtctaatatgcttgcttctttgtcagtgggtatggtgatgagcgatcaggctgggtggtatatcctgaatattgttagtatggttattattgttggatttgtgttttggtttacttccagaaataacaggatatgttgatgggaaattgctcagatctctgtatgatttaaaaccaacttgtccagtgtgaggggcaaaatatgaataacaacaatcatgaaggacagcgtatttcgatgccgtatttgatagcagacgtagattttaaccgtaaactacgtatttctgaaaaaaacgtagaacatacggtttcttttcttgaaaatggcgcaaaagattttattttgcctgattttgtgactccacatggatatcgctttgtaaagtcattaaagcaggcgcaataccgtatgatcacatcaggtgataaacccgaaacggtttacgccgtcaaactgatttttcgcaacgacattattgttgataaagaaacctgtactcaaatcatggtctggcgtactttcagccctgaacatcaggatgctgccagtggttttccccggcgttttttcagattcttgttagataattacaggattatcgtgacagatgaagagcagacaggtgatggtaaacgtttttggcaaattatgatcgcttggtctatgtctgttggttatcacgtttatatttctgatggtggagaaatagatcgcccactcacagcggtaaccagtatggatgaacttcttgataaatgggatgcgttttgttggggaagagacaaagatttacatcgtcaccgtttgattgtaatcagtaaggaagttttgtcttcgccgaactaaagagttcggcggaaatggaattcaacaagggcgaacccctaatgtatggcagattgcataactcaattccgctcggttcagcgtataaaaatggaaatcttttactccttcacggctcagaattttcaccatatccattgcaattgaagcgcccactaagctgcggctttcaggatcatcatccaatccttcaaacattctggtcatccagcttgggatacgaacattagtcatagtcgcaaaccgctgtagctgacggaagttagagacaggcaaaatgcccggcacgatttctacatcaattcctgttgaaacacagcgatcacgaaagcgaagataactttccacatcaaaaaagaattgagtaatagcgcgattagcaccggcatcaatttttcttttcaggttaatcaggtcagattgcgcactttttgcttcgggatggacttccggataagccgccacggaaatatcaaaatcagcctctttttttaagagttcaaccaaatcagcaccgtacatttcaggtttactgctgccatttggtaaatcgccgcgcaaggccacaatatgacgaatcccactactccagtaatcgtgggcgatgttacacaactcttcacggttggcatcaatacaggttagatgcggcgcagcttcaaggcctgttctgtctttgatgcccttaatgatgctatgagtacgatcacgttcaccagaattggctccataagtcacggaaacaaacttaggcttaagtttgcttagacggtcaatggacttccacagggtctgttccatttcagccgtttggggtggaaaaaattcgaaggaaacacgaatttgaccttcaagttcagccagattctgatttagtgcctcttgatgattagcgtgaaagaaactcataccctgtaccctcgtgaacgaacggagtttttctccgattatatttagatgcttaagtgtttatatgtctatccatttagacgtccaaatagaatgagcgaagcgggatttttagtcaattaggaaatggcttatttccagtgaggaatattcagtgtgatcaggaaagaaattcatgttgggaaaaaagtgttttggcagtaatacatgtgttagcgctcaaaggggcagtactgggccgaccattggttgatatacactttgtctttcaagttgcctctttgttggctgcgctcattcaccccagtcacatagctatctatgctcccagggatgaactctcttgccgccgcgatgcatcttgaaatccattgtgtatacattaaatggttcctgttatccgaacatgaaagaattacgaatccaacataatggagttccaattcgtgctttttttgcatttgatccaaaacgtcaggcaattattctttgtgcaggtaacaaagaaggacagaatcaacgattgttctataaagagatgattagaattgcggatgaacaattcagaactcatctagaaaatctggagagatgatatggctacgttaaaagaactaatggaaaaacgcagccccgagagccaagagagaattaaagaaaaagcagcggagttgttgcttgaaacacaactatatcaaattcgtgaaaccttagagctttaacaaactcaggtcgcaaaaaatttaggtattgcacagtcatcagttgctgcaatcgagcaacggggaaatgaattaaaaatttccacactcaaaaagtacattgagtctatggggggagaaatgacccttggtgttaaattacctaatggcgattcaatgaatttctccatttaaaataagtgggaccgtggtcccactccgaaaaatgagctttaacccacacccaaacaaaaatgctccacaatctgggcgatcagtttccttgtcggctcaatcatcgacacttctatatattcatcaggttgatgggcctgctcaatggagcccggtcccagcactattgtcgggcagagttgctgaataaaaggcgcctccgtacagtaattgacggtttctgcttttgttcctagtagtctttcgataacactaaccagtttgtgattggtcgggcactcataaccgggaacggggggatgaagttctgtcacattcaggcgtcccggccagcgctgcttgacgggttccagtgattcattcagtgcttcattcaaatcctgtaatatcagaccgggtagcgggcgaatatccatatgcagttcacagcaggcacagatccggttagccgcatcaccaccgtggatatgaccaaaattcatggtggggtagggaatggcgaaagccggattatggtaacgttcctgcaaggtatgacgtaatttcatcaactgtgtgatggattcatgcatcaaatcaatagcattaacaccccgcgccggatcactggagtggccggatttcccttcaatacggatagcatgggcaacatgccctttatgggcacgaattggctgtagtgatgtcggttcgccaataatggcaaaatcaggccggatagttgcgtttgcggcaaaatatcgggcaccagccattgaggtttcttcatctgcggtcgccagaatatagagtgggtgagatagtttactaatatcaatatctcgtattgcatcaatgataaaggcaaagaaacctttcatatcagcagtccccagaccgtataatttgccatcacgctctgtcagtgtgaatggatcctgagtccagcgcccggcatcaaatggcacagtgtctgtatgaccgcataagagtaaccctccagagccactccctaacgttgccagcatattaaattttccgcgagattccggcacaggctgaacctcaatttcaaaaccaatctgtttcagccagtcagccaatagagagataacagattcattactttgatctagctcctcatccacggcactgatggaaggtgctgcgataagctggcgatataactcaataaacgttggtaatttaatattcactgttgacagcccttattcaagatagtatcaatattaatgcaatttaattgaatataaattcaatcgtgtaatcgggttactacattgggttaatacaatacattgggttaatacaaggtgaataaatcccatgcttaatacgctgatagttggtgccagtggctataccggagcagagttagcagcatgtctgcaacgccatccttatatacatcttgcgggtctgatggtttctgctcaaagctctgatgccggaaagtgcttgtcagaactttacccacagtataaaggaacccttgatttacctttacagccgttaactgatgtggctgaagccgcaagcggtattgatatcgttttccttgctactgcacacgaagtcagccatgacattgctccggaatttctacaggcaggctgtatcgtatttgatttatctggtgcctatcgcgtacaaaatacactgttttattcagaatactacggatttgagcataaaaatatcgattggcttgagcaggcggtatatgggctggcggaatggcaggcggagaaaattaaaacagctcagctgatcgcggttccgggttgttaccctacggtttcacagctttcgctgaaaccactgctggaagctggtttgctggatacaggacagtggcccgttattaatgctgtcagtggtgtgagtggagccgggcgtaaggcgtcgataaataataatttttgtgaagtcagtttacagccttacggtgttttcaatcatcgccaccagccggaaattgctacacatttagggatagatgtgattttcaccccccatttgggcaattttgcgcgagggatcctagctacgattacctgcaagctgaaagccggtatcacagaagaacaagtcaggcatgcatatcaacaggcgtatcacgataagccacttattcggttatatgaaaacggtgttcctgccctgaaaggggtcgtcgggttgccattctgtgatattggttttgctgtacaagggcagcatctgattattgtcggggctgaggataatcttctgaaaggtgcagcagcgcaggcagtgcagtgtatgaatattcgcttcgggttcgaagaaactcaggcgttactttaattcaaggtgttttgaattcagagcttttttatttcagaaattatttgataccgacagaggataaatctgatggagccattagttatcaagctgggtggggtgttattagatagtgatgaagcgctggtacgattattttccacattacagttatatcgaaaaacgcataaacgtcctttagtcattgtacatgggggcggttgtttagttgatgaactgatgcagaaattacagttgccgattatcaagaaacagggcctgcgtgtaacgccagcagatcagattgatattattaccgggacactggctggtacagccaataaaaccttactctcctgggcgataaaataccgtttacctgcggttggtctatgtttgggtgatggctgtgttgtgaaagtttctccgtttaacgaggaatttggtcacacgggcatggcttctcccggtaatccggatttactgaaaattttactggatatcggttatatccccattattagctctattggtattacagaagacggcaaattaatgaatgtgaatgcagatcaagctgctacagctgtcgcacagtcactgaatgccgatttagtttttctgtcagatgtcagcggtattctgaacggaaaaggcaacaagatccctgaagtatcagaaaaagaaatacagcagatgattgaacagggtgtgattactgacggcatggttgtgaaagtccatgcagcactggaagccgcaaaaacactggggcgtccggtggatatcgccagttggcgttatgctgatcaactgattgctctatttaatggtatatccgttggcacccgcattctggcataaccatgctgacataacagagaatgaaagcggttttgactgattaacagcatggcacctttctggtgaaaacttgctggtgaataaaagtaaaaggctacctctatgacaacgacgactacttcggtaaaaaacagtattaaaaagattgtgctggcatattctggcggtttggatacttctgccatcattccgtggctgaaagaacattatggcaattgtgatgttatcgcatttgtcgcagatgttggtcagagccgtgaagatttggagggtatagaacaaaaagcattgcgttccggggcctcagaatgccatatcgccgatctgcgtgaagaattcatcaaagaatatgtttatccggtactgaaaaccggagcattgtacgaaggcagttatttgctcggtacttcaatggctcgcccgattatcgccaaagcgcaggttgaactggccctgaaagtgggggctgatgcgctggcgcatggggcgactggtaaagggaatgatcaggttcgttttgagagtacttatacggcattggctccacatctgaaagtcgtcgccccgtggcgagagtgggatctgcgttcccgcgaagcgttgctggattatctgaaagtccgcgatattcctactacggcaacgctggaaaaaatttacagccgtgatgaaaacgcgtggcacatttccaccgaaggtggcgtattggaaaatacgtggaatgcggcgaataaagattgctgggagtggactgtagagccggaagatgctcctgacgaacctgaatatctttctgtcactgttgagaaaggagaggttgtcggagtcaatgggaagatactgtcaccatatcaatgtcttaatgaattgaatgagctgggtgctaaacatggtattggccggatcgatattgtagaaaaccgtctggtcggaatgaagtcccgtggctgctatgaaacaccgggaggaaccatcatgatggcggctctgcgtggtattgaacaattagttctggatcgtgacagttttaaatggcgtcagcagctgggtctggagatgtcttatgttgtttacgatgggcgctggttcgtgccgctgcgtcagtctattcaggctgcggcagagatgctggccgagaatgtcagtggtgaagtgatcctgaagctgtataaggggcaggtgacagccactcagaaaacgtctcctcatagcctctattctgaagagtttgctacttttggcgaggatgaagtttatgatcacagccatgctgaagggtttatccgcctccattcgctttcttcccgcattcgtgcgctgaaaagcaaaaagtaatttccgggtaataaaaagaagaggaatgcaattatggcactttggggtgggcgcttcagtcaggaagctgatcagcaatttaagcagtttaatgattccctgtgttttgattatcgtctggcagagcaggatattgttggctctgtcgcatggtcaaaggcactggtcacagtcggtgttctgacatctgaagagcagcagaagctggagttggcgttgaatgcattactggatgaagtgagaaccaacccagaggctattttgcaaagcgacgcggaagatattcatagctgggtggaaggccagctgatcgcaaaagttggggatttaggcaaaaaactgcatacaggacgcagccgtaatgatcaggtcgcgactgacctgaagttatggtgtaaggatcagatagcggatatccggcaggctctgacagcattacaacaggcattagtgattacggctgagaataatcaggatgccgttatgccggggtatactcatttacagcgggcgcagccggtgactttcgcacattggtgtctcgcatatgcagaaatgcttgcccgtgatgaaagccgtttgcaggatacgttaaaacggctggatgtcagtccgctgggatgtggcgcgttagcgggaacggcttataatattgatcgggaacaactggcttcatggcttggttttgcttctgcaacccgtaatagtctagacagcgtgtcagaccgtgatcatgtgctggaactgctgtcaaatgccagcatcagtatgatccatctttcgcgttttgccgaagatctgattttcttcaacagtggagaagcggactttattgaattatcggatcgggtaacgtctggttcctctttgatgcctcaaaagaaaaaccctgacgcactggaacttatccgtggtaaatgtggccgggtacagggtgcattgacaggtatgatgatgacattaaaagggctgcccctcgcttataacaaagatatgcaggaagataaggaagggttgtttgatgcgttggatacctggcgggtttgtctgcatatggcagcaatggtattggatggcattcagataaaacgtgagcgttgtcgggaggcggcaaagcagggctatgctaatgctacggaattagccgattatctggtggcaaaaggtgttccattccgtgaagcacatcacattgttggtgaagtagtgattgcggcaataaagaaaggtagggcgctggaggagttgtcattgtctgaattacaaaggttcagtgaaactatttcaatcgatgtatacgatattttatcattacagtcctgtctggataaacgtctggcaaaaggtggtgtggcacagaaacaggtaactctggctattgctgaggcaaagcagaggctacatctcagctaactgaaacccctctgagtacataacttccccggatcaacgaattgggctgcctgcttattgcggtggtccgatttatctattttttgaataaattccgtcattttttatcaggtaactttataaaaaaactgaaatcaccacgaattgatagttttctcctctcatgcatataatgatttattgatcaattctatcattgatatcaaacaatgaggttgggaatgaatatccgcgatttggaatatcttgtggcacttgctgagtatcggcattttcgcagggctgctgattcttgtcatgtcagccagccgacgctcagtgggcagatacgtaaacttgaggatgagttgggcgtaatgctgctggaacgcacaagccgcaaagtcttgtttacacaacaggggatgttgctggtggagcaagccaagacggtattgcgagaagtgaaggtattacaggaaatggcttcacttcagggtgaaagtatgtccggcccattacatatcggtctcattccaaccgttggtccttatctcctgccattgattattcctgaactgcataagttgttccccaaactggaaatgtacctacacgaagcccagacccagaacctgctggcccagcttgatagcgggaaactggactgtgcgattctggccgcaataaaagaaacggaagcatttattgaaattcctctctttaaggaacccatgaagcctgcggtctatgaagaacataaatgggcagagcgggataagatcaatatgagcgagctgactggtgaaaagttattgatgctggaagatggtcattgcttacgtgatcaggcaatggggttctgttttcaggccggagccaaagaagatacgcatttcagggcaaccagtatggaaacattgcgtaatatggtagcggcagggagcggcatcactttgttgcctgacttggctgtccccaaagagaaaaagcgtgatgggatctgttatctcgagtgccataatcccttgccggaacgttctgtgattctggtttatcgtcccggttcacctctgcgtaatcgctatgagcaactggcagaggcgatccgaaccagaatgaagaattatttcgatatcagtggaacaacatcaaaataaccggttcagtccattaagggcagcaacgcgataagcttcggccattgtcggatagttgaaggttgtattaacgaaatattcgatattattaccttcacctttttgttccataatcgcctgaccgatatgaataatctccgctgcacgttcgccaaaacagtgaatgccgaggatctgttttgtctcgcggtggaataatatcttgatgctgcctacattcatccctgctatctgtgctctggccagatgtttaaactgggcacgccccacttcatacggaactttcatcgctgttagttcctgctcagttttacccacagaactgatttcagggatggtataaatacctgttggaatatcgtctaccagatacttttcggcattctcagatccggtcatgatggcttttgctgcaatgtgcccctgattgtaggcggcagaagcgaggctgggataaccaatcacatcaccaacagcataaatattttcattgctggtttgatagacccgatttactttcaataaaccacggctatcagtttccagcccgacgttttccatcccgagtttatcggtgttaccggttcgtccattggcatacagcagacaatctgctttaactttcttgcctgatttcagatggataatgacgccatcttcaagaccttcaatcttttcatattcttcgttatggcggataacaataccgctattccagaaatgataagacaacgcgtcagacatttcctgatcaagaaatgacagcagatggtcacgggtattgatcaaatcgaccttcacacccaacccccggaatatagaagcatattcgcagccaatcacacccgcgccataaataatgacatggcgtggttcgtgatccagttccagaatagtatcgctgttataaatacgggaatgagtgaagtcgacatcgggagggcaataagggcgagagcctgtggcaataattattttgtcggcactcaatatatctacactatcatcagcataacgcacactaacatgatgttcatcgataaaggtggcttcaccggcaaacatcttacaccgattgcgctcataaaacccttgccgcattttagtttgctgatttatgacaacttcggcatgacgtaaaatttctgaaaacgaggagcgaagaatacgggagttgtcactgtagagaggattttgattaaattcaataatacgactgacagcatggcggagagctttggacgggatagtgccccagtgggtacagccgccgccaatattgttataacgctctataactgcaacgttttttctttgttttgccaaccccattgctgccccttctccaccgggtccggagccaatcacaatggcatcaaaatgagtatattgcatagaggaaagacctatttttacacaaaataacaactctatattaacattggttggcgtaataacctaattagagtacggtttttgtttccggcgttgatataaaactaaggaaacattggttaatatctttaagagaacaatcacagcaaatgtagcagaatctgatatatttgctgcatagtatagtcgagtatgtatatcaggattgctgtgaataatgtaactggcgtcagagcgaaacagaaagagaaaacccgtcgttcactgattgaagcagcatttagccaactgagtgctgaacgtagtttcaccagcctgagtttgcgggaagtggcccgggaagcagggattgcaccgacttcattctatcgccattttcgtgatgtggatgagttagggctgacgatggtggatgaaagcggcttaatgctgcgtcagcttatgcgtcaggctcgccagcgtatcgcaaaaggtggcagtatcattcgcacttctgtttcaacctttatggagtttatcggtcataatccgaatgcattcaggttattgctgcgtgaacgttctggtacatccgctgagttccgtgcagcggtcgcacgggaaatccaacattttattgcagaactggcagactaccttgagcaggccagtcatatgcctcgccattttaccgaaatacaagccgaagcgatggtaacgattgtgttcagtgcgggtgcaaaagcgctggatattgatgaagaaaaaagacgtcgtctctaaaaacgtttggtattacaactgcgtatgatttccaaaggtgctttttattggtatctggtggagcatgaattatactgtttactttaaaaatacttgcctaaaaaccgctggatctaaaacttctgtccctaaaaccccttgatcact

SEQ ID NO: 346 - DNA, 1262 bp, Xenorhabdus sp.
  CDS (2)..(463)
taaagttatccgtgcactgaacgcattgggtgcaacaccgacagacttaatgtcgattctacaggcgatggaaagagctggctgtgtacgggctaagctaaccgaaacattttctgtattgtgtacgacattttcacctgatttgccacagtttatgatgaattattgtgctgatattgaacaatacggtagtaatacacgtctttatccacaaacagagaaaccgaaaaatcatattaatatttcctcaatcccgtggataggatttgatggtttcaacctgaacatatctgatatcactgattatttctccccgatttttacaatggggaaatatcagcaagagggcgggaaagtattgttaccattatcggtgcaagtacaccacgcagcctgtgacggctatcatgtcgctttatttattaaaaaattgcaggcattgtgtaatgatgctttgatgtaaagaaatagcaggctactattcagtggcctacttaaaaaatgggtctgaggctaattgattttcccttaataattattgactttttatcaaaattaaatcaatttgctattgccattaccccagttactgtgaattcgtttttaagctgaatacttaaaaaaacaacattaaattaatatcaccctatttttaacacctctgaattatgaacccatattggagcagcatatgctgattaccttaactgacgtaactaagaataattatgaagcagtttgcgatttatcagtaactgacgaacaactctcttatgttgcggaaaacgtatattccatcgttcaatcaaaatttaacccttcatatcaaacacgtgctatttgtctgaatggggagcccgttggtttttttatgtgggtgcccgatgctgaccgaagaataacgatttggcgatttatgatagatcaaagccatcaaaagaaaaatattgggcgcaaagcactagcgttagcaattgatgaaatcgggcgtacagatcagttaaaggaaatagcaatctcttataatcctaaaaatctcattgcaaagaatctttatgccagcgttggtttcgtcgaagttggtatggatgaggaagttggagaaatgctagcgattatcaggatttaagtgcgaatatttaaatctcaactaagattggtttatacacacataaaggtttgttatgaaaagattaattatcactcttatttatttaatactaactatttctgtaccatcagtatatgcaaatacaactcac

SEQ ID NO: 347 - DNA, 6050 bp, Xenorhabdus sp.; identical to SEQ ID NO: 49
  CDS (5125)..(5583)

SEQ ID NO: 348 - DNA, 6050 bp, Xenorhabdus sp.
  CDS (3990)..(5231)
gttataaccaccggctcccttaaagctgatatcaccttttacacctttacgggtgatcccgttataaccggaaacccccgcgtagttgatagcaccgttatcaccggtgtgattgatgttcagcccaccagcagcaccggcaaattctatcgtaccgttatgtgttttattaatggcggtataccctgacccgcctttgaccgtcagggagccactggtatcattgatgttcagataaccggcaccaccgacaaccgtatcatgaccccatgttgtattgactgtggcaccgattgacccgacgacaatataatcattaccgccataagcattaataacgccgccaacgcctatcgcgtgtattgtgttaccgtcattatcatcctcatatctaccggtaaagaagtattccgtacttcggttagatgatttccccataaatattcctggtgttgggcaaaaaattaaacagtaaaccactgtatccggcggatacagcggtcatttttaacatccaaaataccccggacagtacaggctctctggcctttccaggccgaaaatacacggcggcgcaaatcccgggcgatgtcatgtgcatgcccgaatggggcaatcatttctggaaaaaagatatgctgaccagagcgccagtcttcatgcaatatctccctttcaccggaaagaattgccgcgcggctgctgtcagacaaaaaagcccaattacaaaaagcaactgggcgctggtgttcatcttcgtaatagcaaaactgattgagctgaaatgacggtaagatacgttgttgccattcggcaactaaataacggcgatgcaggggggaatgttggcaaagtaacattaccccgccaatgatggcctgtatttcagtctgattcagggttgccagttgatgtgtgatcatcataataaagcaactatccagctgattttattttgattttttagtattccgtgcagcacgtttttccggctgttcggcgtctgcaactgtattgtcagcttcagccgtcacggggctttcatctatttccggcatcggcaaaaaaccggctgcaatcagtttattgatttcggcttccatacgcggatcttcgagcatacctttcaccatagaaaccatatacataaaaccggatgccggcatatggataacttgttttaactccagttcctgatcgttttcggccagtacaccatttgccattcgcttaggatcctgaccaacaaaataaagagagaacacgcctttattgtaattaacgcttgaaattgtttgaacaaatttttcagacatatcactatccattaaataaatattaacccaatgttaaaggtatattaaattgaaataattaaatgataaatgaacgctatactccgcaggatttcatttattattaaattccgtttttgccgtaaattgattacaaaaaatcagttggttaaagcgtatcaaaaacaccattacaatatgagtgaataatcagaatgaaggtttaaaacatacataaaattcaacataatctgtaatggcagacaaaataagagagaaaaaacaaataaattaccgactactttgagcgaaaatatatctatttgccttttaaaatcaacatataaatattaaaatgtctgtttaggcaccacattttgtcccaataacccacactaatatccacaatcatagcagataataattgttattagatttattaaaaacatttcatcgagaaatgccacactatttttctggttgtttctttaatttgagttttgactttcgttacaaatagacttccatgcatgaatgaaatagaaaaaacaacattatcattaattaaattaataataatgatatctaatggcaagccctcggttacatctgataaaaacataaataataatgatgattaccttgctgctttaaataaattaaagaaagaaaacaatgtatccattaaaaataagcgttcgataaagaagaaaattaacacattatctttaccggcaattctgtttgacaataatggaaatccttttattttagcaaaatgcgatgaacatcgggtgctaatacaaaagcctcatcaggaaaagccggaaatattggataaggaagattttatcaatttatggaacggtcattggctgaaaataaagcaaaacagtagccaatttaatatccactggttcattcccgaatttatcaggcagaagaaaaatctggctgaaatactgctattttctttcgttttgcagatattagccctgatctcccccttattcattcaggtcgtgatggataaggtattggtacatcaggcgctatccacactggatgtactggtattcggtcttatattcgccggaattactgaagttgtcctgagaggactgcgcgagtatcagtattctcatactgccaaccggattgatatcaaactggggctgaaactggttcaacatctgtttggactgcctttactgtttttcaaaacccgtcaggtgggcgcgattgtcacacgggtacgggaactggaaaccattcgggaatttttaacaggatctatgtttacattatgcattgatgtcctgtttatgtttgttttcatctatgttatgagcctgatttccggtacgttaaccctgatttttctgattaccatccccttctatgccctgctggcatggtgggttacaccgagacgtcgaaaatcgggagaataacaggtcactcctgcggcgctcagtacgtcatttctgacggaaactgtagcaggcgctgaaacactgaaaagcctcgcagcagaaccacgtttcacccgtcgctgggacagccagactgaaaatatggtcagtaccagttatgaggttcagcaatgggataaccgttccagtcatctggtcatgctgttacagaaagtcaccagtgccgttattatctggcttggcgcatccgaagtactctccctgcatatgactatcggtcagttgattgcctttaatatgatggttaatcatacccaacagccattagccaaactggttcagctctgggggcaatttatccgtacccggattgccgtcgataagctggcagatatgctgaatttaccgacagagcagcagtctgtcgcaaataaatctgttgaaaaacaatctgtcgcaaagcaatccgtagaaaaacaggcagagaagaaacaggtggcactaaccggtgcgatttccttctctgatgtcgttttccgttatcagcctgatattcctccgaccattaaccatttcacactggatatcagggcaggagaaactcttggcgttgttggcacatccggttccgggaaaagtaccctcgcccgtctgttactgcgcctgtataccccggagcatggaacaatcaggctggacggtattccgttacaacaactggatacggaatcattaaggcaacaggccgggatcgtgttacaggaaaatttcctgttcaataaaaccgtcaaggaaaatattgcccaatcacggcctgacgcaccgctgtctgatgttattgagtctgcaaggctggcaggcgcacacgattttatccttaaactgccgttagggtatgacacggttatcgcagaaggtggtcagtcactgtcaggcgggcagcgacaacgtctggcgattgccagaaccctgctctccgatccgcgaattttgatcctcgatgaagccaccagcgcactggatgatgaatcacaggccattattcagaccaatatggcgggtattgctcagggaagaaccgtcattactatcgcacaccggctctccactgtacgtcagtgcgaccggattattgtgctgcatcacggccagatcatcgaacagggcagccatgaacagcttttacagcatggcgggcattaccaaaaactctggcagttgcaacaggaactaaaacaggaacaggagggttcttcccatgtttaaggccattttgcgtaaagggctgaaacgcctgcgttctccttctcaacattacgattttttacccacgcatctggcattgtcgcaacgtccgccttcgccgtttgcccgctataccgcaatcgcgctcagtatcagtgtactggtacttctgctatgggcttatctgggaaaactggatgtacaagccacagcaaccggacgcctgatcgtctctggtcgttcacaggtgattcaggcctatgagcagagccgtctggcgattattcatgtcaccaatgggcaacacgttgaaaaaggcgcagaactgctgacactgaatacacttggtgtcaatcaggacattacacgtatgcttgaacagcgtgaatatctcaccgaagaaaagatccgttatcaggcattgctggataatcacgcccctgaatcctccgaactttttcagcaacaatccgccatcagccagaaaaaaattctgacacattaccagcatgaaaagcaggaattcgatgcggttgtaaccaatatttatgctgaaatgaatgtcaatctctcttcacagaaagccaaagagaatgatattcaggcactgagcaacctgcgccagaatatcagccagcgcttacaagccagaaaaacattgagccaacagcaggttatcagccggatggaatatctggagaaagaaaaagagtttctggagacggaacggctgctgacgcaacaaagggcagaacttggcgtcctgataacgcagaacaaaagtctggaagaacggctgaagagtctgaaaacgcaaaaagatcgcgaatggtttgaaaaaatcaagcaggcggatatgcagctatctgtactgaaacaggagctgtcaaaaatgaaagaacgggaagagctttcagtcgttcgctctccggtaacaggcactgtccagcagttgagtgtccatactcttggggcagtgctgcaaccggcacaaaatctgatggtgattgttcctgacgaccatatacagctggctgaagtccagatcctgaataaagacgttggttttatccgtccggggcagcaggtcactgtaaaagttgatgctttcccttatacccgctatggcaccattgaaggcagattgttaagtgtttcccgcgattccacggtagatgaacggctagggctggtatttccggcgcaaatcagtctcaaccagaacaatattatgggtgacggcgaacccgattgaactgacagccgggatgtcaattgttgcggatatcaaaactgaccagcgacgagtgattgattatctgctcagcccgattcgcgaatatcagtctgaagcgctgagggaaaaataatcatggtaaatgttttttccgataaacgtttttcaggtacagacggcactgatacagaaaatcacgtcaataatcatgctattgagtgtaccgtctggctgggaaaacaatttcataaagttgccgatgccgggcaattgcatcatgccctggggctggattcgctggaactgacggactggcagctacgggaagcagtggatgctatcgggctgcacagtaagtttgattctctgtcagcagaaactgcatctactctgccactgcctgcattgattgagctggaacagtgctggtgggtattgctgagtattaatgcagaccgtttcaccgtactcaatcccattacgggagaacaaaaaatacatgatctgtgtagtcaatataagatcctgctggtcgctgaaaaaaacctgactaaaaaacacgtcaaatttggcctgagctggttttacccttccattttcaggcagaaaaaacagttaaaggatatttttctgctggctattgtcttgcagctttttgcactggccgcacctttactgtttgaaaatatcattgataaagtattagtcgggcgcagcctttccagcctgcatgttctcggtctggcaatgctggcgctcgccattgcggaacctctgtacggatttatgcgtaataccgtattcgggcatatggcaagccaaatcaatgcggaactt

SEQ ID NO: 349 - DNA, 6050 bp, Xenorhabdus sp.; identical to SEQ ID NO: 49
  CDS (5613)..(6050)

SEQ ID NO: 350 - DNA, 4821 bp, Xenorhabdus sp.
  CDS (1)..(4821)
tgtgccctaaaggtcagactggttatggaggccgttaccagagagtatgggcaggacgtcaccaatgccatcttctccaaactgaaagccagtgatctggcaaaagatggtatcgggatcgatatttcaggtctcaaaaaagtccatcgggaaattgagcgtcatttatcgccggtcagcgccaccctctatatctggaaaccgagtgatcacagtagcgtgggacatgctgcactgcaaattggtcacgggcgtgtgaaagtcacccctgaagaagtcagggatttcaatgatatgaactatgtgagctggtggccggcaggcagcaaatcccttaatttacaggaactgatggagacaaataatagtcagtctgattttcggatccgctggcgtgacctcagtatgcccgctcatcagaatccggctttgagatatgacgttgcctctgaagaagatgatgattttggcttggttgatggctcaggtgaactgaaagaattcgttgaaaaactaagagccgtaaaaggcgtggatgccaagtttaaggatgtcagcgaaagttttgcgatggctgcactggctaatccggagatgcttaaatcggctgagataccgcctcatatttatcagccattccttgcccagtggcgggatgacaatatggatatgcaggaagtggctcagcgttttgccgaagtactgcgtatggcagcagaattgcagaattctaaacgcatggagcatttaattggcaatgtgacgcgccagttcgctgagcgagaattagctgacattaacgcttttaaagatggcaaagccgatcagggacgggtattccgcatcaatctggaaggccttgatgtagcggcaatgcaggctgagtgggaaaaaatcagcacagacccggatgcgcgctaccaacttctcgccaaaaactgctcaacggttgttgcccgtgttctgaaagccggcggcgcagaaaatgttctcggccatgcgtggcgccccggatatggtatctggaaacctaacgatctctttcaatttggtcaggcattgcagaaggcgacacaggctgagcggatcaaatataaatatcgtcgtctgaatagtgatggtgtgggacggatcctggaccagccggatgatctttatgaagagatactggaaaaggtggcgattgaaaatgatggctcaccattacgtgacagtgagccacgtaacccgctggcacgcttcatgaataatgagctgtacgggatgagagatgatcgccggcgtatcagtaaagcggtgcaaatagggcttagccgggcaattgaacggaagatggcagaaaaagtcacattgcgtggtgaggcggggcgtctggaaggttattaccatctgagtgctgtggagccgtcagataaggtcgtgctgtttattcatggctcaggttcttccgcagaagaacaggccagtaaaatccagacgcattatcaacagcagggtgttgatatgctggctgtcagtatgcgcggttacggtaccagtgatggccgccccagcgaaaacggcctgtatcaggatgcgcgtaccatgttccgttatctggtcaacaatcgtggtattaaaccagaaaatattgttattcacggttattcaatgggagcaccgattgccgctgatctggcccgttatgttggacgaagagggcaacctgttgccggcctgctgtttgacagaccgatgcccagcatgaccaaagccattacagctcataatatcctgaatccgacaggcgtcgtgtctgtactggcaaaatcggttaacggaaaattctcagtggagaagaacctacagggtattagcaaaaagacccctatcatggtgcttactggccgggacgggctgggaaccgaaggtgaaaagctgcgtactaaactcattggcaccggttataacatctctggtgaacatacttatctggggcatgattccagccgccggatgatggagctgtacgccaataagatcgttaccaacttgtttgaaagcagtttgtctgaaagcaatttgtctgcaagcagtttgtttgaaactaacgtgcgagaacaggaaagtgctgctatcaaaggcatcaggaacgatttgaagcgttatatgcagtttttacagtcccatacagataaaaccggcagagtgtacgatctgcgggcgacaaaaaaattcctgtcaggctacgggcataatcaggctgaacatctggttgagagtttccatgctgatatgggaattaagcaattggtagatctgctgctgaaaggcaattggacagcggagcagaaaggtgcgttatcctgggaaattgaaaaccgggcactgaaactcagcttgcggccaagaatagaaaaatacagccgtctgttccgggatgtcgcttctaccggtgctgaggacttgcaggcaaacgaacatctggctcctcaactgatgttgctgaatttgtccaacgatggtttcggcggacgttgcatgccgctgtcagaactggttctgctggcaaaacatcttgagaatgacgggcaggataatgttagcaatgattttctgaaaaaactctactctgcggcttctgtcctcagccatccggagctgtacgccgaatcggaaaaagctaacgccagtaaattactcggtgcactttctgctctctatatccgtgcaccaatgtatgacaacacgttcagggtatggaagaaaaaactgagtggtaatcaggcattaaccgtgaaggatgtcatcgacgaaattacggtatccaatgtgaatggccgggcaattttacttgagctgaatacctcggatcatgctatggcggcgtggtcaaaagacaacagcggaacgcggatgtatgggttctatgatcctaatgtcggcattgtggaattctcctcagcagaaaaattcagcgcttatgttaagcgtttcttcagccgttctggcatgaatatggcgcaatactacggtatgcccaaaaatgagcatcaggaaagcttcttcaatcaggtgattgttgtggatggacgagcgctggcttcttatcgtccggtcattgatgacaaaatgaacctgagagatattctggcaatggaaatttttgatggctcccccatgaaaaatgctttaggcacagagcgcccgctacataaccaaaatgttgcttcgtgggaagacattaccgttacaccgcaaccggaaagcggctccagccgttttgacagccagatcattatccagactgagaatgacccggttgttgccagagccgtagccaatctggcagggaaacaccctgattccagtatcgttgttcagtttgactcaactggtcaatatcgggtggtatacggtgatccagccagactgacaggtaaactacgctggcagattatcggtcacgggcgtgaaattactgaattaaatcatacccgcatggggggctataatgcggctgaattagcgatcaatttaaaacagttcagccgtgatttccgctatggcggaacaccggagcatatcagcctggtgggatgctctctgatcagtgatgataagcgcgatggctttgcccgccattttatgactgaacttaaacagcagggcatccgtgcttcagtctctgcacgcagtagtaatattgccgtggataatacggggcgtaaatatacccgaagagatgcacaggaacagtgggtgcataagctgcatgacaataaaacggttctgaactggaatgctaacgatgaactggaaacccgctcagaacgggtacgtcatggtatctctgaaagtgacattgtacttgcgcgtatcggcagccgaaacaccagtacagccgccaccggcgcgattgccgataacagagaaaccttccactcatcacgtaaacgtcttgttcagaataacgatgatgcgagcagaccatcaaaaaacaatcaactcagttattccggtaatgtgcagctgcaaattggtgacggagaattcacttccattaactggggaaccacaaatgtcggccttaaattaggaacgggaggctttaagtctctggcgtttggcgataataacgtcatggttcatctgggagacggtgacagcaaacacagcgtgaatattgccggttatcaggcactggaaggcgcacagttgttcatcggcaaccggaacatcagctttaatcagggccgcagtaacgatctgattgtcatgatggataaatctattccgacaccgccaatgcttaacccgtttgacggcgtatcccgaatgtcaggcgttttgcaggatatctccggttcgttctcttctccgggctggctggccgctcaggaagagcaatggacaatcgccagtgtgaaaaaatacctacaggatatgtcagggctggatttgaccagcagtgtggactaccgttcactgactgagatgggttctcaggaattacgcagtggccgtggcctgaagaacgatatcgaaagctcactgaacaaaaaatacaatcagtggctgggaggagaggcgccgaaagtcagtaatctcagccgggcagaccgattccgacaggcaaatgaaaaactcgcctttaactttgctgttggcggacgcggtgcggatattcaggtgacaaccggtagctggaattttatgttcggtgacaatattcagtcgctgctggatattaatctgggatcgctgtttggcctgatgacccagcagtacacaacaacagggctggcgagaacgacattcacttatagtgttctctttaga

SEQ ID NO: 351 - DNA, 10941 bp, Xenorhabdus sp.
  CDS (4711)..(10941)
tagtgttttggatttaccgcgtcagctaaaaaataaattgttgcggagccttgcccgtgttgatgcggataccacgctgggggacatctttaatgtggattacaccgcggaaggccgcattatttcccgaaacggtcagcctgtggatggcgttgcggttatacaggagatgctggaggtcatcagcggctttagcagtgatcagttaaaggcgctgattgatccgcaaaccctgaaagattacatcaaagagcattcggcggcagatactgacgccctgaattctttccttgaaaatcacggtctgaaaacgaaagctcctgttgatgaccagcccaaacaggcggaagaacagccaagagataatgtacagtcagaacgcacagccggttttaactcatttaatctgccaaacctgtttgcaaccttattcagccagaaaaaacagcaggacatgcaaaatctggtcaccagcctgaaacagaacctgaccgcagatttactgaatatgcaggacaagacctttgatttcctgcgtaacagcggtcatctgcaaggtgacggtgatattcacgtttctctgggtaactataactttaactggggtggtgacggtaaagatatgggcgcttatctgggcgataacaacaacttctggggaggccgtggtgacgatgcgttctactcgctgggcacttcaaatgttttcaccggcggtgaaggtaatgatatgggcgttctgatgggacgggaaaacatgatgttcggtggagccggagatgatgttgccgtgttggctggccgtattaactacgcctatatgggcaagggtaacgatcaggtctttgcttttggtgaaggcggagtcattgaagggggagaagggcgtgactatatcgtggcctccggtaactttaaccgtatcgatagcggggaagggcaggattacgtcgttgccatcggtaacaacaatcaggtggaacttgcggaaggcaacgattttgcgacggtattcggcaatgagaaccggattgaaggtaatgaaggcaatgattccatcaaactgatgggttatcacgccctgatcaatagcggagaaggaaatgatcatctgatcgccgatgtggtttccaaattcagccagctcaatggcggtgacggtgatgatttgttggtactggggggatatcagaaccgctttacgggggggacaggtgtgaatagttttgtcgtcagcggtgatgtgattgataacatcgttgaggatattaaatccagcgacaaaattatcttcaataacctgaactggcagaacctttggttccagcgctgcggctatgacttgatactgctgacagcccgtcatgtcaccgatacctctgctcaggggcagtttgaagccaccggttcggtcacttttaatgattacttcaatggcaatcaggcggatattatcacccggataggggataaagatgcgaggggagaacgggaattcaccgccttatcaactcatgcggtagattcactggtgcaggccatgagtggatttgctccaacagtcggagacagtggttttatggattcccttgataaccagacaaaatcctcaattgtcacagcttggtcagatacaaccatcggcaaagacagactgatttgattttattgaatgaataaaacttgattcgcaataatggctcatattgagtgagccattattttttaaagataatattgactaatattttattattcatttttatcagcaaatcaattgttatttataaaaaataaaaggttgtgtgtttatatattttcttcttattttattcgtattaattaattttgtactttttatttttattggggttttcatggagaaatggcaatgttgaactagaatttaatgtagtgttttataagtgcgccaatttaaaaatccaccacgctatataccttttcataatagtgagagtatcagcatgcgatgttccttaccccgcgtggcacgcggggtaaggagtactcctatcattttgaaaaactatttagtccagttaaagagatgtgcttatctctcctattggagggggaatactctcgacggattacaatgaaaagtcagggtaataaaactccacgaattaaataatgtttatggggatggttctgtttttatcaaaataattatatatgatgcaccagtattatctgaagggttcttgaataagattattatattatcaggttatttatgatatcccgctggtcgcgctcactctctggtcttaattcaattaaaaaagaggacacccgggagctgtactatcagggagcaagccgggtggcggaaattcagcgggaaagcggcgcggttacgcggctggtgcaagcgggcagggcgcccgcagcgagtgtcacggctgatggcgtgcatttactgggcaccgacgggccgggcagtgtgctgttaagccgtcacaatgaccggacctcgcgttttcgctataccccgtacgggcagcaggcggcggcggacagtgacccggctttaccgggctataacggggagcggcaggatccgcttggcggcggctaccatctgggcaacggttaccgaacgtataacccggtcctgatgcggtttacggcgccggacagcctcagcccgttcggggccgggggactgaacccgtatgcgtactgcctgggcgatccgatcaaccggaccgatccgagtgggcacatcagtgtgggcagtattctgggaatagcgttaggtctgtttggaatggccgcggagctggcagcggtcattccgaccggcggggcatccctgacactgagcggtgcggtgctcgctggggccggttttttgggggccgcgactggactcgccagtagcctgaccgaggaaagtaacccacaggcctcgagcattttgggctgggtgtcaatgggggcgggagtggtgagtatggtgccactgtttgggaaactggctaggggcatgaaagcaatggtaacacaggtggggcgtagttttaatcgtagtccggctggaccagttatggagataatcggaccaacaatagaggagtcaccaagagggttgaatatggcagcacccttaccgcggccattaaacgcattagatgctttcgacaggactgtaagtgcgggatggattcaagaagtacaaacacatgtgcaaacaccatttattacacactcgttagagcttagtttgccccaacagggagtaccgagaataataggtaatacagaaaatccatttttgcaacttttgagctttgatacatcattgcccgttagtagaatgaataatgcggttcctaactcagttatacatgtagatattactatccctgttgcaagaacactttatgctccattcattaatgatagaacgggtcgagctggggtcggttttattaattacatacggcatgacataggtgtgcgtcaaatacttgcagcggagaataggataagaggaactcaacatatggtcgaatatcaacaatcagttattagtttaatggaagaaaactggaataatgtgagattgagtggcaatccgagagggttgatgcaggccatcatacaacatcagattccccaaatttggcggcaattttgtacatctggtctggatgtgtttgctttctataaccaacacatatttatttgatttacgaaatgattatatcgctattattaaatgaaactgatattcattattcaatgatgttattaattttcttagtcagcgtgtgaaaattttgctattcatctgtttttagggaattcagtatttataatagagacaataaaaaatattctggtgttattcatatgttgaaaaattatgatggtataagaatatgtaaatttaaaacagggatgtatcaatatataaagataatatatcgcttatttttcagaaaggttattttttatcggctatcattcacccctgtcgtcgtttttataaacatacggttatttatgtccctggagctcgttcttttactgtcgtgatccaataaatagcttttcaaaatgacaggactatttcttaccccgcgtggtacgcggggtaaggaacagggcgcgagcatactttgattaatatttgtacttaaaatgtcaatattgtttttttaactcttttgttaactataagtgtctaaagaactgtgatttagttcaattattacccgatataaaactataaaaatgatatatttaaaattattaatctttaaaaagcagtaaagatagtgtgctcgcgccctggggtaaggaacacctcatgctgatacactcactattatgaaaaggtatatagaaattcattttgtatataaatcagtcctgtttcatttgcattttaatgaggggattgggactaagtatagtggttaaacagactttgttatttcactatattgattttaaaaataaaaataggatacttttcagttgacaatttctgtctgactcttgaatttatttttctatgtctcaattcaataaattgactcgattaaatatcataaatttcaatttattcttggggtgctgttttttatctattcaaatcaaatgttgatgctcagttatttcctttaactgggcttttttgatcttcaattttcaaattcataccgggatttatttatgggaaaaccattttggagaagtgttgaatacttctttacaggtaattattccgctgatgatggtgataataacattgtggctattgggtttggtgggcaaattcatgcttatggtggtgatgaccacatcacactgggttcgataggtgcttctatttataccggagcaggtaatgatacggtagtcggtggctcagcctacctgaaaatcagtgataccagcggtaacttaaacgtaaagggtgccgttgggtacgctgaaattaataaagaagaagaaggttctatttcttttgcgggcgcggcgggtggtgctgttattcagcatgatggtcgttccggtaatatacattattcaggtgttgcggcttataacaatttatatcgtcgcgggtacagtggtgatatcacatttaagggcgcgggtggttataaccatctctattcagatgtggtcaacggcaatatccattttatgggtgccggaggttataaccaaatcacccgtaaaggtttaaatgacagctttaatggtgaagggattacctatgcaaaagctgaagagattgtattgacgacggcaactctgggcggaagctggagtcaaaaaacacagcatattgttggtattaaatccacacgtgaaataaatacttttttatttgctgctatcgatgataaatacaccaaaatcaataaagttcgtattcataatgaccccaaaactggccggctgaaatattatacgacctcttggcataaagcaggtaatcatctcaataatctggcatctcaggatatttctgatgcaggcggttaccagctggttaatgttgacggggtatataaattatcagatctgacagttgagcatcaccagtcatttacgatacacgcactggaaagtgaattatccgaagatgaatgggtgacctatgccggtggtgttcagattgcagcagaaaatattacgctgtcagatgcccggatgggggggcacgctgtttcaatggatggcagtacctttgatgtaaaacccgtgaaatccaaccaaatggcgaatacctatttatacgccaaattcgtggggggaattaccaaagttgtggtagttcaactggcgaatgatcctgcaacgggtgaactgaaatatattgctacaccgtggtacaaagccggtgatcaaacggcggttatggcaaatcaaactattggtacccgttctggctataaagtgatcggtaagggcagttatacgctgagtcatgttaattacagagtaaatactgttcgtgtgacgtctgaacggattagctctatgcatgagttcagtgagcgggagctgttagatcaaaaacaggatgacagtaatggtgatatccggttcgaaggcgcagggggcggcaatgttattaaatccaatgtggctcatggcaatgtttattttaagggagcgggcgttgcgaatgtcattctgcacaactcggaaatcggtgataccgaatttagcggtgctggcgcggcaaatgttattttcaagaagaacagaaagggaaacctgatttttaatggtgctggtattgcaaatgtcattactcatgtcagcaacactcacccgacacttgattcatcagcgggatcttacaatggtgataccagagttatcgcacatggaggcgctaatgtcctgacccgcaaaggtaatggccgggtcttttctgtgatggggggcggtgccaatgtactgactcatagcggaaatggcagaaccacaggtgtcatgatgggtggtgccaatattctgaccaaagtgggtaacggagaaaccaccggtttaatgtttggtctgggtaatgtcctgacccatgtgggtaacggcagaacactgggcgcgatgggcgctgtcggtaacgtctttaccaaagtgggtgacggggaaaccattgccgcgatgctcgctttcggtaatatttttacccataccggtcagggaaatgcatacgcaatgatggctggcggcggcaatgtctttaccaaagtggggaacggtgatgcgctggcactgatggtggcactgggtaatgtgttcactcacgtaggagatggcctgagtgttgccctgatggtagcgaaaggcaatcttgcgactaaggtggggaatggcgagagccttgctgccatgattggtgtgggtaatgtaatgacccatattggcaacggtaatacctttgccgcgatggtgggggaagccaatattttcaccaaagcgggtaatgaactgacagcggccgtgatgattggcaaggctaacatttatacccatgtgggtcagggcaccagtatcgggttgtttgccggtaatgccaatatcatgactaaagtcggtgatggcacgacgctggcagcaatgtttggtcaggctaacgtgatgactcatgctggcagcgggctgaccggcgtactggcattaggtgaagccaatgtggtgacgaaagtcggacatgagtttatgggcgttgtagccgcggctaaagccaacgtgataacccatgttggtcatggcgttactgccggtgtcttgctgggcaaggagaatatgctgactaaagtcggtaacgggacaacggtcggcctgcttgtttccaagttcggtaatattatgatccatgtcggcgatggtaataccgtaggttttgccaaaggctcgctgaatctgatgaccaaaatgggggacggtctggcagtcaatgccgcctggggtgatgccaatatcatgacccatgtgggagccggggatcactataactttgccagcgggaaagccaatctggtgaccaagatcggcgatggacgtgcggttagtgttgtacaaggctcggctaacattctgactcatgtaggtcatggtgatgattacaccggtgcgtggggtaaagcgaatgtgatcaccaaagtgggtaatggccgtcaggttacactggctaaaggcgatgcgaatattgtcacgcacgtaggtcagggtgacagctttaatgccctgtggagccagagtaacgttgtcaccaaagtgggtgatgggatgcagattaccgcggcaaagggtgaaagcaatatcacaaccagcgtggggaatggcctgagcgtggttgcggcccacggtgatttgaacataaataccaaagtggggaatggtatctcggttaatgtggcctggggtaagctcaatgtcagcaccaaagtgggtgacgggctgaatgtctcggtcatgaaaggcaccggcaatgccagtgttcatgttggtgacgggatgaatatccacgcttcctatgcccgcaataacgttgctattcaggtcggtaacggggatttctacaatctggcgctggcctccagcaatacggaaagccataaactggcgacactgttcggtaatatcaaacagacgttactgggagcgatgggcagtcagggaattaactttctggttcatggtgatgaagccaatacatcaggcagttatcgtgggcggggtgccatcaatttgccggaagtggatggtctgaaaggctttaaactgacggaaatcggtgaagtcagctccacgctttccgctgatctgcatgcctcggtgagccaactggaaacaccggatgtcagcaggctggaaaccatcatgaatgaagaggggcaatccgggaaaaatcagaagcctaacctgattatcaacggggattttgagaacggtactctgggctggcaagcaaccaacgggattgaagcccagcatccggcagcgtcttatgggctggatgacgcaggccacggcagatatgtgtctgaactggatgcacaggttaacaccaccatttatcaggatttgagccagcttaaagccggtgaggccattacccttgattttgattttgcccgccgagcagctagcaccgatgataacggtatagaagtgctctggaatggtcaggttgtcttctcatctgcgaacgatagtatcgcctggcagcataaacagctggtactacttgctcaggcgggcagtaaccgactggcgtttaaaggtatcggtaaagacgatggcaggggctatatactggataacatcgtggcgacgtcggatcgctcagataacagtcatgatggcgaacttgcatcaaaaaatgtcgtggctgaaagtgtattagccgataagagtagcgccgaagctgatcatgaacgtctggcgcaggaaaaagagcaacaactggcagcgattgcaggcactcagaatcagctggaatccacggattttgatgccctgaatacgaatggactggcacagcgcgatgttatccgggaagaacagcaggccgtgacggatgaactgctggcgaaggccaaagcgctggaacttttggatgaacagacccacgcacaccatcagggggaatccggagcacactggcgtcatgactttgccggtgaattactggataagcttcagacacaggtggacacgtcaaaagcaacagccggacaacaactggataacgcactgtctacggctttacagcaacagcagaagatcgaaaattcactggataaatcagaaatcaatgttgctaaatctaaacaagatcagctaaatgtcgggaaagatgttgcggatgcccgaatgaaggctgaataccggaaagaagaagcggaagcacagcaaaatcaggcggagcaggccaaacttagtgccggcaggacgcttcaggatattgaggctgaagccagtgaagttgcaaaaaataatggctatacaccacgttttagtaatgttggcagtaatcgatcaggtaaagcctatgaagcagaaaggattggggatacaaccagccacattaattccacgactttgatgcaggaagtcggggctttcagtaaaaagctacaggaatctgagagcgatttatctgcccttgccgatgctaaacaggctgtggagcgtttacagatcaatgcaggtcttcgtgctacacaggcaaattctacccatataccgcgctcaccgcgtacgcagcaattaccgcatagcaatgtttcacctgaatcagtgccggatatctctgtgccggagaacagaaaatccctgtctgtttctggtctggatctgagtggcctgaagcctctgggaaggtcagactcccgcggtagctccgtgcggagtaatttgtcgcaaaagagcagttcaacctatccgtttatcggagaaagagcggagaaagtcgcggaaatataccgttggctggatagtggacgcgatcagttaaatgatcatgcaaagagtaactatattcctgtaccgggtggtgtgcggcctaatgttgagattaatgacaacatcagggatagactgactgatttcattgagaatttcttcagtatcatccggcataccattcctaaagatcaaattgcgccgctggcgaagttgtttgttgattcaacccttgattttgactgggataagcgcgttcagttcatcactaaactggagcgttttggttatagctttgaacctaatcatggtgaaaaaagtatcgtttcattctggtcaggtcaggagttcagcatctaccgctctgtactggatgccgtgcagccagatgataaaaaagtggtttacgatattgatgtgaaagggaacgtacttgcccttgaactcaataagaagctgatggattggtgtaatacgtcccttgatcctgatgatttccaacaggaaagactgcacaccgccatcagtgaagcgacacggagtaatattggtttctggtgttctgtttatgcgacgggtgcgcgtgatgatgtttatgtcatcgcaccgagcggggtacgtttaggcaatttcttctggaatgttgagctgccggtattgcgtcagttacagcgtgaaggtctggtcaatgaaattcgcctgctggataaacacgcctatcattaccgtggaaaaccgctggagtctatagggcacagactgacagatccgggcgtccgggtgaaaatgcgctttgattcactgagtccggctgagcagatgagatatcttgagcaggatcctgatggttaccacgcgaatacactgattgatctggatattaaagtcagtgctattgatagcatgttaaatcaggctatcccattctatcgcctgcgcactgaccgcaatattttgatacgtgaaggc

SEQ ID NO: 352 - DNA, 23621 bp, Xenorhabdus sp.; identical to SEQ ID NO: 104
  CDS (2)..(12301)

SEQ ID NO: 353 - DNA, 26380 bp, Xenorhabdus sp.
  CDS (3)..(6467)
ccgcagatgccgggctgaaacaggtgatggcagcggtaaccaaagagtatggtcaggatgtcacgaatgctgttttcgccggtctggctgcccatgatcttgcgaaagatggcaaaggtattgatattgccggtctgaaaaaagttcatctggcgattgaacaacacttgtcccctgtcagtgccacactgtttgtctggcggccgagtgaaaacagtacgctgggccatgttgcaatgcagattggtcaggggcgtgttcaggttaatgcagaagatgcgactcatcttaatcaaatcaactatgtgagctggtggccggcagggaataaatcgacggatatacgggaactcctgaatatcgctaccccggatcagcctgatttgcgacttcgctggcatgatctgagccagcctgcttttcaggcacccaccctgacatttgatgttgaggccgaagaagatgatggctttggtctggcggatggctcagctgaactgaaagagttccttgaaaaactgaaaattgccaaaggcgtggatgttaaattcagtgatgtcagcgaaggatttgcgatggcggcgcttgccaatccggagctgctcaaatctgctgaaataccgcaatacatttatcgcccgtaccttgctcaatgggctgatcccggcatggatatgcatgaggtcggccgtaattttgcggaagctttacgtctggcagcgagactacagaattccagacggatggagaaagccattgccagtgttatgagccagtttgctgaaagagagctggcagagattgctaatttcaaaaacagcaccgttgaccctgatcgagtctatcgcatcaatctggaaggccttgatgtagcggcaatgcaggctgaatggggcaaaatcagcagtgatccggatgcccgctatcagcttatgacgcaaaactgttcaagtgttgttgcccgtattcttaaggctggtggggcggataaagtgcttggcaaagcatggcggccaggctttggtatctggacaccaagcgagctgtttgatttcggtcagtcattgcaggaagcgactcagagtgagcgggttaaacaaaaacatcaccgtcttgatactgcgttaaatcatggcggaaccggagagcaaccggaaagggcagagaaattagctattcctgatgatggctcagcaccgcatgaacgaacgccaaagaatcctgtaacccgcttcatgaacagtgaactgtacggcacaaaagaagagcgtcgccaaatcagtcaggagatgcagaacaggatcaacttagcaatcaatagtggtgtgaccgaaaaagttaccctgaaaggggaagccggacgtttggcaggctattaccataagggacaaaacacatcacagagggatacttcggataaaaaagtcgtcttgtttatccacggctccggttcatcggctgaagagcaggtgggtaaaattcagccgcattaccgacaacagggtattgatgtgttgtcggttaatatgcggggttatggcaccagcgacgggtatccgaatgaacagggaatgtatcaggatgtacgtaccatgttccattatctggttaatgaacgtgatatcagcccggaaaatatcattatccacggttattcgatgggagcaccggttgcggctgatctggcccgttatgtggatagtaaaggaatgtcgatttccggcttactgctggacagaccgatgccaagtatgaccaaagcgatcacggctcatggaataccgaatccttccggcctgaccggaatactggcaaaagccgttaatggtaaattctctgtggagcagaatctgcgcggggtctcgaagcagatgccggttatgttgctgacagataatgaaggtctgggcaatgaaggcgaaaaactccgaaccagactggtggcctctgattataacgtctctggtgaacacacgtattatagccatgcatccagttatcagataatggtgaaatatgccggacaaattgttgccaatttatctgaagccggttctcaagtacatgagcaggaaagcactattctcaaaggcatcaaaaatgatttgatgcgctacacgcaggcgctaaaacctcaggtggataatcagggtcgagagcaggatttgcgcgcgacaaaagccttcctgtcaggttatcggcataatcacgctaaccaaattgtggatggcttccattcggatatggatatcaggcagctggtggatatgctggttaaaggaaactggacggcggaacagaaaggtgcactggcgtgggaaattgaacatcgggcactgaaaatgactctgcgaccaaaagtagagaaatatagccgccttttccgtgatgtcacttctatgggggcggtagatgcaaaagccagcgaacatctggcgccacaactgctgttactcaacttgtctaatgatggttttggtgggcgttgtgtaccactgtcaaaactggttctgctggcaaaacagctggaaaatgacggtcaggaaaacgtaggacgtagcctgctgaataaaatgtactctgcggcttcagtgctcaacaatcccgaattatattccgagggtgaacaggccaacgccagtaagttactggggacactctctgcgctctatgccagagatccgatgctggatagcaccacgaaaatatggaaagagaaactgagcggtgaacaagcgctgagtgtacaaggtgtgattgaaaaaatcacggctgccaatgcagggaaaaacccgattctgctggagctgaatactctgggacacgcgatggcggcgtggtcaaaaggcagcggtgagaaccggacatacggcttctatgatcctaatgtcgggattgtcgaattctcctcggcagagaaattcagcgattacgtcacgcgtttcttcggtcagtccggtctgaacatggcaaaaagctacaacatggctaaaaaccgccagcgggaaagaatgttcgggcgggttgttgttctggatggagaggcactagcagcttatcgtccggtattcggtgacagaacaaccatgaaagatattctggcaatggaaatctttgatggctcaccgatgagaaatgcactgaacaggcttcatccgctgaataaccacgatctgagtgaatgggaagagatcgaggtgttgccgagattggaacgcaaaaaaatgcgttttgatggtcaggttattattcagcttgaagatgatccccatgtggctgattctgtctcttatctggcgggtaagcatccgaaagagagtgtgcttgtccagcttgatcgcaatggtcagtataaagtggtatatggcgatccgagtcagttgagcggcacaatacgctggcaggttgttggtcacggtggtgatgagattgatggctacaacagcacgacaatgagtgattacaaggctcctgaactggcaatgcggttaaagcagttccagaatagtttccagcatggcggaaagctggattatatcagtctggtcgggtgttctctgctcagtgatgacaagcgcgatggttttgcgtatcgcctgatttctgctcttgatgaaaatgggatccgcacgacagtctctgcccgtcgaaccgaagtagtgatcggtaaatcaggtcgtaaatatacgcggtctgagcacaataaagcggaaaataagatcacggaaaataaaatcgtcctgagctggaccgataaaggagaagtcgaaggcaatgccgaacgtatacgtaatcatgtttctgaaaacaacgtttcacttgtccgtgtaggcagtctacgtagtagcaccaatagccggaagcatcgcccgcatgaggtgatgacagagaagaatgcgattgcagacaataccgaaactttccatgcgccgaaaaaacatcagcatcaggattatccggtcgggacgtcttccgataaccgactgagctattccggcaatgtacagctacaggcgggtgatggcgaatttacctctattaactggggaaccaccaacgtgggtattaaagttggcacgggaggattcaagtcactggcgtttggcgataataatgtcatggttcatctgggagacggtgacagcaaacacagcgtgaatattgccggttatcaggcactggaaggcgcacaactgttcatcggtaaccggaatatcagctttaatcagggacgcagcaatgatttgctggttatgatggataaatccatcccgacaccaccgatgcttaacccgtttgataatgtttcccgcgtctcgggcattctgcaaaacattgccggctcgtacactacttctgactggttgtctgaacaggaagcacagtggacaaccgaaagcgtgaagaaatatctacaggatatgtcagggctggatatgaccagcagcgtggattacacatcgctgacagatcttgattctcagtataaacgcagcggtcgtggcctgaagagcgatattgaaagcacactgaacaagaaatataaccagtggctgagtggtgcagggaataaaccagaaatggctaacctgagcagagccaataaactccgccagctgaatgaaaaactggccttcaattttgctgttggcgggcagggtgcggatattcaggtaacaaccggtaactggaacctgatgttcggcgacaatattcactcgattctggatattaacctcggttcattgtttggcctgatgactcagcaatacacctcaacagggatagcaaaaactacattcacctttaatccggcggatttgcctcgtcagcttaaaaataagctgttgagaaaccttgccagcgtgaatgctgataccacactgggtgatatctttggcgtagactacaccgcagatgggactatcatctcccgaacaaatcagtcagtagacggtgttgccattttgcgggaaatgctggaggtgatcagtgaattcagtggtaaccagttgtcggcatttgttgatccggaaacattgctcaatggcctgaaaaccaatctgtcagccggcgcagacggtgtaagttcgttccttgaaagtcatggcatcaaagaaaaagccccgacagaacagattacatcggctgaaaataccagtgacgaaaatacacaatcagagcggacattcggctttaattcccttaatttgccaaacctgtttgcaaccctgctgaagcaggataagcaggaagagatgaaagatctggtttctaatctgaaacagaacctgactgatgatctgctgcatatgcaggaaaaaacctttgatttcctgcgtaccagcggtcatttgcaaggggatggagacatccatgtttccctcggtaactataactttaactggggcggagacggcaaagatctgggtgcttatctgggtgataacaacaacttctggggtggtcgtggtgatgatgtttattacgctctgggaacctccaatattttcactggcggtgaaggtaacgacacaggcgttctgatggggcgcgaaaacatcatgtttggtggtcagggcaatgacgttgccgtagttgcaggccgcataaattacgcttacatgggcgagggtgatgatcaggtctttgcctttggtgaaggcggggtcattgaaaccggtagagggcgtgactacattgttgcttccggtaacttcaaccgtattgacggtggagaaggtcaggattatgtcgttgctatcggtaacaataatcaggctgacctgggtgatgatcatgattttgctacggttttcggcaactataaccggatcgatggcggggcaggtaacgatgccataaaactaataggttaccatgcattgattagcggcggagcgggagatgatcatctgattgcggatgttatctccaagttcagccagtttgacggcggtgatggtgatgacttgctggtgctgggaggataccagaaccgctttaaaggcggtgctggcgtgaatagttatgttatcagcggagatgtgatcgataacgtggttgaagatctcaaacgcggtgacaagattgtcttcaatgaactcaactggcaggatctatggttccagcgcagcggttacgatttggtgatgctcactaaccgccatgtggaagacagttctgaacaggggcagtttgaagcaatcggctctgtgacctttacggattacttcaatggcaaccgtgcggatattgttacccgactgggcgataaaaatacccacggtgagcgtgaatataccgcgctttctgccaatgcagtggattcactggttcaggcaatgagcggctttgcaccaataatcggtgacagtggctttattgatgcactggatggacaaacacaatcttccattatgatggcctggtcggatacgacaacgggcaaatccagactggtttgatagttttatttaagtaataaaaatggctcacattagtgggccatttttatatcataatgaatagagaaatacggtatgatattaaaaagtttctggtaaattatttgttactattatagctatatcaaatcatcaacttttaataatgttattgatttttgttaaataaatttataaataatgacgatgtgttattttattaaaatgtagatatatatttggcccatccattcttacaggtcacattaactatgtgatcattgtttctggcatctattaatagattaagagctatttttttgttcatcagtgatttttccatctaatctgtttaattttatataatattccggctgattttttatagtaaaaaaaatagattgataatcatcaaaatataaaatagtgcctacgtatccctgtggtacagcaggatctccaggtggacaagaataataagcatagacagagccaatttggcatattaataaaaatacaataattttaaatatattattagacctcataatgttttccttgcttggttttaaaaaaacaacttggttgtgtgtgtttttaattatagcacttataccaatatgtcaatatttccgagaaagtgctttgtaattcattatacatttaaattttatttatttctttttttttaaaatacagggaagtgtgatgatttttttattttatttaatttaatgcttattaagcaatgatttctttaaatgaatatgatgtgaaagcctctttcactttctttttatgttttttattttcttaatgtatttatatttttttctaaaaatatgtttttaacaagacataattatggcttttatcatagaattgccacgctgaaatgacgttaaacgataccttgaggagtgatacaaagatgctagaaattgcccttgaagcagtaaatacaatcaaaaaacggactcaggatgcgtttgacggagccggacagtttgactacaaaccggatcgctccgttgtcactcaaactgatttaatgctggaaacagagattcgtaacatactggaaaaacgtagcccgggtgttcctattctgggagaagaatttgggctggatggcagtgataaattcgaatcaggctggattattgatcccattgacggaacaagggcatttttgtatggcgtacccttgtttagtacgttgctggcttttgtcgaaaatggtgaaccaaaacttggggtaatcagttttccggcaatttccaccgttgtttatgcttcacaaggggaagggtgctggatgagtgtggaaggcaagccgttacgccagcttaaagtgatggataactcaccaacatctgttaacaatgctgtgattgcagcttccggtatacacggttccggttatcatctggaaaatggcactgtggtttatgatctggatggggtagtgaaatctgcccgtgattttgtctttgttaatgattgctaccagcacacgatggtcgcagccggaaggttgcactgtgctattgatacaataatgaaaccgtgggatagcgcggcaattttgccctgtattaaagaagcgggtggtgatttttgtgcactggatggcagccggaaaagagctatgtttggtggcagtctggtttcggcctgtaattcagcattgctggatcaggtggtagagataatgaactcccgtgctgatacaaaaaattaaatgataattcctctgttttttacatttcctctttgttggctgtattcatttacgggcgcgatgaaactcgaaacccattagcgatatacgtaatgtaagagagaaaatcccggatgtggtactacatccggggctatgtggtttaatttttcagaatatgtgacagaatttgcagtgccttaccgaattgagcctccggtatcgtcagcgggtagaggaaacggatcacgttaccgtgagtaccgcagctcaataatagcagcccttcgcgtttagctcgagtttgtacttcgcgggtaaattctggtgagggtttaccggtttgtggatcgttaaattccactgcaaccatagaacccagtgcgcgaatttcggcgattgccgggcactgagtacgcgcttgtgccagtatttccaccagatgctgaccaagctgattagctcgttcgcacaactgctctttttcgatgatgttaagtactgcatgggcggctgccaccgccagtggattgcccgcataggtaccgccaagccctccgggtgccggtgcatccatcacttctgcacgtcccgttacgccggaaagcggcatccctcccgccagacttttcgccatcgtgatcaggtctgcttttacattgtggtgttccatcgcaaacagttttcccgtgcgggcgaagccagtttgtacttcgtcggcgattaacagaatgccatgctcatcgcacaatgtacgtagcgcctgcataaactcggtaggcgccatgttgaatccgccttcaccctgtactggctcaataataatggcggctacctgatccggtgcgatatcggctttgaaaatatgttccagacttgccagagcattatcgactgatacgctgtgaagcccgttcggatatttggcgtggtaaacggaaccggggaatgggccaaaaccgattttatacggtgctactttgcctgtgagcgccatcgtcataaaagtacggccatgaaagccaccactgaaagtaatcactcccggccgacgggtataagcgcgggcgatcttcacggcattttcgacagcttccgctccggtggtgaagaacgcggtttttgtcgggccgttgatcggtgccagcgcgttaatacgttctgccagtgtcacatagctttcataaggtacgatttgatatgcggtatgggtgaatgcttttagttgttgttcaattgcggatacgatttcagggtgacgatgacctgtattcagcacagcaatgccagccgcaaaatcgatgatttcgttaccttccacatcccacagagtagcattttccgccttttgcgcgaagtagtcactcagcacacctactccgcgtggagtagcattcagacgacgttgattcaactctgtatttttcatcaattattctcctgaaaatggcataaatttgtagggttactaggatagtgcggtgaccagccgttgcagtttttcctgaaacgtatgccggatagccagcgcttgttgtaatgtcacttgggtaaattttactttggcaccgggaggtaactgcccgagaatatccagatcgctgctgacgacggtgcccagtgtcatgtagccacctccggaaacggcatcccgatgtaagacaatgggggtacgccccgatggaatttgaatagaaccaatagggtagcaggcatccacaatattggagggatcagagcctgcgccaaacggcggtgtgcgctccacaaaatttagtggacgcccatccagaaagcggtaaccgatacgatcagattcagagctgatcctccattcatcactgaaaaaactgtcaacggattctgccgtcaggcgatggatatacataccgggaaccacccgaagttcggcatgtttatgaaattccggtttaaactcttccggcaggtgatgaccaacagggccttgcccacaatgcgccgttataggaagcgtatctccggcctgtaaccggcggccctgatatccacccagcgagccgaggctgtatgtggagcggcttcccagtaccagaggtacatcgataccacctgcgatggcaagataactacgggcacctaaagatgagccggttattttcagctgctgccctttttgcgccagcaggcaggtattaagggaaacgggctgcccatccagttgtatgcccattggtgccccgctgacagcaaaaacggtgtcctgctcaaagagcagttccggtcccatcagagtacactccaagcccgctgtatccggcgtgttccctaccagtagatttgcgactgccagcccaaaacgatccagcgtaccggaaggcggaatacctacgtgatagtagccttcccggccagcgtcctgtactgagcttgacagccccggtttcagcaccttaatgccatataacacctcaattgccatatagcacctcctgcaaatttgcagtgcaagattgtggatctgcttcaaaggccgcaaggtcaaactcaacaggacgaatacgcaatgcaaactcttctcgttcaacttgtgaaatagcctgatcatactcatcgcgattgataggcttgaactgaacgatatcgcctgtgcgaaaaaagaccatagaatctttaagataaggcagacgctgttgggtatcgtaaataggggctggagtcacgccaaagagctgataacccccagcaccccgtacagagtaaatgcagccgaagcatccgccgtgtcccagtgaaagctgtggggtatccgtacgggggatcagatatttaggtacctgaatttgttgttcctgttctaccatctggtacataaagggtaatccggcaacaaagccgaccatagaaacaaaccagggagcgccgctgtgctgggcgataaatgcatcaatatcagccaggccgttgattcgcgctgcgtattccagatcggtggagtgtggatcctggtggcgttcccgaaaacgcatcagggtttcatgcgtccagggatcattgtaaagcaccggaatttcgataatgcgcgtagagagtttttccccggtgttttcttgttccgctacggactgaactttctccagtaatgttaggggtggcagaatatccggattgaagcgtatctggcacgatgcatttgccagacaaatatcgaatatgcccggtaacgcaaggtttttaatcgcttttgttaacgacatactgcgaaaaaatgccttcagagacattgcttcgctgatttcaataaaaagatgttcgtcgccgccgaaggtgtagcgtaaatctgagtcagacatatcagcactcccctcatttaaatttacaccgtcatttgtgccgatgtggaggtgtaatcgtgatacctgcctgctgtaagcgggtggctattgcctgaagtaatgggagtgcgccgggggtatcgctatgcaggcagacagaggaaaattcaacgtcaatatcggctccttctacggtacggactttaccctcctgacaggctcgtaacactttatcagcgattatttcaggattgagcggcgcaacccggcgggtaaatacaatagagccactgagatcgtaatcacggtcagcgtagaactcacaaaccaccggatgaccgagtgtggtagcctcacgccagatagccgaaccatgcatgcagaatatggccagttcaggagcatgtttatgcagtgtagagacgaaataatgtgcagcatcgctgtcacgggccagatgcatatataaggcaccatgtggttttatatgccttagcggaaggttatacagcgcagaaaattcacgtaatgcaccgagctgatataacacatcgttggttaattcctgtggggtggtattgatatggcggcggccgaatccgacaagatcgcggaacccgggatgagcaccaatggacacacctttttggtgcgccagttccacggttttacgcataatgcagggatcgcccgcatgaaaaccggtggcaatattggctgagctgattaatgccataattgattcatccacattatcgccgatagtccacgggccgaagccttcgccaatgtctgagttgagatcgatgtttatcatagtcatgtgctcaaattgtgaactgaatgtcaaaaatataatatggtatgacaaaaagaagaaatttttttctgatgcccacgcgatagatattgaacccccattgagtatacacaatggatttcaaaatgcgtcgcggcggcaagggagttcatccccgggagcatagatagctatgtgactggggggaacgagtgcagccaacaaagaggcaacttgaaagacgaagtgtatataggccatgtgttcatttaagcaggcatatgatcttgctaaatattatggcaaacccgttggatatattaagaaattaatcagataggaataatgtcacggagtttacttttgtttttccgcataagggagcgcttttgaatgatctttattaagataaaatggtttcttatttaagaaaaatgggaaagtttatcgcaatatctcagtattagaagtatagccatggatttatattcttcatccttcaattttccattttattgggacaagttgaaagatgaagagaataactaactgatattaccggaagcggcaaacaatcgccgtttcatggcagttattctggtaagtatcccaaaaaccggctggttgcttatcaatgtcgctttgtagcaatatgggcttatgccattcaagctgtaaaccggcttttttactggcttctgcaaaatgctcacggctccagctatacatcgtaaaaggaaaagaggaattatgtgggggagccataaatttagctgtatagaacaggccttctccgtggggttcttcgctaagaatatcgcagagataattggtacagttaccttgtgctaaccgatagtcaggcgaaagtgtataagcaaccagtttccccgaaggggccaggttatcagcaatgacccggaacatgctttcaagttcttcaagtgatactgcatggcaaaatagccaggatgcgttaatgatgtcaaatttacccagtgattccattttgcagacatctctgacatgatattcgataccatcaccgtgttgttgagagatgttttttgcaatctcaagcatattagctgagatatcgacaccgataacttttgatgccccatggcttttgtaaagccggctaaaaagaccttgaccacaggctaaatctaatactgatttcccttgtatatcacctgccagttcaaggactgtcctgatccctatttcaatctgaggggctgcatctgaaaaactttcgtaaacaccggcaatagggtcatataattttttatcattcattatttacagtcctaaactaagataaaataaataagcagaaattctttgctgttttctaaaaaagaaatttactgttgttataatatttagtggttttcttttatgtgctttacattaatgtataagaactaaattttatataattatttttatgttatttgtgttttttttttggttaatgtaaaaataaaaccaagttttttaaattagggtatattttctattaatgatattcctaccccttttaggggaaatatcaacccttttaatatttgggttgatatatattttagtcaatgttgaaaaatgaagagattggtcgattgatattataggaatttacaaacaaacgcggcttcgtggcagttattctggtaagtgtcccaaaaacctgctggctggttatcaatatcactttgtgacagcatcggtttatgccattcaatctgtaaacccgctttatgacttgcctctgcgtgttgttcacggctccagctgtacattgtaaaaggcgcagggggaagaggaggattacgtgatggaaaggtaaattcggctttaaagagaagaccgcctctacagtgctcttcgctaagaatatcgcagagataattattacagttaccttttgttaaccggtagttaggctcaatagtgtaagcaattaatttaccggaaggtgccagattattagcaacagtgcggaacatcatttcaagttcttcgagtgagatagcattacaaaatagccaggatgcgttaatgatgtcaaatttacccagtgattccatgttgcagacatctctgacatgaaattcgataccatcaccatattgccgggacttgtttcttgcaatttcaatcatattagttgagatatcagcaccgacaacctttgatgccccacgacttttataaagccggctaaacaggccatagccacaggctaaatctaatactgattttccttgtatctcacctgccagctcaaaaaccgtcctgatttctacctctatctgcggagcagaatctgaaaatctttcataaacatcagcgatagcgttatatacgtttttttcattcattactttctgtccttaactaagataaaagaaacaaaactaaggtaaaaataagcggaattttttgctgttttataagaattaaatttgttagtgatataatatttgatgttttttttctgggttttaccttaatatataaatacccagtttaatatgattatttttatatcaggtatgttgttttaatggaacatgataaataaattggatattttattttaagtatattgttattctataataatatcgggtaagtttagtaaggatatcaacccatatatttcgctagactgatatcctatttttttattcagtgcctaaaaatcggtgaattgcccgtagtactgcttcaggtttctctgcatgaacccaatgaccggctcccgcgacaacccaggcagtggcttgtgggaattgattaataatatcctgacggtattcttccgtaatgtaatcggagttcccaccacgaataaataaagctggtttatgccatgccggaattgtttcccagccgataattttttcgtattctttttgcagtacgggcaggttaaatctccattccccctgacggaatgattttagtagaaatgggatcacgccatcttctttaatatcctcaagcatgatgtctgtagctgcctgccgggtttgcacacccgcttccgtcactttgtgcagtgccgcaaaaatactgtcatgacgccttgcctgataagcaaccggagctatatcaatcaccacgattttttcaatgcgctccggggcaattgctgtcatgctcatggcgatttttccccccatggaatgacctataatgatggcttttgctatatcgagttcgttaagaagggccagcacatcttgtgccatgtcacgataatccatattttccatgcggtgagaaataccgtgatttcgtacatcaatctgaatcaccggataattttgctgtaaatcacgccctaatattcctaagttgtttaaatcaccaaaaagcccatggataaggataatgggagtggaagacaacggattttcgggtttgtgtaaatgataatttaattgattgtttgacttcataatttgcctgagtttaatgacgttcatacaatgtttaatattgtagagtttaatatcatgacacatcagcagagacaaacaaaatgaggggatgtcggctgtaactgattgatttattttaggggaaaagtttctttcttttaaattctcaatttaagaaagaatcactttaagttattgaaagtttaattgttttgttttgttgcattatatcttataatctgaggataattttttcattaagaacagtactggatagaaatgaaaacgatagaagttgatgaagacctttaccgctttattgcaagccaaaccctgcatatcggtgaaagtgcatctgatattttacggcgcatactgaagttggacgccgggcagccagtacaaactacacagcctgccagtgaacctgtacccgtcaacaaaataccagctgtacgtccccgagatactgtccgcgttatacgtgaattactgctttccgatgaatatgctgaaaagaaaaaatccgttgagcgtttcatgttagtgttgtcgacgttgtatagtctggacagcgaaagtttcgccagaacaacagaagcaatgcatggtcgtacccgcacgtattttgccggtgatgaacatacactgctggccagcggtaagcaaaccaaacctcgccatatccccggcacacctttttgggtgatcaccaataccaatactgaccgtaaacgcagcatgattgaacaagttatgcaggatatgagtttgccggtaaatttgattgaaaaagtgtgtggcactatttaggttcggcgtttaggtttagtcagcagtctgctgtgaatcaataactctctaaaccgttcagcgtatctgttttatactgcactggcgattgtccggtgcagcctttcaggagaaataaagtggcgattcatcctagggcagggcaactggcccagcagcatgatctgatcaatgttgcactcctcacatcacagtattacaccttacaacccaatcccgaaaatccggctcataaagtcaaatttggtacttccggtcatcgtggcagtgccgggcgtaatagctttaacgaagcgcatattctggcaatttctcaggcgattgtagaagtacgtaagcaatatgatattactggcccgtgttatatcgggaaagatacacatgcactttctgaagccgcttttatttccgtgctggaagtactgacagcgaatggtgttgatgtggtcgtgcaggagaataatggttttacgccaacgcctgctatttcacatgctattttgtcttataaccgtcagggaaaaaatctggcggatggcattgtgattaccccttcccataatccaccagaagatggtggtattaaatataatccgcctaatggtggcccggccgatacggatctgacttccgttattgaaaatcgggcgaatgaattgttggccggtaatctgaaaggcgttaaacgtcagtcttacgaacaggcattaaaaagtgaatatctgcaccctcaggatttagttgatccttatgtcaccgcgctgggtgaggttgtcgatatggccgcgattcagaaagcgggtctgaaaatcgggattgatcccttgggtggctcaggtattgcttactggcagcgtattggtgagtactataatctcgatctgacgctggtgaatgataacattgatcagactttccgtttcatgacgctggatcgtgatggtgtgatccggatggattgttcatcccgctgggcgatggccgggttgctggagttgcgggataaattcgatttggcattcgccaatgatcctgattatgaccgccacggcatcattaccccagccggcctgatgaatcctaaccattatctggcgacagcagtggattatctgtttcgtcatcgtccgcaatggtctgagaaagtggccgtgggtaagacgctggtttccagtgccatgatcgatcgggttgtggctgatctggggcgtgaactggtggaagttcctgtcgggtttaaatggtttgttgacggactatataaaggtgaactgggctttggtggagaagaaagcgcgggcgcatctttcctgcgttttgatggtactccgtggtcaacagataaagacggcatcattctttgcctgcttgcagcggaaatgatggcagtgaccggtgaaaatccacaacagcgctatgacaaattggcggcccgttttggtacaccgagttatagccgtcttcaggctccggcaagtcatcagcagaaagcacagttagctaagctgtcaccggaaatggtgaaagctgacactctggcaggtgatcctattacggctcgcctgacaactgcttccggtaatggtgcttccattggcggcctaaaggtaatgagtgataatggctggtttgcggcgcgcccttcaggtacagaagaagcatataaaatttattgcgagagtttcctgggtgcagaacaccgtgaaaaaatcgagcaggaagctcaggaattgttaaccaagtatttgctgcgggttaattagcgctgaatactgatgaaaaaagccgccgattttgctgcggctttttgttaaaacaaacattattgatgtatgcatgtgttatagatttctttaaggcaaaattggtatttcttaggatgcctgatatgtttcttacatatagtgtgtgcacgttcctgacattgttccggcgtattagataaccctgatggtgctgcatgtgtactccatgatgttaataccagaatggtggtacatagcgataggggtactagctgcttcatatggttatctccttattatttaatctctcagggtttaattccccgtcgcttgcgacgagcaaataagagttgaacgatgcgaagcgggtgatttcatatcggaataccccgctgcttgcggcggggatgtttatttggatctgcacgtcatttttctcgattatcattggtggaacaaaggggaagggaaaaatggaaactggctccgcctttctcattatttgtcgcccatatttttccattatgaatttcaataatgtgataacaaattgttagtcctaacccggaattcatggccgtgggtttgcgatgtttgcgggggatacgtgagaatttatcaaaaatggatttttcctttccgcccggtaatcctgagccggtatcccagacttcgatattgaccttttctttttcaattgttgccctgatgcccagttctgaacctttctctgtatatttgatggcattttccagtaggttgataaagacacgctctaataaagaggcatcgcactgtagggacaaatcagcaggcagggaaagatctatcttataacggcttaaggcataatcgagtgagcgtaaagcgttatcaatgatttcttgcagtgaataacagccaaaattgggctgaaggctacctgattggatacgcacgatatccagcatgttattcaccagatgtgaaatattaaggatttgctgatgaatatgctgaaattgtttagcgtgctgagagtttgtaacggacaaattctgtctgagtacttctgtttgttcagacaggcgggtcaatggtgtcagcaaatcatgtgacagcgcagtcataaatgaattacgtaattgttcccattcactctccaacttggcggattctgcaccacgggccagatgtaagcgctccagcgcgttagcaataattccggtaaaaatctgtagtaaacgttgttgctcaggcaccaatagctggcggggatttgatgattcaatcgcaaggacagcaaaaatttgtgatggcgtagcgatgggaattaactgataaggcacgcccggcagagtatccgttcctgctcccgcaggttgttttttatcaaaacaccatttggcgatggcttcatcaactaacatctgcccaccattgtaggctttcacctgataaagatgattattgccatccggcagtaataaccctatttttgcctgaaagctattggataaaaaatggtaactgatgcgggcaacgtcttcttcattcagtgcccggccgagttcacgggtgatttcatataaatgccgtgtccgctgttccctataacgcgcaattctggcttgataacgtattcctgcggtcagatttccgacgacaacccccacgatcagcatgaccgtaaaggtaagcagatattgcatatcattaacggccagtgacaggtggggtttgacaaaaaagatatcgaaactggcaacattgatgaaagcagaaaatactgagggccagcgcccgtaaaataacgcaataacaacaacgcccagtagataaagggtgatcaggttggccttatcgagagggaataaaacggtacgggaaaataaggtaataaaggtacacagtataatggcgatcatgaacccctgaagctggtttatccacttgtcactggataatcgttgctcagccggctctttgatccagtgctgttttttatcttcaagggcaataataatgatgtccagatcggggccaagtttacctaaacgtccgacaaaatcagaacgccatcgatggctaaagagggtggaatataaactatggtagcgcccgacgatgatttttccgaggttgtgttctctggcgtagcgaaggatggctttttctttatgaggctctgaaagtgtggctgtttctgctccgagttcctgtgccagcatcaatgtttttaaaatagttcgacgtttgatttccggcaaccggtgtaatttaggcgtttcaacataaacagcatgccaggtacagtccagtttcgctgcaagccgggccgccttgcggatcaatttttcattaccatgattatcgccgatacataacagcaggttatcccgcgtatgccagacaggctctttcccccgtgtatcgcggaaagcgcgcatctgatcatccacacgatctgcggtacggcgcaaggccagttcacgcagggcgatcaggtttcctttacggaaaaaatgttcaatagcccgttcagcctgagccggaatataaactttaccttcgtgaagccgctggcgcagatcatcgggtggaagatccactaaaacaacatcgtcggcattatcaaagatatgatcgggaatagtttctctcacccggataccggtaataccaccgacaatatcattcaggctttccagatgctgtacgttaatggtagtcaggacatcaatcccggcttccagcagttcttccacatcctgccagcgtttgggatgccgacaacccttcggattactgtaggctaattcatccatcaggatgatggcaggatgacgggcaatagctgcatcaatatcaaataccgggactctgcgttgagccgagtagatatattttggcggcaactgtggaaggccttttaatagtgccgcggtttcctgccgtccgtgggtttcaacgacgccgacaataatatccagcccctgagccagcagacgttgagcttcctgtaacatggcgtaggtttttcctactccggcacaggccccgaagaaaattttcagtttgccccgtggtttttcatttgccagcgtcagcaaattgtctgggtcaggacgttgtggttctgtctcagtcatcgttatttgccttgtgctcgctggttatctaacgccagattgagtttcagtacgttgacaacaggctgacctaaataatgtattggcggaaattcgatgttctcctcaatcagcttattgattaaatctaccggcaggtgccgggctgtagcaatacgatgagcctgaaatgcagcagcttcaggtgaaatatggggatcaaggccactaccggatgcggtgactaaatcgacaggaataggatgattttccgggtgattaaataggcgtattttaataatgcgctgttgtattttctggaataaaagcgggttagttggtgcgagattacttcccccggatgactgtgcattataaggctgttcagccgtcattgaaggacgtccatgaaaatagttcgctttggtaaattcctgaccgattaattctgaaccgagcaactcaccatcctgttcaatgagtgaacctgtcgcctgatggtgaaacaaggttgtggacaggccagtgatcagcagcggatatgcgatcccggtgatcagagtgagaaatatcaacagaacaatggaagaacgtaaccaagtcatttttttcaccttacctgatagtcaaatcctgagaggatgatgatctatttaaagcctaatacagtgagtagcatatcgatcagtttgatcgctgcaaaaggcatcagcaaaccccccagaccatatatccataaattacgtctcagaagtgagagagcattcatcggacgatagctgatacctttcagagcgagtggcagtaaaaaaataatgataagcgcattgaaaataaccgctgacagcactgctgattgcggtgaatggaggtgcatgatattcagcgcattaagttgcggataagtgacagcgaatgcggctggaataatggcgaaatatttagcaatgtcattggcaatgctaaatgtggttaaagagcctctggtcattagcatttgtttaccaatacgcaccacttcaattaatttcgtgggattggaatccagatccaccatattaccggcctcttttgcggcctgagttcctgaattcatggcaacggccacatcagcctgagccagtgcgggagcatcgtttgttccatcgccggtcatggcaaccagacgcccttcagattgatactggcggatcaaagtcagttttgcttcgggtgtcgcttccgccagaaaatcatcgacaccggcttcagcagcaatggccgcggctgtgagatggttatcaccggtgatcatcaccgttttgatccccattctgcgcatttcactgaaacgctccttaataccgcccttaataatatctttcagggcaacgacacccaaaacccgctgattttccgcgacaaccagcggtgttccccctttgcttgcaacctgttgtaccaacagattaatggcttcagggaactggctgcggttggcttcaatatggcgtcggatggcatcaacagcacctttacggatcatgcgatcgttgatgttgactccgctcatgcgggtcatggcagaaaaaggaacaaatgtagcatttaatgtacgcagatcacgttcacgcatattgaagcgctgttttgccagaatgacgatactgcgaccttccggtgtttcatctgccagagaagaaagctgtgctgcatcagccagttgccgttctgtaacaccgggagcgggcagaaactgagaggcctgacgatttcccaatgtaattgtcccggttttatccagtaacagcacatcgacatcacctgcggcttcaatggcacgtccgctggtggcaatgacattggcttccagcatgcggctcattcctgccacaccaatagcagaaagcagcccgccaatagtggtgggaattaaacacactaaaagtgcaatcagaacggtaactgtgataggtgcaccagtgtggttggcttcaatactgaatagggaaaaagggagtaagctggcacaggttagcaggaaaatgatggtgagcgcggtaagtaaaatggtcagggcaatttcattcggggttttccgccgcttggctccttcaaccattgagatcatccgatcgaggaaggtttctcccggattgacggaacactccacgattaaccagtctgacagtacttgggtgcctcctgtcacggaagaaaaatcaccgccggattcccgtatcactggtgctgactcgccggtaatggcgctttcattaactgatgcaccaccttcaaggacttcgccatcgcaggggataatttcacccgcttctataagtacaatatcgcctttgcgtaaacaatcggaagtgactttttcttttgccgcatcgcggctgggggatgaaagcctgattgcccatgttgtttttttgacacctttcagactggaggcctgagcttgactacgtccttctgccagcgcttctgcaaaattggcaaacaatacagtgaaccataaccataaagcaatggagccggtaaagagggcatcacccgtagtttggccggtcaggatactgagccataataaggtggccaaacagctaccgaggtaaacgacaaacataaccggattatgccattggacggcaggatgacatttttttactgaatcgataattgcctgacgaactagtccggattcaaataatgcctgctttttatttctcatcacttatctcacaatttatttcacaacttcacttattgtgatagttgccaaagctgtaaatgctctgcgataggaccaagagccagtgcgggtatgaaagtgagtgctccaatcaataagatgactaaaatcaataagccaatgaataatgtggtgtgagtgggcagggtaccgttgctgataggctgccgttttttactgctcatcgatccggcgatggacagtacaggcagaatgatgccaaatcggccgaggagcatgatggtgcctaaaagcagattgtaaaatacactgttagcggccagaccggcaaaagcactgccattgttattagccgcagatgtcacagcatagagtatttcggtgaaaccatgtgcccctgggtttgtcacggcgtttcttcctgcctcgaatgaaactgacagtgcggttcccagtagaataagggaaggagtgaccagaatcgccaatgcgaccattttcatttcatgaacatcaatttttttacccagatactcgggagcacggccaatcatcaggccggcaataaagacagccagtaggacaaatagcaatatgccataaatcccggcacctacaccgccaaagacgacttcgccgatttgcatgagccagagtggtatcatgcctcccagtgctgtaaaggaatcatgcatggaattaaccgctccgcaggaggctgaagtggtgactacgccatagagggaggaggcaagaataccaaagcgggattcctttccttccatattgatattgctgttaatgcctgatggcatgaaatgggggttacccatagtttcagcgcacatcacgatggcaacagaaatcacaaaaataatccccattgcccataacagggagtacccttgccgattgtctccaacaaccagaccaaaggcgaaacacaacgcactggggatcaaaaagatggaaatcatctgtacgaaattactgatcgtattaggattttcaaaaggatgagctgaattagcgccaaatacaccacctccatttgttcctaatattttgatggcttcttgagaggcgacaggtcccatcggaagtaattgctgatggccttcaagggtgtgaacagaaatatatggagagaaattttggatcacgccctgactggcaaggatcaacgcgataatgatcgccagaggaagtagcagatagagtgtaatgcgggtaatatcaatccaggcatttcccagagttttcacaccttgtcgggaaaatgcccgtatcagtgcaaaagcgatggcaatacccgttgcagcagacaggaaattttgtacggttaacccagccatctggctcaggtaactgagggtattctcgccactgtaggcctgccagttcgtgttggtgacaaagctgatggctgtattgagagctaaatcccatttcataccagcaaaatgctggggattgagaggcagatatttttggcttatcaataggataaatagtaataataaccctgcaaggttaaaggcaataatagcaaatgaatattgccaccagttcatttctttaacattgtcacccggtttttttaagccacaacaacgccataaaatcatttcggtattggtgagccgatgaggtaaatcgccctcaatgagatttgcgattaaatgtccaagaggtttacttaatataaatagtaataataagaaagtagcgacaagtaaaaaagcagaggtttccatctagaaatcctccgcattcaataatgcataaaccagatagaaaagtaataacactaccagaatagcgccaataataagtaagttattcactatttatctccttgttacttcttaataacaaaccggattagaataaaatgaccaatcaagaagtgataaaaagagaacctgaaagcacaaagtaaatataagtaatactgattaattggactcagtgaaaagtaagtttagcaaaacctgacaggttaattttatgtttttaatatgttggttttgtttctgtttagatcgtttatttgtaataaaattacgctaagataaaaaaacagtgattttaagcagtaaaaaagtggtcggatcagtagtaaattttcattttatcgagtaaaatttgtcaggtcttacagttattaagttattgcccatttgaggaggtctctatgtatcgtgaatattcccggcatcaggttctcttgcggcgcattggtgccgtcgcattaggcgttagtgcacctttaaa

SEQ ID NO: 354 - DNA, 719 bp, Xenorhabdus sp.
  CDS (339)..(653)
  unsure (1)..(719): unsure at all n locations
nnnnnnnnnnnnnnnnnnnnnnnnnnnnnnnnnnnnnnnnnnnnnnnnnnnnnnnnnnnnnnnnnnnnnnnnnnnnnnnnnnnnnnnnnnnnnnnnnnnnnnnnnnnnnnnnnnnnnnnnnnnnnnnnnnnnnnnnnnnnnnnnnnnnnnnnnnnnnnnnnnnnnnnnnnnnnnnnnnnnnnnnnnnnnnnnnnnnnnnnnnnnnnnnnnnnaaaaaggtaagtataatattttgttagtgaatagtgatttcaaacaagggtctggggagtatgttatgcaatcaggggattgaagtttaataagcatgtgtgtattagggttgaaagatattagagcatggtgagcgggttagtaaaattgttgtggatattaattgcagtatgtttgagaatatggatggattggttgaggttgatatgattagagtcagtattgagtacaccatgtgctctggtgtgtctgtggagtatataatagatgtgttatggaagggggagttggtttttgcattttgggtggatgaggccggtatagaggtatggaaagttaggaagttccccctgattgcacagggagccagtaagtggttggagtttatgggttttggtatgagtaataaaataggatttgtggtggatgatgtcagcgcccgctttatatggtcannnnnnnnnnnnnnnnnnnnnnnnnnnnnnnnnnnnnnnnnnnnnnnnnnn

SEQ ID NO: 355 - DNA, 2304 bp, Xenorhabdus sp.
  CDS (2091)..(2303)
ctactgttgagataccatgggcagtcggttacggtcacacaaaagatgttaagccggggcatgttatcaccgaacagcaggccgaagcattggggggtgatgaccttaagcctattatatcacccttgaatcagccgtgaaggtaccactgactcaggatcagtttgatgccctgtgctcgtttatcttcaattgcggtgcacgtatgtcgtctccaaaacaaagatagatattactcaccctactcatggcgcaaaaataacaactctcccttttacgattgaaggagcgggggaagagaatgcgaatgtatacatcaaagggtttggtaatgctaaagattgtattaccactgttgatgaatcaggtaaatggtcttgtgggccttatcacccggaagagggaaaatatactgtatccgcacagcagttcattgatgatatacaaaagtcacattcatctgttgatttcgaagtccagactaacacgactaaatcagttgctatcacgcgaccacataacgggggcttatataagtacctcacaaatatcctggccacgggtaccggagtaccgggaacactagtatgtctggatacaaaagagttgtcgcaggtttgtcagcatggcatcactgtggatgataaggggcattggcaaggaattagcgggttagatacctccgtcaaaggagaaaaaaaattggtagcaacagcctttttggataagttgaagcaatccacagcaaaagtggcattttatgtaggagaagatgcactaacagtacagtctcctaaagaagacgaagttataaaagccccttcatatacttttagtggcacgatgcaggagaatattaactcagtgacagttaaagcattcgctggtcatgatgagtgctccgcgaagctcaataaacataactatacatggacatgcgggctttatagttctgtgccgggagattatcatgtgacggtggtggatgatgccggctcccatgttaatcggagttttaaagtgcgctatggggataatttgcaaatgcgcatactggcacctgaagaaggggagcaaatcacaactccaacctataccatcaccggtaaaggacaggccggtgctcttatcaccgtacatatttcagacacactggttgcggacacgctgagttgtagtgtttatgttgatgaatatcagagttggtcttgtccggtaatggaatcaattccgggctcatataagctcaaggcccagcaatgggtagataatatggcatcaggtaagcctgtaatacgcaattttgatgtgatctatatgcgcgatattacgattaatcctacggcagctcctatatgtacagccccagatgaaacgatttctattccaattacaggaacagcaacaaagggtgctgatatttctttatcggtaggtgacaatgcctataaatgcggtcctgtacaagtttcaacaacggatggttcatggaactgtactctggagaatgtaacgccgggaaggtatcaggtaaaagcgaagcagactattacagtgaatggtcatatccatgaaaatgagaaagtagattatgtgaatgcggctattttgagtatctcccaaccagtagatgggggaattttttctacatatagttcttcaatagatatgcttatagggggatattcacaaccgaaaatggaagtatcatatgatatcctggattatggaaggagttataggtgtcatagcgctagcgaaacaatgatatcaggaaatgttggtgcaggtagcataactgctgatgataaggggtactggagttttgatgtaaaccttaaacatttaggttggtacaaattaacagtttctagttctggaacattttgtgggaaacccattcagacagaaagcaagttttgttatcgtctatatatgaaataaagacttcatctttttattgctacgatttgataaaaatagatacagtgaatagacatgctatttcaaccctatcggaccctgtttctaaatttgtgtaattgcctgtttttgatatgtttaatttatcaactaatacaggtgaaaagatggacgagaaacagttacaagccctggctactgagctggctaaaaatctcaaaacgcccgaagatttaagtcagctctcccgtttcctcaaaaaactgaccgttgaaaccgcccttcaggccgaactggccgcgcatctgggccatgaaaaacaccatcccaaaacaggttctaatacccgcaatggctactccgctaaaacgctactgactg

SEQ ID NO: 356 - DNA, 1676 bp, Xenorhabdus sp.; identical to SEQ ID NO: 308
  CDS (1216)..(1515)

SEQ ID NO: 357 - DNA, 1795 bp, Xenorhabdus sp.
  CDS (1)..(591)
aggggcgaagttctggctgggcgtactgacagacctccatatcggggactgaaagatatttttatcgcgtgtgtggacggattaaaagggtttccagaggcgattaacaccgtttacccgcagacacgggtgcagatgtgtattgtccacatgatacgtaataacctgcgctatgtatcctggaaagaggccaaagcggttgttaaagatctcaagcagatttatcaagccccgacagaagaaatggctttgcaggctttggacgcttttgctgaacaatgggatgagcgttatcctcaaatcagccggagctggcaagaaaactggggcaatctgtccacgttctttgcctatcccgctgaaattcggaaagtgatttacacgacaaatgcgatagaatcgctcaacagcgtcattcggcatgcgatcaagaaacgcaaaatattcccgtcggatgattcggtgaaaaaggtgatctggttagcgattcaagcagcgtctaaaaaatggactatgcctatccaagattggcgtcttgcgatgagtcgttttatgattgaatttggtgaccgtttagacggtcatgtttaattggaaatggcgattacacaaaatcttaaacaaggtcccctatcgaacctgatacgattatcatagttcgatagggtttctcttttccatctaaataacgaagtctattcggtatttagcccctgcaacgccatcactgtggtatcattcccgctttgtacgtcatatcgcctgatagctgatagacagtgcgcctgcttttcatccaacacacaggtaaagaacaatgactgaagccatcagtgaaatgacaaaacgctatgatctacatagtcatacgactgcttcagacggcgttttatcacctgatcagctcgtggacagagcgatttccatgggcattcatgtactggcaattacggatcacgatacaacagcaggtattccggcagctttaaaccatattaggcagaatgagttgcctatgaaattaatctccggcgttgaaatttcaacgttatggcaaaatatggaaattcatattgttgggttaaatgttgatattaactccgttgccttaaaatcattcctgtctaatcaggttaatttaagaaaagagcgtggcattgaaatcgggcatcggttagctaaagctggtattcccggtgcttgggaaggtgcatcccggctagccaatggtgggcaggtcactcgcgggcacttcgcccgttatctgattgaagtgggaattgagccgacaatccagcgggttttcaaaaaatatctggcgaaaggaaaaatcggttatgttccgcctcaatggtgtacaatcgagcaggcagttgaaaccattcatcaggccggaggacaggcagtgattgctcatcccggtagatatggtttgtcaatgaaatggctgaaacgcttgattatctggtttaaacaacatggtggtgatgcaatggaagttgcacaatgccaacaagcacctaatgaaaggcaacaacttggtcaactggcaagagaatatgggctgaaagtatcattagggtctgattttcaccagccttgttcatggatagaactcggtcgtaatttgtggttacccggtgatgttgtaccgatatggcacgattggtcacagagcggagctgcatagaagtagaggttattgttatgagccagtttttttatatccaccctgacaatccacagatgcgtcttattgaccagagtgtggaagtactaaaaagggcggagttgt

SEQ ID NO: 358 - DNA, 2232 bp, Xenorhabdus sp.; identical to SEQ ID NO: 311
  CDS (12)..(329)

SEQ ID NO: 359 - DNA, 2616 bp, Xenorhabdus sp.
  CDS (2)..(475)
tgctcgagccatgtgctctaaagtatttacggataaggtgaccggcagtagcctggatcgagaaggtctccaaatgcttcggctaaagattgaagaaggggatgttattctggtgaaaaagctggatcggcttggtcgtgatactgccgatatgattcagctgatcaaagaatttgatgagaggggagtcgccatacgttttctggatgatgggatcagcacagaagggacaatgggcaagatggtggtcaccattttatctgcggttgctcaggcagaacgccaacgaatactggagcgaacaaacgaaggccgtctggaggctaaagctaaaggggttaaatttggccgtaaacccacaatagacaaagctcaagttcgccatcttcatgaacaaggtatcggagcaacaaacatatcgagacaattaaaaatagcgcgtgctacagtctataaaatcctcgctacggtgtaacggtactcagaatcgtcacttttgggggttcttcggcggaacccgactgtgtctccgccagaagcatgttcgagtacaggcccatgcacattatctgccgatggtgaagaaacctatacttataccgcttatattgtcgatcaggatggcaagcccgctcctaaaggtcagaaaatctctaacgtcaaatggagcaaaaataataatactcaggggctgatattcacacataaggatggcgaggatacaaccgggtcaggtggtacgctgactgcaacattgaagagtactgcaattgcagacaatgtagctatttttctggcggtagaagagcaaaaatcacctgtgaaagcaaaagatgaagtatcttttattgcgccttatatcctgacacttgatgttgaaccgaaaacgcctccgaaatctgaaggtaaggcaaataagtatacatttacagcaacagtgaagcgtgtaaaaaataataaaccacagcaagaacaagatgtgccaataatctggagcgcgatattagacaaaacctcattaccggtaaaagatcctcatctgtttacaaaacaaaatgataaaactaattcgcaagggcaggctaaatttacgatgtacagtgataagggggggtttgataatatcatcgttactgcattaatggataaaaattacctttttgagcctaatgataagaataaaccgataacagtgagtatcttgacaatacctaaaaacgaagaagatatcttgcttttgccttataactttaatggtcatcaacaggctcaatctggagaaataaaaacacaaagcatctccacacgtgacttaaattttggttggaataaattaaagtttctaactatagtccgcaataatactgatgttcaaggtgctacgccctacttttatccagatgataataataaaatagttgctcatcaggctacagcgaataaagaagcatatttggaggtaacaaaaacagatagaattaatgccaaactacaaagccggtggaatttcccctcaggtcgttatcttttataccagacaactatcaatatggattttatggtatttcctgatcctggaggtaatggtggacgtacagtaggagctcaacggattacccctgttacacattgtacggaatttcaagatgtgaaagacacggatatgagtcaaggtattagagacagcatgctgtctaaaaaagtagatttgaaatttgcaggattattaggaagtaattccaatttttcagtatataattacatcggtcttgatggcgctaattctacctatacgcagacatacccgatagcacctgttagtgagaatgtagagaatgtgtatattatgctctgcaaaaaataatgggattgatgtttatgtcatctgtattactgatatttgacgtcaaaaataaatttggcgtcaatcttttaaaactcactcctatatttacttctatagtgataaatttagattttgtcgcattaatgacagtagtttgagtaaaggaaatctgcttattaattaggctgtaaaatgatataacattgctgcgatcgataaaaccttctctggccatgttgatccatcgcctttttgattccaccccacagagtaaggtggaatatccgcaccgatattatttatttcatgaatagtaatcaaattattagtctttaattactccctcctagagcaacagtatcgataagtcctgtccatacctttgacttttctttcttattagtaatatagtaaataagataaatatgccctgcatgaccatcactgcttgcaccccaatttcttaaaaatgctggtaggatagaattctctaatttattatcatgaacatcgccattatttatcctcttcttttctattaaatttttatttaaaggaggaagtggagcacctgtgtcaggatcataaccattaattttgatattcactgaaattgtatcacctatttgtggctggttctcaccaccaatagatatataatacttcaatccgccatcaatattatctgcgttaacataataatcattattatcattaatgccattatcataatcagagataggctctccatcactaccaataactaaaac

SEQ ID NO: 360 - DNA, 3502 bp, Xenorhabdus sp.
  CDS (3176)..(3502)
tcagttaaaataggcgtgaagactaagcgccagaaggctggctgggataatggctatatgatgaaaatcctgacagtgggattttcatctgtataaattagacccgtttgccctcccagaacaatacgtgaataatcctctttaaaaaccacatcaaggatataatgcaggctattctcaatccgccaatgctggcgaatgtagtgtcctaataacttatgtcggggaggcaatgaactgatatagtaggacgtctctactgtgcctttgccgttttctgaccgatgccgttcgaccgcaatgatactgcgaatggttggccatttttctgccatttcaggtgtaaattgaggtttgagctggaacacatagcgctcttcccgacgtccatgcgcttcttgcttaacttcagtgacaatctgttctttacctgcatcaaacaccgattgaaattgtgactggacagcagcccataacttaggctgatttttcttcacctgaacaaccgcatacgctttcttttcactgattttttccagtgtttcacgctgacaatgcagggcatccagtgtcacaatactgcccttcagattaaggatatccagcatttgacgaacaacctggatttcaccgttttttgtagcggtggctttctggctcaacactaatcctcgttcagtgtcatacgctgtgaccagctggatagcatttttcttttcattccggtaggcccgcctcaggactttgccatcaaaggcgatgacggatttaccgcccagttcacgctgttcattaacccaattcagtaacgcttccagtaaagaatccaactcgatagcccgcagtattcttgcaatggtatgtcgacaggggattccatgggaaaaagtccggtattcctttaaccacttaattttggcttggccataagtctcaatgtcttgccagccttcagttcccgccataatggccctgacaacgaggaaaataatatcaaccagatcgtattggcgattaatatcagagcgggtttctttcacaacggataagtgttcaatcagagtcataggtcagcaatgagaaggaaaataaatctcattagatcatgtcatttgccttcattcaagaaatgctaaaaaagtatgctcgcaccctgtgatggatcacttgtttaccgtcgatatattcaataattgcactatcaccactcgcatctgataatgataaatgcaatgttgctaaacggtcttcgccctccattttatccgtcatcactactaaaggcgttttttccagtgattcaacgacttcagctactgtcgcgtaattatctagcatatactgcgcccacaatgaaattgatactgcaggccgcttatcatttggttgtggatatttagattcagctaaccataataagttagccacaagacctttttcgttaataccatctgtggttgaaatatcgaagccagatgcaatcacgctaccgtatttagatttccatttaatagaattagggccagcaataccatccctgctcatgcctcgtggaaatatccataaatttgttttgatttcgtgtttccaatccattgttcttgttgttatggtttgctcatctttacctaaataaactatacgagtacacatatcgtctcctaagataaaaaatgaaaacagatagatttcgtcactttatagagattatttttatttataaggcttatacgttatgccaaagtttgattagagctaggtaattctgtcattgtattttcatgaatttaagaagaatgacatagaatggttggcgggacattaacaaaatttatttgcttgtggttgtctgataaatcttagcttttaacagggataatcttcccattttaatataataaattaatattattaactttatccattgagggacgttgggtaacccttgatcttatttatctccgtcagagaaccgggattcaagttttgatcgaaaaattaattggttatcctagaatattaaaagcaggtttccagacaggaatcttgcactattgtggatgaaaaacaacttatggggagttaagctatgtcagcaccaaatttcaaatatacacctcactgaataacacaccatctttcaaattataagccttgctatagacgtaatccgattgagatgaagatttgacctcagtaaggtttctggtgaattaacaacaggagtttgttagggcgtagtgagagtgaaaggacggcggaagtaccgtccttaattttattttatggctttagccagtttaagtcgcgttagcgtcttaaacataaaaccacccgctttgcgggtggagttcaaaggttataccaagaaaaacacctttccgttacgatatagatgttcaagctaatattcgtaactcaaataaggaaaggtgtttatgggcattaaagcacaaagctcagcgcatacaaagtggctgtgtaaataaccccaattctggataagaaattgacgagaagcctgttcaaggagccgtgttttggtgcaagtcgaaacagctccggggaggaacaggctatgaacaacttagttgaaattttcatcgatgtcgatgacttttgtcgttttttcattccacaatgggaacagttttgtctcaataagggatatcgcctacgtcgtagaaaaggtcacatgtatcccagtgaaatcatgaccatcctgatcctctttcatctgtcgcattatcgtgattttaaaaatttttatctggagcatatttggcgatatcatcatcacgattttcccaccttgctcagttatactcgttttatcagtgtcacgccttccgttttagtgcctctgtgcagctatctgactcaattaaaaggaaaccctacggggatcgcctttattgactccacgcgtttgagcgtgtgccataatatccgtattccccgccataaggtatttgaagggacagcacagcgaggaaaaacctcaatggggtggttttacggtttcaaattacacctgggaacctctaaaaacttttcacagccacaaaattgagtaaaatgtaggcacagtacctctctgcaaggtagcgccatcatgataccgcctcgttctgctttaaaaaaagacaaacaggcatccgaatatcaccgtcgaaaaatcgatgaattaggtgatccgctgcttgttcttgataaatatgttgatttctcggcactggctgacaccctagaccgtatcgtcccacgtattatttcccccaaagggggacgcccgccattcccgacggaggtgatggttcgcatcattatcctgaaacatttccataatctttccgatgaaaaaatggaatatcaattgcttgaccgaatgagctggcaacgtttttgtcgcttgaccgatggcattaatattccagaccgtaacacgatttggtgtttcgaaaaaacggattgggcaggaaagggccaagaacgttatttg

SEQ ID NO: 361 - DNA, 3838 bp, Xenorhabdus sp.
  CDS (2398)..(2835)
tgctggcgcgggaacataaccaaaaatctcatttaggcgctatttataatgagttaggggatattatttctgatgttgccctctatcttcccttctgttttctacccggtgtcagcaatatcagcttactgattattctatttattaccatcttgaccgaatttattggtgtattagcgcaaaccctcggcgcatcacgacgctatgatggcccaatgggaaaaagtgatcgcgcttttgtttttggtacttatgggctgattattgccatttttccttcggctttaagttggagtagttatctgtttcctttgatcgctatcttacttttaatgacttgctatcaacgggttgtcaaagccctgtatgagatcaggcaaattgaacaatcccaatccagataaggctcccacaatgacacaactattcaaacaacgtattgctgaagaacactacttcactacttctgatgatgtatctctgttttatcgtcactggccacagcaacaaattaaagcagaaaaagcgattattatttttcaccgtggtcatgaacactccggacgcgttcagcatattgttgatgaactcaatctacctgattttgctgtctttgcgtgggatgcccgtggtcacggtcagacaaaaggaatacgtggctatagtccgtcagtcggcacatcaattcgtgatgtggatgaatttgtccggtttattgccgctgaatatgatattgcgatgggaaatatcatagtgattggtcagagtgtcggcgctgtgttggtatccgcctgggtacatgattatgcgccgaaaatccgggcgatgatccttgctgctccggcttttgatattaaattgtatgttcctttcgctactcggggatttaagttgatgcagaagattcgcgggattttcttcgtcaactcctatgtaaaagcgaagtttttaacccacgatgaaacccgtattgcctcttataataacgatccactgattacccgtgagattgcagtcaatatcttgctggaactttaccaaacctcagaacgtgtcgttaaagatgcctccgcgattacacttcctactcagttattcatttcaggcagtgattatgttgtgaacccaaaaccacagcaccagttctaccagcaattaagtagcccaatgaaagagaaacatgttatggcaggtttctatcacgatacgctgggtgaaaaagatcgacaccttatttttgataagatccggctctttctggagcgtatttttgctattccacgttaccagcatgactatgcgcagcaagatatctggagctattccgccgatgagtttcgtgcactcagtactcctctttcccatttcagtcccaaaaacttcgcttatcaattaatgcgtaaggccatggagagtcacttaggtaaggcttcagaaggaatacgattgggtcttacaacaggattcgattctggttctacgctggattatatctaccgggatcagccacaaggtcagggaatttgggggaaattgctggataaacactatctgaatagcattggctggcgtggtatacggcaacgtaaaattcatatcgaaacgctgatccgacaggccattcgttgtttgcatgaacaaaaaatgccagtacacattgtggatattgctgccgggcatgggcgctatgtgcttgatgccatcaacgagttcagtaaagttgattctgttttactgagagattatagcgatattaatgtgcgtcaggggcaggcttatattgaagaacgccatctgtcagaaaagattcagtttgttatcggaaatgcttttgatgccgatagcatagcctcaataacacccgcgccaacactgggaattgtttcaggcctctatgaattattttctgataataatctggtcagaaattccctgcacggtcttgctgaagctattacagaaaatggttatctaatatataccagccagccgtggcatccgcagcttgaaattattgcccgtgttctttcaagccaccgagaaaatgaaccgtggatcatgcgacgccgcacacaaggtgaaatggatgcattggtggaagcggccgagtttgagaagttataccagttaacagataactggggtatcttttccgtttccattgctaaacgtgtttatcgttgaaaataataagagccagtgagtactggctcttattattttattatggctttagccagtttaagtcgcgttagcgtcttaaacataaaaccacccgctttgcgggtggagttcaaaggttataccaagaaaaacacctttccgttacgatatagatgtacaagctaatattcgtaactcaaataaggaaaggtgtttatgggcattaaagcacaaagctcagcgcatacaaagtggctgtgtaaataccatatcgtcttttcgtcgaaatatagacggaaagtgatttttaataatattcgttcaagtgtgggagagatcctcagagacctttgtaagtataaaggtgtggaaataatcgaaggtcatctcatgccagatcatgttcatatgttggtgagtattccaccaaagctaagcgtttcaagctttatgggatatttgaagggtaaaagttcgttgatgatctttgatagacacgccaatttaaaatataaatttggcaacagaaagttttgggcggaagggttctatgtcagtacggtagggctaaatgaagcgacaattcaaaagtatatcagagagcaagaaaagtcggatttaatctcggataaattgagtagtaaagagcatgtagaccccttcaaggggtaggccaaagcagcaaagacacttagcttgaacgaagagaaagcagcgtcatttaggcgcagtcggtaacaagcccttatagggcaagagcaaaccacccgttatacgggtggttatgatatacaaaagaatcgtaatgaaaattaagcccttctaccaagattaaaaattgccttatagtcacatgttgtgtagggttattttgtgttgatgctatgtcatttaaatcgtgttattgaagccatattgcttaaatgatgttgttcataacatgttgtttaaacgcattttaatatgtcagaaacagccttttgttctgggcgaaaaaataaactcggacgaggtcattattaatgaaaagcattaaattacatactttggcagcatttctcatggcggcagggttcactgcgggggcttgtgcagaaaacattcgtacggaaatgacatcacagcaggtagtggattcacttagcaaattacatgtgaatttcagtatcgtagataatcaggccggagcacatgggactaattgcgccattttaggtgcagactgggcagcttgtaatcaggttaatatcatattgaccaatggtgatcagaatattgattccgcggattggtcactctatttccacagtatccgtcaaatcctcagaattgatcatgagcaatataaaatcactcacatcacaggggatctacataggctggaaccgactgaaaaattcaggggcatcagagcgaatgaaaaaatcatactgccaattattggagaatactggcaggtttatagcactgattttatgccgcgctggtatgccacatccggtgatgccatccctaaggtattggtaaatacggatactgaagatctgagtgcatttttatctccttttcagggagagcagtggaaacgcaccacaacggatcataatgtcctgatgacacctgaaaaccgttttgagaaaaatcggcagatgggctctttagagcacatggctcg

SEQ ID NO: 362 - DNA, 4929 bp, Xenorhabdus sp.
  CDS (4045)..(4929)
taccccacccgataatcctgatctgaatcctgatacttgctcattgaatggagcagcggcttatttgtatgaccctaatcctgttacattaacgggccaacctccaacagaggataatccctttgtttcagcttcaatcaatccgatgttaaataaccgtggtggtgcaatttcagactatgatattccgcttcgtacaacagtccccgtgcgaatattcacagaggacatgacgacggaatttcagccttatgaaattgatcaggaaaattcgtattattactaccttatccaaaaaacatcaaaggtggctgtgaacctaaaaatatacgccactaaatatgtccgtggtgggtttgctgaacttgaaactatattcaatgatgaaaggtacaatcaaaaacaaattatatttatgacgaccgtctcgacaaatatctccgataacttagtaccaccaagcattgaaggaacactctcgtcttctattttaacaaagccggatcaagcggatgagtttacggtctcatttcgagctatgagggggctacagcaggtagttataacatcgggtttacgacagacgataaaacaaaagcttttaagtcaaaacttttcgctgggcaaaaaacaggtgaagaagccggatattataaatttaaagctgcttacagcgatctatattttgggggctaaccatcttagctttattgcgtttgaccaaacaggtatgcctgtaagatccgaatataactacatacattatgatagtggtgtcacgaacggcttagaccccaatgattcaaccagaactctggttgcgccagaagtatatgaccaatatggtcagtttattagcaagcatgagccagttaatatctacagtattggtacaaccggacttgaggtttggttaaaatccgatcaagctaacaatccggatacaactatagccacaggtgacaatgtcacggttacagcttatatcttgcattgtgtcgatactggagggacaccacgtcatttaccgattacaattgaaacaccatccgtaacactagaagacggttattgtaaggttaaaatatcagcagataaactgataaattataaggttgcagatggctatgatgtaggagtgctcacgatagagtacagccgtcttgctccgaagcagaaatcgaaaatttttaccagaagctttgctacagttgcaatttaattaatcgggatgtgtgacagttaatagtaactgctattggctgtcaccttttatcaatatgtcacttttagttaataataaattttatattttgaaaggataatataatgacaaaaataacaacatttcctatagatggtaaaaatattatcaaaggtcagcccttcagtgttgttgtttcagtatctggtgacgataatattcagagttctgcggaaatcagcgtcgtttcccctccgggaataacattaataaagaaatttcccggtcaagtttatatgagaatattttatcagcaactgatattccaagccgatgaaagcagcaatgcccacaaaatcaagtttaccgcaaacacaacaggaaatcctagtaaggaagttacctataaccctgttgataaccctgatctgaatcctgatacctgcgcactgagaggagcatctgcttatttatatgactctaatcctgttgcattaacgggccaacctccaacagataatccctttattttagcttcaatcaatccgatgttaaataacaatggtggtccaatttcagactatgatattccgcttcgtacaacagcccccgtgcgaatattcacagaggacatgacaacagaatttcagccttatgaaattgatacggaaaattcgtattattactacctgctccaaaaaacatcaaaagcggctttaaacctaaaaatatacaccactcaacatgtccgtggatttattgaacttgatacggtattcaatgatgaggaatataatcaaagacaaaccatatttatgacgaccgttccgacaaatatctccgataacttagtgccaccaagcattgaaggaacactctcgtcttctactttgacaaggccggatcaagcggatgagtttacggtcctaatttcgagctatgagggggctacagcaggcagttatatcatagggtttacgacagacgataaaaaaaacgtttttaagatagaacttttcgctggacagataacagatgaagaaggcggatattataaatttaaagctgcttacagcgacctgtattcgggtgctaatcatctctgctatgttgtgcttgaccaaacaggtatgccagtaagatcgaaatttaatttcataaattatgatagcagtggcaataacagcccagaccccaatgatgcaaaccgaactctggttgcgccagaaatatatgaccaaaatggtcagtttattgatatagataaggcggtcaatatcaatagtattggtcacaaagggcttgaggtgcgactattatccgatttacataaatctgatacaacaatagccgcaggtgacatgatcacagttaaagcctatatatcatactgtgtcgataccacttcttctccaccccgttctttaccgattgtagttattgaaaaccccccggtacaacaacatgaaataatagatggttattataaggctctcatcaagcccgaagaactgatgggctatgatgcatcaagtggtgatgtttatagtactatagcgatagattacaagcgtgttgcccagaatcagaaatcgaaactttttattagaaacttcgatacagtcgcaccaaacaacagcctgatgactccttcattaccacaaagtaagaatggcattattgatgagtcagaattaagtcaacacgtacttttgatagtaataaaccaatatgaaaaaaaccatattgatgaccatatcattgttcaattaaaaggaaagacagatgtcttgtcagaaccactttatataatggataaaaacattcatcttcctaactataaaataaaaataccattttctaatattcctcttggtagctatgatgtttcctatactattaccgattgggcaggaaactcgtcttcatctacagctaaacatgtagagattaaaaattcagattccccacaacaatataaagaagcaaaactaataataaatggctatcaattaatcggtaatgagtacgtaatactaacaattcagatacatgacaaacagacatctgagctaattaaagacacagatatttcttataaattagagcaagctgtaagtataactaacgtcgtggaaattgattcaaaccccgcaactctacaatcaatgaatacagatgaatatggtcagtttaaaataaatctgaagggtcaagtgggcgggcattgtattataagggttatcgcgaataattatatcggaagtgtaaaatatatcatgggacaaaattaaggagatataaataatggcaacaaaaacaatttcatttcccgctataaaaagtggatggtacatcgcatattactttatgaccgaagctggttatgattatacaacaacaataactgatagaaaaaatacagctatttacggtacatggacaaaaaatgaagagggtgataattcactctataaatactccaattcatttcaatatacaggaccagatggagaacttatttgtatagttgattgtccagatactaatagactggataattcctttagcggaaacttaataactccgagtgcgggtgtaccgatactgggatatacctattgtgctgcttttgaagattttggtggttcaattgactataatgacttttttgtctgtctagtaggatggacccatgaaggataaatatctttttacaatcaataaaaatcgttgaaatttccaccgtgggaagttatccccacggtaatgagatggttcccctcaccctaacggcagtatattagcagagtgattatctttgataagaggctaccatcatgaacactatcgcactgattggcatcgatctcggcaagcattcttttcatgtccattgtcaggagcaatcgggaaaagccctgctacgtaaaaaattcacccgaactaaattgatggaattcttagccgattgctctccggcaacgggtgtgatggaagcctgtgctggcgcgcatttcatggcaagacggattgctgatttggggcatgaggctaagctgatttcaccgcagtttgtccgtccttttgtcaaaagtaacaagaatgattttattgacgcggaagccatctgtgaagcggcctcacgaccttcaatgcgttttgttcagcccagaacggaagcccaacaagccatgcgagcgttgcatcgtgtccgggaatcactggtccgggataaagtcaaaaccaccaaccagatgcaggctttcctgcttgaatttggtatcagcatgcccaaggggattgccgtgataaaacggctctctgctgtgctggctgaacatgaacttcccccttatttggtgcaggtattactgcggttacaggcacattatcactatctggttgagcaaatcaccgagattgaaactgccctatcacaggaggttgctcaggatgatatcggacaacggctgatgacgatccccggcattggccccatcacggcgagtgtgctttcctcacaactgggcgatggaaaacaatattctcgcagccgggattttgcggcctcgacgggtttggttccccgtcagtacagcaccgggggaaggacgaccttattgggtatcagtaaacggggtaataagacgctccggcaactgttggtactctgcgcccggtcattcatgcaacagattgagcaccggcaggctttagagcac

SEQ ID NO: 363 - DNA, 3837 bp, Xenorhabdus sp.
  CDS (1309)..(1707)
gtgctctaaagactatttttattcataacaaataaaatatcttttgtattataattagctagttcgggtattttaacagaaaaaacactttcatcctcaccatcatttcctcgcggaggagaaagcacacctccgactaaatcaggaattctgggatagcttactccgtcagtaggaagaagatgtttcgtgacaaatagcatattgtccccagtaaatacagtctcacccatcgttgtctttaaacttattatctttgtataaccgttatccacctttttagcataaaatttaacatcaatatttcctgatgggtcaacagtcaaataatataacccgtcattgtaaggataaagtggtgtgccggctaggtaaggagaaacctgtgaaccagctttattaaacaagagggtatggtttttatcatttagctccagtgctatttggtaacccggcaatatattaccgcctttatctcttggagaaagattcatttctaaaaaagaattactagcttgaggggttgctgttgctggttggaaatcttcaagaaaatgtgatcctataagcagtggggcaaaagttaatggttgaatatcatctgttgtcatctggctgtaagtaaatgtattattttgaagcttgctaccggcaatatctactgtaaattccagcgtaaaaggggatttattctcagaataatctatatcaattttaaatggaactgtaagtgtcttttccgtggtgttgggtgttttttgccgatgactatcctcatattcactcattgttatttttggagtgcctgtgcctgtagatattaccttagataatatcttagtgttgctagtgatctgatgggtattatctccggtgtaagtcactgtgaccatagtactggtgccttgaaacatacctttgcctttaaaatcaatacttattttttcagccatattattaccttttatattatttttggataacattcattaattaaagtattaatatattttgttatttcactgagggtatttcttaatggcagtatattgcatcaaaaaaacattaaataaactttggtgatatcactgtaagatactgttgcttttaaaaattatatgtacaaagtacactctgttatttaacaccttatgagttatattgattttttttaacttatacttaacttataaacatatcttatatattggtaatttatttttccatataaaaggttaaaaccaccgactttagtcggtcagctttagctgcgatactgtgttgcacgagaggtgcaatatggattacagatatggcagccacacggtatttcagattgagtatcattttgtgtgggtaacaaaatacaggcacaaagtgctaataggtgaagttggtttacgggtgagagagttagttcgtcagacctgtgaagcgttcgaaatcaggatagtagaaggggtcgtgagcaaagaccatgtacatatactggtgagttgtcctccgagcttagcgccctcagaaatcatgaggcgaataaagggaaggacagcaagtaagttgtttgaagagtttgctcacttgaaaaagcgttactggggtcagcatttttggggcagaggctatttttgtgcgacggtaggtcagttaacggaagagatgataaaggcctatctggcgcatcattttgaaccgaacccgaatgatcacttcaggctggataattgacgcatcgttcagtcgatgcgtatccggactttcagtccgttaatcactaacccaccgactttagtcggtggttgttgagttcatttagaatgctattttttggttttgaattattatgaatatataataaataaataaataaatttatacatattcaattttattgagtgtaaatgtttattgctccgagtttaacagagtcaaattttatagaaggctctattgctgaatctattttccatcttcccttcggattaaaatttgttacataagagatagagataccagataagacgtctccgagataaagtttgaaatggacaaatacgtaatctagtttttgatctgtattattttgtacgtcagctaatatatatttaactccatcctgccccgtgacgacacgaatatttgtcactgatatcatatcattgctattggcaactaatgataagtttgccttgacgtgcatttctaagagatctgtcatatgatttttcatattattaccctcaatgtatttgctatgttaaggtcattgtaaatatctcatgtttttcttctatttaatatttcattttatatttgttatttattctatgagcatatttcataatctatgccttttatatttcaagctagtgctgttgtttgtatttttgatttttatcgagttagtgggtgagttgaaataatgtgatctacaactatattgtcggatgcttaatatagtaataaatattttgggacgctgaatgatagagtacaaacgttttttttgtgctctatcattcagcagacaagccgcttggcggcgcgtcagtttttccggttaatgttgatattttgaagacacatttacgacctgcgtcatggattcaaaccagtcacaggcctgacaagcccggttgcttccctttggatcgaaacagtaatgttcatgcgaagtatcttcacaatacactacgaatggctgatcgattcggtgcagctgaatagtcgccgcctgttctttcgacgccggaaaaaacgcgccaccgacatcagtaaacagttcggtatcgtcctgcggtgcgtcacagtgttcgcagtggtttatccagtgctgtcggtgtaattgttcgctgatggctttgcgcagggtgtggtgaaagccgggttaacacattacgcacgatagacgggatatcgacaagataaaacacaaatgccggtctgtcctgttcggtgtagtccacttccgtgtcgggttcctcatccttctctgcttccagtaattggtgtccggcgggtaacataaaggcagtgacggtggtgggttcatgacagtgcggacagggtatccgggtttgggcgagataccagtattccgcatgcacattgtaaaacggcagccactgcataaacggcgccgggtcaatctatggttcccctcctttttgcaacactcatttttgatgaattttgggcttgcttaaatctatccggcgtctctataggcaaagatgcctgcgcctcgatgagttccgcgcctgatgaacctgaaaaactgctcggctttaataagccatcttgacctttaggtttctcatcaggccgataggccgttcatgtcatcaataatcagtcttcgcaaaaccagatgggtaacttgtctttaactgctttataatcagtctattgaatcagattgacatctatcagacctgatattcattttgctgagtggtgatggcccacgctatccgtgccagtttgtttgccagcgcacaggcaacgacattcgaatgcttcttattcagttgttcccgaacccactcagccagtctgccctgtttatgttccagccgcatcatgaatgcgcgggcgcactgaaccagtaaccggcgcaggtttttgttgcctcgcttgctgatacccagcagggtggtttttccgcctgtactgtattgtcggggcacaagcccggtagcggcagcaaaatccctactgcatgaaaattgcttaccgtcaccgagctgggaggagagcaagctggccgtgatggggccaatccctgggatagtcatcaggcgttgggccgtctcgtcggtttcaagggacaggtgt

SEQ ID NO: 364 - DNA, 3837 bp, Xenorhabdus sp.
  CDS (2)..(409)
acacctgtcccttgaaaccgacgagacggcccaacgcctgatgactatcccagggattggccccatcacggccagcttgctctcctcccagctcggtgacggtaagcaattttcatgcagtagggattttgctgccgctaccgggcttgtgccccgacaatacagtacaggcggaaaaaccaccctgctgggtatcagcaagcgaggcaacaaaaacctgcgccggttactggttcagtgcgcccgcgcattcatgatgcggctggaacataaacagggcagactggctgagtgggttcgggaacaactgaataagaagcattcgaatgtcgttgcctgtgcgctggcaaacaaactggcacggatagcgtgggccatcaccactcagcaaaatgaatatcaggtctgatagatgtcaatctgattcaatagactgattataaagcagttaaagacaagttacccatctggttttgcgaagactgattattgatgacatgaacggcctatcggcctgatgagaaacctaaaggtcaagatggcttattaaagccgagcagtttttcaggttcatcaggcgcggaactcatcgaggcgcaggcatctttgcctatagagacgccggatagatttaagcaagcccaaaattcatcaaaaatgagtgttgcaaaaaggaggggaaccatagattgacccggcgccgtttatgcagtggctgccgttttacaatgtgcatgcggaatactggtatctcgcccaaacccggataccctgtccgcactgtcatgaacccaccaccgtcactgcctttatgttacccgccggacaccaattactggaagcagagaaggatgaggaacccgacacggaagtggactacaccgaacaggacagaccggcatttgtgttttatcttgtcgatatcccgtctatcgtgcgtaatgtgttaacccggctttcaccacaccctgcgcaaagccatcagcgaacaattacaccgacagcactggataaaccactgcgaacactgtgacgcaccgcaggacgataccgaactgtttactgatgtcggtggcgcgttttttccggcgtcgaaagaacaggcggcgactattcagctgcaccgaatcgatcagccattcgtagtgtattgtgaagatacttcgcatgaacattactgtttcgatccaaagggaagcaaccgggcttgtcaggcctgtgactggtttgaatccatgacgcaggtcgtaaatgtgtcttcaaaatatcaacattaaccggaaaaactgacgcgccgccaagcggcttgtctgctgaatgatagagcacaaaaaaaacgtttgtactctatcattcagcgtcccaaaatatttattactatattaagcatccgacaatatagttgtagatcacattatttcaactcacccactaactcgataaaaatcaaaaatacaaacaacagcactagcttgaaatataaaaggcatagattatgaaatatgctcatagaataaataacaaatataaaatgaaatattaaatagaagaaaaacatgagatatttacaatgaccttaacatagcaaatacattgagggtaataatatgaaaaatcatatgacagatctcttagaaatgcacgtcaaggcaaacttatcattagttgccaatagcaatgatatgatatcagtgacaaatattcgtgtcgtcacggggcaggatggagttaaatatatattagctgacgtacaaaataatacagatcaaaaactagattacgtatttgtccatttcaaactttatctcggagacgtcttatctggtatctctatctcttatgtaacaaattttaatccgaagggaagatggaaaatagattcagcaatagagccttctataaaatttgactctgttaaactcggagcaataaacatttacactcaataaaattgaatatgtataaatttatttatttatttattatatattcataataattcaaaaccaaaaaatagcattctaaatgaactcaacaaccaccgactaaagtcggtgggttagtgattaacggactgaaagtccggatacgcatcgactgaacgatgcgtcaattatccagcctgaagtgatcattcgggttcggttcaaaatgatgcgccagataggcctttatcatctcttccgttaactgacctaccgtcgcacaaaaatagcctctgccccaaaaatgctgaccccagtaacgctttttcaagtgagcaaactcttcaaacaacttacttgctgtccttccctttattcgcctcatgatttctgagggcgctaagctcggaggacaactcaccagtatatgtacatggtctttgctcacgaccccttctactatcctgatttcgaacgcttcacaggtctgacgaactaactctctcacccgtaaaccaacttcacctattagcactttgtgcctgtattttgttacccacacaaaatgatactcaatctgaaataccgtgtggctgccatatctgtaatccatattgcacctctcgtgcaacacagtatcgcagctaaagctgaccgactaaagtcggtggttttaaccttttatatggaaaaataaattaccaatatataagatatgtttataagttaagtataagttaaaaaaaatcaatataactcataaggtgttaaataacagagtgtactttgtacatataatttttaaaagcaacagtatcttacagtgatatcaccaaagtttatttaatgtttttttgatgcaatatactgccattaagaaataccctcagtgaaataacaaaatatattaatactttaattaatgaatgttatccaaaaataatataaaaggtaataatatggctgaaaaaataagtattgattttaaaggcaaaggtatgtttcaaggcaccagtactatggtcacagtgacttacaccggagataatacccatcagatcactagcaacactaagatattatctaaggtaatatctacaggcacaggcactccaaaaataacaatgagtgaatatgaggatagtcatcggcaaaaaacacccaacaccacggaaaagacacttacagttccatttaaaattgatatagattattctgagaataaatccccttttacgctggaatttacagtagatattgccggtagcaagcttcaaaataatacatttacttacagccagatgacaacagatgatattcaaccattaacttttgccccactgcttataggatcacattttcttgaagatttccaaccagcaacagcaacccctcaagctagtaattcttttttagaaatgaatctttctccaagagataaaggcggtaatatattgccgggttaccaaatagcactggagctaaatgataaaaaccataccctcttgtttaataaagctggttcacaggtttctccttacctagccggcacaccactttatccttacaatgacgggttatattatttgactgttgacccatcaggaaatattgatgttaaattttatgctaaaaaggtggataacggttatacaaagataataagtttaaagacaacgatgggtgagactgtatttactggggacaatatgctatttgtcacgaaacatcttcttcctactgacggagtaagctatcccagaattcctgatttagtcggaggtgtgctttctcctccgcgaggaaatgatggtgaggatgaaagtgttttttctgttaaaatacccgaactagctaattataatacaaaagatattttatttgttatgaataaaaatagtctttagagcac

SEQ ID NO: 365 - DNA, 3821 bp, Xenorhabdus sp.; identical to SEQ ID NO: 41
  CDS (2459)..(3820)

SEQ ID NO: 366 - DNA, 3123 bp, Xenorhabdus sp.
  CDS (1882)..(2280)
agtaacaggatcgttaatagccccaaaactaccaaattcttggcggacttggtgcaatatcgtatctggaagcttcagggtcacttgccaagcatcatggtaggaaatgttctcaccaataggactgtccataaaggaacaatttcggacatacggaattaatatgtccgaaaataggctaacttcatatagtgtcattttcagaagacgactgcacggaatgtcaaaagtcggctgcactcaattgcccgaaaccacaaattggcagtaagagcttaattgggtgttattgcaacgttaaaatgtcaccagtcctacaatgtagaaatgtcacttttgatggtgtatagcagaatcatattaatatgattctgctatagaattacagttgtttgtttgcgaaccaaatatcaggacgaaagaatgcctaagaaccatcagaggatcaatcactcctaaacagagaaaagtgctgcaaccttgcctatagcgttcattacattcatcaaatactctatatgaattcagcaaaaggagatcaattgatccccttttgacttttttggaaaatttatttttatccgggattttatttttaataattatacttgaaataaacttcagacatttcgtgttcaatgccatttattactgcatgggatctttcaccaattaaattttcattatcatcagtaatatcgacaatatcgaaattaacgaaaagcttttcaattcccagctcaggcaaagtaaataattctcctgattcaaggcgcccattcatgcttttatcaacccatacccgtaatgatggataaatttcgttttcttggctaatataccctttatgagtcttatcaagatccatcagttttaaaaatccttccattctgtcaatgccgccaaacaagtcggcaacactattcacctcatcaaccccatcttgattccaaactaaaaaacccgatgacggcgttatccatgcggttgtaactttttgaccggttcccaataaatcaaacttaacggactggtcaaaaatagatgttgtctgaatcccttttccatcaagattaatgacgataggagagcaaattgtaaggcgttgaactacgtattttttgacaggtgcttcacaggtacccaattctgtggttactgctttgatcacatcccaggaatcatttgattttccgcaatacttagttggtacttcagcatctgtgcaaggtttggcccagctgggtaagcgctcattacgccatttatctggggttaataaaaccttattcatttctttcatttggaagctatcgcctgagcatattaagttactggcatagctataagcgtaaagtcctgtgttaggttgtaggtagtttgggaattgcctccgaccatgctgtgttttatcaaaaatctggataccgaaatcaacacagttaccacaagccaacgcatatttgagattgcctttgacactctcattgtgcgccgtttttgcaaaatctaaagcgttattaaaatccacctgtgtgagtttgaggcgcttttcagcataaggggagcccatttgtattcttctagcattatcttcatcttcccttcttaccccggaaggtctgccatcatcagattttaaattggaaccatacgtacctttatatactccattggcatcaaaaaatgaataattagcatgaccgagcactgatttttgtcctggaccagaagaattggcaaaaaactgattaatacgaatgtaaggttcagacataatttatccttttatttttccatataaaaggttaaaaccaccgactttagtcggtcagctttagctgcgatactgtgttgcacgagaggtgcaatatggattacagatatggcagccacacggtatttcagattgagtatcattttgtgtgggtaacaaaatacaggcgcaaagtgctaacaggtgaagttggtttacgggtgagagagttagttcgtcagacctgtgaagcgttcgaaatcaggatagtagaaggggtcgtgagcaaagaccatgtacatatactggtgagttgtcctccgagcttagcgccctcagaaatcatgaggcgaataaagggaaggacagcaagtaagttgtttgaagagtttgctcacttgaaaaagcgttactggggtcagcatttttggggcagaggctatttttgtgcgacggtaggtcagttaacggaagagatgataaaggcctatctggcgcatcattttgaaccgaacccgaatgatcacttcaggctggataattgacgcatcgtttagccgatgcgtatccggactttcagtccgttaatcactaacccaccgactttagtcggtggttgttgagtctataggagtctgtggcatcctccgtcagtcagacggaggagtgtgttacttgccttgctaccagctaccagctacatctaggtttcaggatgaatgctgttgcagataatccagaacaacttgatgatgatcgcttgttttgaatttatcaaaaacgtgttcaatattgcccgcaggatcaatcagaaaactgatgcgatgaatgccatcatagactttgcccataaactgttttctaccccaaacaccaaactgttcggcaatttgatgattaacatcggaaagcagagtaaaattcagcatttctttctcgataaatcgggataatttctcgggagcatctgtactgatgcctaatacggcaacattaattttttccagttcatccatcgtatcgcgcaaaccacatgcctgaacagtgcagcctggggtcattgctttggggtagaaataaactaaaacacgctgacctttgaagtcagataagttaatgttttcaccatcttggtcaggtaggctgaattgtggtgccttatctccggctttcaatggactcatcacgcattctccgtttagtcgtttttatctaactggttttatacactaatattcttatatgttcactatatgtgggcgtgctgacgtttgctcgaagggaattgggtggcatgataatttggtctcttattttcgccaaaaaactcgttacccgaactatcatgccacgacctatgttcttta

SEQ ID NO: 367 - DNA, 3254 bp, Xenorhabdus sp.
  CDS (44)..(283)
atgctccatccatgtgctctaaagactcaataaatcagaggcggagaaacaaagttgtgaaacgttattaagcccgttagcgtggaagttattgtggacaaagcaagagaagaaaaaactccctaagacagccccaagcatttattgggcctatattaatttgggcaaactggcgggctggtatgactctaaacgaaatggccgagtaggatgggaaaggctgtgggaaggatggttcatgttacaaaccatccttgacggttatttactgtccaagtctcttgacctatgaaatatgatcaagagacaggctgcttgcggcggggatgtttattcaaagctctgatggttttttgtcatttagggggctgatgctaagcgccgggcagctgcaacaacagaagcccgacgtctggcatgttcttgctggctatctgagccagtgagcatacgtgctacctgaggtactgctgaccaccatccggctagggacaatatcaagaatgccagatggtcgggagccagagtctgggtgattgaaccctgctgctgtccatcagcgacagcctgaaccttggaattatagtatttgcgtcgttgctcctcgtccggtacttcaccatcgaaaacaagcccttcccagcgcataagccggcttaactcaggatgttcgcggtgataatcgtaggctttaccggcatattctgcgatttcctcaattgtgaaaggcttaaccggtacttcctgagcgactctggctaattcactgcgtagcacagttgaaaataatgaccgcttatcaccaaagtaattgtaaatgcgttctttatttactccggccaacttagcaatcttgtcgatagtagtgccatcgggtccaaggcgggcaaactcttttactgccgcttctaaaatcctgcgctttgttgcctctgtatcccaagccataatttgctttcctattaatcagttgttgccattacgaaaataatactataataaactccaacgttttagttggaaattaagtggtgacactctcgatactaattaaccggcttagctcaggtattacatactattcccctctgctttggcggggtggatatcccatcagcagtaccagaatcggaggcagtagattgtgaataatcagatagaacatataaaagaggctgctggcaatataaacaaccagatcgcttcatccgaacaaatctatgtagccggtaccggcgtggttatgttgttggcggtaatagcattgtttgtcttaactcagctttatctggcgatccctctgctagtgcctgtcagtcagaattttaatttggtagattcgggagaagttacatttgcgcttgccacaagttttagtctggcttatgccataggattcctgatttggggaccaatatcggatcagtatggtcgtcgcgttgtgatgttatggggattgatggcaatatcagttgctaccctcgcatgttcgtttgctccgtcactatcatggctgaccagtttgcgggtgattcagggactggcagcatctagttttgctcccatagcgctggcatatctggctgaaacagtacctgagcgttaccgtgctacggcaattggaactatgtccacgtcgtttcttgtggcaggcatttttggtcaggttttagcggcttggatagatctaagatggaattggaacggagtctttctggtgactggcgcgtttctaatggtgatgatcccgttgtttattaaggttgtcaaagaaccaaaacgcattgttaccgaggggcatcttgggcaccgattcatagcattaggacgaattattgttcgcccggcgggtttacttctgtcatgtgcgcatattacgctgttgttatcatttgtcgccatgtatatagcattaggaacccatttatgggagttgggcctgatgccggataaagtaattttactgtgcttaattggattaccgggcatgtttgcggcactgctggttggagtattagctcgtagaatcagtatgcctgcaattgccatcattggttatattactgcagctgtcgggttgtcactggaagctatattgtcacaatccctgactggcattgccattggtagtctggtttttgttatcggtatagcccttgctattcctgcgatgatcacgcagtttggttctctatcagcacccaatcgaggtgcaggaatggcgcttaatggattcattctatttattggtgccagtatcggaccattaattgcggcagaaatatctcactttggcatattattatctgtgtttgtcgtcatgcttcttttgggagccatttgtgtggctggtagtgcgtcactaactgcaatgctgaaaaggccataaaaatagcattactgctaaaataatcttcagtacacgaaaacagcaggaatataaattgattcaattcaattgaatagtagatattggtgagcgaatgtacgacattcagctatgtttttcttgacatttcacctttcggccatagttttaatctattaaaaaataaaaagggataagattatatgaacatcattttttttagtcctgcgtctgatgccgataagtgggttcaaggaataactgaacgtttacctgatgctaaagtgagaaagtgggctaagggagataacgctcccgcagattatgcccttgtttggcatcctccctatgaaatgttgactgagcgctcagatcttaagggaatattctctctgggcgctggtgttgattctattcttcagcaagagttggaaaaccccggagctttgccagcgaatgtcccgttaatccgcctcgaagatacgggaatggggtatcagatgcaggaatatgcagtgagtgcagtgttacattatttccggcgaatggatgaatataaacgtaatcaggagcagcgcatctggcagccattatctcctcacgatcgaaaagaatttgttatcggtgtactgggtgccggggttttggggcgctgtgtgattgagaaattggcagagtttaattttacggtacgttgttggagtaggactccaaaagaactgaccggcgttgaaaatttttatggtgaagaacaacttggagagttcctttctgactgtaaggtattaattaacttacttcccagcacgtctgaaacccgcggtgtgttaaacctttcggcatttagtcaattaaaagaaggttcatatatcatcaactttagagc

SEQ ID NO: 368 - DNA, 2979 bp, Xenorhabdus sp.; identical to SEQ ID NO: 43
  CDS (1528)..(1857)

SEQ ID NO: 369 - DNA, 4490 bp, Xenorhabdus sp.
  CDS (4183)..(4488)
ctaaatcgtatgtgtcacagtcagaaagacctgactgcacatatcgaaaacgatgcctactggcatatcaaacatgaccagaagagccgcatcgataacaaccgttaccacgatatccgcgccgatgaccatcatcaggtcgcgggttcacgcaaaatcaccaccgaaggcgatgtatcgcatcggattgccggcagccagcatattcagaccggagatgccaccgtgattgacagcggacaggaaatccacctgaaaagcggtggcaaagtggtgctggaagcggcagccgaaatcaccctgaaagtgggcggcagttttctgaaagtcacaccggctggcattttgtcttcaatgattaatgtcgggcagggttcaggcggcagcgggcgcggggtttcactgcaattaccggaaggtgtggcaccactcggacaagtaggacagctcccgatggcggaagcgcttccggtcactgaatttccggtgcaacccgcttgtgcagaactggcacaacaggatgccagtttagtcattaaacctgttaaagagtaaatacaatggaaagagctatcaccatggagaacacagaatctgcaataagctggcaagcctggctgaatgaacccaataaagcgcctgttttcttcattctcaattcactggctaaaccgaatccgatagagccattttatcgccatgactgggttgaacaggcatttccgctgtatagcggtaccccgatgcgcaatatgctgaaacagagtccgtggttggtacaaccaaaagctaatcagttagttcagataggggctgtgctggataaccatgcactcagtgacaacagctgggggtgggcttaccgcagccagacaccgtggcaggaacagcttaaccactggcagcagcggcaatgggtcatgatgaacggcgaaccggtgctgttccgcatgatggatgcgcggatattgggcgcactgatgccggcctttacgcccagcgactggtcactgatgctgtcgcctgtcaccgaactgatgatagacagtccacaactgatgcggttttgccgtcccgacgcgtgtaacgaaggtaacagtgaaatcccgtttacattgggtgagcacttgctggccgtctggctacgttctccctatggactgaaagtcttaaccagctccctttataacgatttatgggaaaaccacggtgcaatggcgaaacaatgggatcaaccagaaggcagtttagaaccccggattgaacagtggttgagacaaaagctggaaaccggacaacgtattgaaaaagtatccagtcaagattacctgctggcaatggaacaagaaaaataacaggagcaccaatttatgagtaatgccaattcggtttattgtcctgactgcccaggaatgttaaagaacaaaatagaaattcaacttgtggatgaacacaataaacccattcctaagatggactatattttaaaaaatagtaaagttgaacgtccgggaacgacggatgaaaacggaatgatccgagaagaaaaattgcctgcttctcctatacgtttatttctaggtgggcaaaaacttgccgatgaaatggagaagcggccattacgaacattgcgtggtgagtctaattcaacagtaaagccagatgctgaatccaaaggttatttttatcgttatgctgtcattggtgaattgtgtgataaagctcctaatattgccgagtgggaacaaactaggtttgggctaccttactaccattttccgaaagaagatgaatttaaaggattggagttttacggtgaggattttaatcaacgtcatgtgattgaggtctgtccgtttagagcatggtctttaatcctaaaacatacacccaactacgatatagtgaatgcatataatctgggactcatgtcaatattggtatataaggatgaagtgatggttaatccagattctcctgatattaatatgaggaaatttattaatatccccgatacaaccacttcttttttctaccagcaatgctttgacttatcaaaaatccctgttatcaatgatggttatgtttatcccgcaattgtaaacgatgtgccctttaaagaacgttatcgaccggcaatattcctggatgttaaacaagtgaaagaggttgaaacgtttgaacatgatactcaaatgttttttgttgaaaatgacacgcaaattattgcggcatggcgagggacggcaagctcgagagatgcgttgacggatgggacttaccgccctattccatgcccagagaatattcttcctggtaaaaaagccaaggttcataaaggctttttagatgcttatcagtgcatggagaaatattttaaagatagaattacaagtataaaagataaatcagactttggaattaaagagttatttatctgcggtcatagtttgggtggggcactcgctttattgcatgccacagagctaagagataataacccgctcctttatacgtatggaatgccgagagtcctcactggaagtggagtcaaagaattaacgtcgctaaatcattttcgtcatgttaatgatgctgatatggtaacgagcgtaccatttgataccaatatggataactggttatttgatgtttttgggccactaggacccatttttggctttagctggacgatggcaacattacccactattccaatacaaaaacaccttcccgatattggtgaggtgtattatcaccatgggaatacagtgagcttctttctggcgaggcaaatgggtgaagaaagaatccccagtaagaatggaatcggttacgtgggtaaaaaagcctggcgcatgaatggctcctataagttttatttagttcctagcatagctaattcgttagataaagagcttgagaataaacaacaggaatatatgaactcattaaagggagataagtttgttatcgatgaaatattcccgcaatggaataacccaaatttagatacgatgataacaatagcgacagaccactttatgaccactaaatatcaagccattataaataatcaattgctcagtttctttgagccaacgaaaacgcctaaacgaatagagtcaaaagggaaatttaatgaattaatacatcatcaagaagcctctccactgaaggcaaaacgtaacaccatttttatggcactcgaaaataaactatacgataattttaaacaagatgttaaccaagatgaattattgaaacacgctcttgagcggtacaaggaaaacacccatgaaatatctatataataaaagcgtgctatcctctctacttgctgtatttttcatacaaggatgtgcgcaaagcaaatcattctctccaccgattaatggagagaatattcattttatggcaacgattccggatgagttggatgctttacccatttcagccatgtatcgttctgaaatttgccgtaaagaacaactaactgcgaatatggagtcgtatactattccgggttttcatcatgctacctacccgctatcaatcggtcagtcaaatcaagttgaggtcagtgtccctaaggaggggggagggaagtgtgactggaaactgagtaatattactttcgaagtgaagctgaaagatacgtcaacaattgcgccgcttattgacgataattttggttttaaaacgacatttgttattgatggcaatgcaccagcagtatttgatggaggttatttaaaaaaaacaggtgatttaaatgaagaaattactttatttcctttactaagagagagattctcagggaagcatagtaaatcattttatttagtcggaaaatatgatgttatgacatataaaatgtataatagtagaaaaattaatcttaatgtcttatatgaaaaaaactttttaactcattggcagggaagaaaaaataagaattcagatacatcaatgacttatcctgacggaacaataatatacaatggtgatgtaataccagagtttgataaattaatgcgtattcttgaatcaagaagtaataaacagactaagatgtagtcattcagacttaatctgatgagatggacgtcccgtatggcgtcaattgtaccaaaatgaaataagcatattcattttatgggagcgtccattatgtatcataaaattctcggtattgatctcgctaaatctgtttttcagctttgtttgcttaacgataatcacattatatttaataaaaaaatgacccgaagtcgattactggatgctgttagacaaatggaatccgggactttgattgctatggaggcttgtagtaccgcccactattgggcacgaacgattgaaaatctaggttttaaagtttgccttattccccctcagcatgtgaaagctttcgttaaacaccataaaaatgatgccaatgatgcgttggcaatatgtgaagctgcgaatcggccgggtatgca

SEQ ID NO: 370 - DNA, 3416 bp, Xenorhabdus sp.
  CDS (2825)..(3415)
  unsure (1)..(3416): unsure at all n locations
ctcggaccatgtgctctaaggttgctggngccgcatagcgggttaacagcacgggagtaggcgcagacaatgatggtttgctctgtgagtgcggtttatcttttgaatccgttgatttttcaaccgggtaaataatacgcaccggctcgctggccccggttttgccggcggtcacatccagtaagataatttcgccattctcactgtcctgcaattgcagccgggttgacgggaatgcactgttggctttcaggtaaaccgcgccgcccgtgctctgtacccgtaatttatcattcagtaagggcggaaaaccgactcggacattccggtcagcaaaaataatccgctcctgaccaacctgaagcgtaatcgataacggaatacgctcccatgtcagcagctcatcagcttttgcgccagcgcagaacagcaggaagctgaccagccccagcccgacaccgcgccagtcaaatacatctcttctcattgaaatacgccttttttctcttccgctggcggtggcagggcttccagccgctgtggcattccgtcgtagcaatccagtgccagaccgaaggggttacgctccgcatccccctcccagcgcaccactttcagcggatagcgcaccaatgcccgtttgaccggttcagcgtgataatattcatccgccaccaaatccagtcgcaccacccagttatcgcggtcacgcaccgtcacactgcgcgtctcatagccccggccgggcacttcatacaccacccgaacccggtcgagcagctcaccgctgtcagcccgggttcgggcatccacacgcagaaaatcctgacaggccggcgtcagatacggcgataaggcctcaattttggccggataatcctgcgccccgtttttcggccaggcatgcagttgctggaaaatataaaaggcaaagctgtagacactgggagccggcacttcccaccacgcccgggtgctgccactgcgtaaatccggcggattatgaatggtcagattgcgtggggatgccatccagcccagcagacttatcagcagcactcccaccagaatgccgcacgccacccgcagggtcagaatatgctggtcccggtttctgaccgcatgacgaaagcgactcatcacacgcctctcctgttgcggtgcgcttgcctgctgcggcgtagtgaccagccctgcgccgcgataatcaaggtcgggtcacccagccctaaccggcgttttttctcggccagtttctgccagagatagttttccggtttgccccgttttaaggtggcaagccagcgcccgccaacactcagcagtaacaacggcatcatcagcatgccggtcggcagcatcacccaaccggcaaacggaataaagggaaggctgccccccagaccgagggccagccctgcgatggcggccagccccatctccggcgtggtgaagccgcgaaatacgacgggttcagcgtttaagcgatcgggtaaaaaggggatcgtctgcatccgcggcaccttaaaaaataatgttggccgattttgccagcaaccagatcaccgcaaccagcaacacaataccgaccacgataatcgagccgaactgggtccacgtggctttgccatcacgcacttcagagaaggtttccaccgccgccgaggccactttaaagaacgcaaccgcagagaggatcagcccgccaatcacaatgccatcctgcgcatacccttttacctgccccattaatccgccacgacctccacttgagggcggttcaatcgaaggcaaatcggcccaggccgattcacaggaaacacccagcagcaacagaaaagtgctgatccgggccatcaggtttgtgctgaactgacggcaggtggtaaaaactcgtttcatagtgattcagttcctttttgttatgtttattaactcaactggcaaacatccagacagccacgaccagcaatactgcggttcgaagagcaaactgcctgagggtctgattacgcactttttcattcgcccagccgttccagacctccaccgccgcccaggccgcccacaaaaacagcgtggccagaaaaaagccgacacacaccagagacagaaaataaatatcaaagtgtcctgaggccacttcaaaggcttggcgctgggtagaggtcattgtggatgttcctgacggtaatcgccggagagggggacgggaacacggggctgatcgcgggaaggactcagatagcggtcgataccggctttgagggtatggaggtccgccctgatgcgtgaataatcaaagtgataacgaggatgttctgacgggtcagattgcttttcggcgatgctggcgcgctccagtgctatcagtacctgatcaatcagacgcttggcactggccagctcatctttctccgccgcctgagccagcggcatgcacaatacagtcaatcccagcagacaggccgcaccggatatcgaaaagcaacaacgcataaagactccccttatcataaactccgagtgcgaggatgcggtgttttctaaatcagatcagtaataaactctttatgctttgatgaaaattagctaaatagtctgactaatttatttgattaatgatttcacaatgaaggaataatatgctgcggattgatttacacgtccctgatgatgagtatgagacagtgagaaagctgggcgcacactgggatgcggccgcacaaacctggtatatcgatggcagtttaatgagatggttcccctcattctaatcgcagtatattagcagggtgattatctttgattagaggctaccatcatgaataccaccacactgattggcattgatctcggcaaacattcctttcatatccattgtcaggatcaatcagggaaagccctgttacgtaaaaaattcacccgaactaaattgatggaattcttagccgattgctctcccgcaacggtggtgatggaagcctgtgctggcgctcactttatggcacgccggattgtcggtttaggccatgaagccaaactcatctctccccaatttgtgcgcccgtttgtcaaaagtaataaaaatgattttattgatgcagaggcgatatgtgaagccgcctcacggccatcgatgcgttttgtccagccgagaacagagactcaacagggcatgagagcgctacaccgtgtcagagactcactcatccgggataaagtcaaaacgactaaccaaatgcaggcctttttgctggagttcggtatcagcctgccaaaaggcgaggcggtcattaaacgcttatcacgggtacttgcggaacacgacattcccgattatttgagccggttgctgatgagattacacacccactatctttatcttgttgagcaaatcacgtctttagagcgca

SEQ ID NO: 371 - DNA, 3659 bp, Xenorhabdus sp.
  CDS (1)..(510)
caatcactagaagtgcaggtgaaggcacttaaagcggaaggggtcagagcagaccgtatatttacggataaggtgaccggcagtagcctggatcgagaaggtctccaaatgcttcggctaaagattgaagaaggggatgttattctggtgaaaaagctggatcggcttggtcgtgatactgccgatatgattcagctgatcaaagaatttgatgagaggggagtcgccatacgttttctggatgatgggatcagcacagaagggacaatgggcaagatggtggtcaccattttatctgcggttgctcaggcagaacgccaacgaatactggagcgaacaaacgaaggccgtctggaggctaaagctaaaggggttaaatttggccgtaaacccacaatagacaaagctcaagttcgccatcttcatgaacaaggtatcggagcaacaaacatatcgggacaattaaaaatagcgcgtgctacagtctataaaatcctcgctacggtgtaacggtactcagaatcgtcacttttgggggttcttcggcggaacccgcttcaccgaccacgtacagtacagccccctgagcaaccgattttccagcccatgccttacctgtagcaatatgacaaccccatgcccccgccagaaaacttttatatgaaccgctcgccccgtaaatgctgcacagggaatgcgccggaataatgcccttaaccacgtagtctaactgagcatcaaagccctcagagccgattgacaggggtaattttgttttacgatttggatagaggctttcaacattgtcataacgacgggtttctattgcatcgctacttatcggttccctcaccggatataacacctgactgaatgcctgtcgggctgcctcaatgccgtgttgctggcgataatcgtcccagtcggctttatgttctgtcggtggtaacgtaacccagccattcaccgtcagcgctgctttctctgctgagatcttgccggtattcactttgggtttgccgtgcttgtccagttcgccggggctatgccagtcattatctgcggcaataatgatttttacgtccggccagcgttcccgaacagcgttggcaacagaaaataaattgccggcatccagtgccgccagaacgctgccttgatataactggttaacagtcagggctgtggcgtaaccttcggcaatgataactgtgtcgggggacacttccagcgctgaaacggcaataaacgcgcctttcttctggctgactgacagtaattttttctcgccattgggtttgataatctgcgccccggtgatttttttatccagtgttgtcagaggcaataaaaccgaattatcaggcaacaaccgctgattagggcagagcagcccttttgcggtcaaatagggtgattttccggtgatagtctgtgccatcagtgccgcgacgctttcgacaatcggtggtgttggataagtgatttctctggcgggcttgggttcaggcaaaggcaatgccagtgcatccgcgacaactttggctgcttcaataatcgtgagccgattggttcttgccactaaatccagtccatcgccatagttcggggcatcacactggcggcagtgccagttgccgtgatgatgatcgtcgataaagtgaaagcggtcagtgccgccacaaaccggacaggcaccatgtttaccttttgccggaacagtgataccacaagctggtagcaggttttgccatgagtacatagccgaagttttgacggtttggataagatcaagcggtttttgattgcttgatttttttggggctgtaaattcagggcgagtttgggtatgctgtgtatcagccatcgtttttacctcacttaaacggttttggttaaacgcctcagatgtgtccgaccacactggggcgttgtgttttatattctgtttcttatgtcatagtcttttttgtgttatgccgcccgcgattctgcgatacgttgtgcgatccagttatcaatttctgcttcgataaaggcgactgagcgtgggccgattttgacctgcttcgggaattcgccatcgctaatcagtttgtaaatccacgctttgctgtaacccgttctgcgttgtacttccggcaaacggttcagactgattttcaatgttgtcactgtcatatttaattctcctgttaccgagtccttgagcgctcatcgtggacgttatttgatgacaggcggattatttaaaaagccaaactaaatgaacagcgttaattgtttttctcccgatgaaaattaatttttaggttgcattatcgattttttctgtcgcgcagtggtttagcgaagtcatacggcgtgatggatttttcccggtttgcatccagataatctgcccaccactgcaccatcagccgccgttcgtccagatgtttggaggtgtgaatatacgcggctctaacgttgttgcgttcgatatggcttaactggcgctcgatggcgtcatcgttccagaggccggattcacccattgcaccacgcgccattgtgcggaagccatgtccgcagacttcggtttgggtgtcgtagcccatcgcccgtaatgccttgttaacggtgttttcgctcatgactttcgcggaattatgatcgctggggaacatgacttcgcagttgccactcagtgcctgtaacgcgttgataagcgggacagcctaacgtctcaacgggacaatgtgatcggttttcattttcatgccacgctcagaaaagcgaacgcctttaatgggttgccttgtggcaggaattttccacacggcgttttcaaggtcgatttcctgccagcgggcaatccgcagttcactggaacggacaaacgtcagcagtgccagttctaccgcgattttggtcagcaggcgcccgcgataaacagacaatcggttcaggaaatccggtaaatcttcatgaggcagggcagggtgatggcgtgattttacggtggaaagtgcgccagccatatcactggcagggctggattcgaggatatcattctggacagcataacgcatgatagccgtgacacgttgttgcaatcgttgggcaatgttgtgcttacccgcatcatcaatggtcttgacgggggctaaaagctggctggtgcgtaatgtggtaatatcatgtgcgccgataggcgggaaaatatactgctcaaggctgcgcagcactgtttggctatgtctgtcactccagcgtttgttactggcgtgccatgcacgggcgacgtcttcaaacgagttcactttggcgggtgaggggatgcctttcttttcggctttgggatcgatgccctgcgccatcagttttttggcttcatcccgtttagcgcgggcatcggctaacgatactgccggataaacaccaaatgccagacgatcttctttcttatcggtcgggcggtaatacttcatgcgccagtactttgaaccgcgtgacgagacttctaaataaaggcccccgccatcggcgagtttgtaggttttttctttgggctttgcagtttcgatttgccgggcgtttaatttcattattaagggcattcctttaatcgaacggtaagtgccccgaattatgcccttcgctgcctcttgctttag

SEQ ID NO: 372 - DNA, 5339 bp, Xenorhabdus sp.
  CDS (1553)..(1984)
  unsure (1)..(5339): unsure at all n locations
gcggaccatgtgctctaaaaattgtaanctttgaagtctttataacagagaaatgggctaacttcccattcctgtcagcaaatatctaccagaccagtaccaataagcgtttatttaagccctatgtgatatttgataagcaaggggtgaaaattgctgttattggtttaactactgacgataccgcgaaaataggtaatccggctaatttccctgatgtggaattccgtgtacctgcgaaagaagcgaaaaaagtcattgatgaactgaagaagaatgaaaaaccggatgtgattattgctgcaacgcatatggggcactatgacgatggtcatcacggtacgaatgctcccggagatgtggaaatggcgcgtagtttacctgctggctatttagatatgattgtgggggggcattcacaagatccggtctgtatgtctgcggaaaataaaaactataaacaagtggattatgtaccgggaacaccttgctctccggatcgtcaaaatggaacgtggattgttcaggcccatgaatggggcaaatatgttggtcgggcagattttcaattccgtaatggtgaatttaagttaatgcactatcagttaattcctatcaatttaaataaaagagtcaaacaagaggatgggagtactgagcgggtttattacactcaacaaattccccagaacgcagaaatgctgaaattgttgacgccttatcaggataaaggtaatcagaaactgagtgtcaaaattgggtcagttgacgacaaattagaaggtgaccgtagtaaggttcgttttatacagaccaatatggctcatcttgtgctggcagctcagatggaacgagccaatgctgattttgctgtgatgagtggtggcggtatccgtgattctattgaagcaggggatattacgtataaagatgtattaaaagttcatccattcggtaatcagctaatttatgttgacttcaaaggcagtgaagttctgccttatctgaccgctgctgctaatatggaagcggattcaggtgcttatggtcagttctataatgtcagttttgtgaaagagggtaagagcatcagcgacgtaaaaattgctgggaagcctttagatctgaataaaacttatcgtatggcaacattgaatttcaacgctatcggtggtgacggttatccacgaattgataatttgccgggatacgtaaataccggttttgtcgatgcggaagtattgaaaggatatattgaaaaacactctccactgaaagccgctgactatgatcctaaaggcgaaatagttttcaaatgatgatacgtaaaatctgattttcgacaaaaaagaccatctttaaaatagatggtcttttatttatggctttagccagtttaagtcgcgttagcgtcttaaacataaaaccacccgctttgcgggtggagttcaaaggttataccaagaaaaacacctttccgttacgatatagatgttcaagctaatattcgtaactcaaataaggaaaggtgtttatgggcattaaagcacaaagctcagcgcatacaaagtggctgtgtaaataccatatcgtcttttcgccgaaatatagacggaaagtgatttttaataatattcgttcaagtgtgggagagatcctcagagacctttgtaagtataaaggtgtggaaataatcgaaggtcatctcatgccagctcatgttcatatgttggtgagtattccaccaaagctaagcgtttcaagctttatgggatatttgaagggtaaaagttcgttgatgatctttgatagacacgccaatttaaaatataaatttggcaacagaaagttttgggcggaagggttctatgtcagtacggtagggctaaatgaagcgacaattcaaaagtatatcagagagcaagaaaagtcggatttaatctcggataaattgagtagtaaagagcatgtagaccccttcaaggggtaggccaaagcagcaaagacacttagcttgaacgaagagaaagcagcgtcatttaggcgcagtcggtaacaagcccttatagggcaagagcaaaccacccgttatacgggtggttatgattttcttctattaatagcatacaaaagattaaatttatcatcgtaatatacacaatgcatttcaagatgcgtcgcggcggcaagggagtaacaaattcgtcgggaacgaatttgcccagccaaaggctggcctccggtgagaggcaggagcctctcagtaatctccgggaacatagataactatgtgactgaggtgaacgagcgcggccaacaaagaggcaatttgaaagacgaagtgtatgaagttagcgtaatcaacgagggaagacatgcgaataaaatttttgctcggcgcatcggtgttgctgttagcgggatgcacgacaaataatcaattaacttcagcaggttccggtgtgcgttttgtggatactcagccgggtagtgaatgccagcgattaggtgaagtgacgggaactcaaagtaactggcttaatggcgtcggcagtgaaagtagttctatgcgtggtgcggctaatgatttgcgtaataaagcagctgaaatgggcgggaacgttatatatggcgtaaatagcccgtcagaggggctgttaaatagctttattcccctcgccagtaagatggtcggtcaagtctataaatgcccttgagtgtacgtgataagcagcatattgaattcgggcaatgcccagaaaaacagcctgcaacatcgtgagctagctgtctgaatttctgtgcactgcctgttatcgaaaaaatgtgaaaaatttccgctggttaattattttttaaccctaaatccaatggagttttgctcggttcaccgccaatttctcttgtcagacatggcaccagatagccggagactttggttaatagctcccgaataatggcttttgcttcttcatcactgacaagaaagtgtgctgccccctgtactttatccaacacatggatgtagtaaggcaaaataccggcatcaaataatgagttacttaaatcagccagtatatcagcgtcatcatttacaccacgtaacaggacactctggttcaacagggtgaccccggcctgtctcagccgagccatactctcccggaatgcctcatcaatttcgtttgcatggttaatatgcgtaaccataatgacctgcaaattggattgtgccagacgattacataatgaaagcgttactctgtcgggaatgacgacaggtaagcgggtatgaatacgtaaccgtttaatatgaggaatagattcaagctgagtaatcagccaatccagttcgtgatcctttgccatcagaggatcaccgccagagaaaatgatctcatcaagctcagtatgttgctcaatatactctagcgctgattgccagttacttttattgcccttgttatcttcataagggaaatggcgtcggaagcagtaacggcagtttaccgcacaaccccctttcaccattaataacgcccggttgcgatatttatgtaacaagccgggaacgaccggatgctgttcatctaatggatcagtggaaaatccggctggagtatcaaactcttctcgtgcagttaaaacctgtagtaataagggatcctgcggatcgccctttttcattcgtgatacaaatgctcttggcacacgtaagggaaacagacgtcgcgcctcattaccttctttcaataaggcgtgcgtgttcagggataacaattgcaacaactcactgggatcagtgataacatcagtaagttgttgtagccagacttctctggcagggtgaatatgggttataatgtgtgccattttttggctaagccatttcgttaaaaattagaggatctccatggctacttatagtaccaatgaattccgttcaggtcttaaaatcatgttagatggcgagccgtgcgctattcttgacagtgaatttgttaaaccaggtaaagggcaggcatttgcccgtgttcgtattcgtaagctgatttctggcaaactgctagaaaaaactttttattcaggcattcagtttgaaagtgcagatgttatggatgtcaatttgacttacctgtacaacgacggtgaattctggcatttcatgaacaacgaaactttcgagcagttagctgcagatgtgaaagccgttggtgacaatgctaaatggctgatcgatcaggcagaatgtgttctgactctgtgggatggccgtcctatcgctgtgactccaccaaacttcgttgagctggaaattgttgatactgatccaggcctgaaaggtgatactgcaggtactggtggtaaaccagctactctcagcactggcgcggtagtaaaagtaccactgtttgtccagatcggtgaagttatcaaagttgatacccgttctaacgaatacgtttctcgcgtgaaataatctcgctttgttattttaaaaaaaccgcagcctcttcgtccagaggttgcggtttttttatggtcatttttacgaccattgcagcggtttgggttgatcgttataatcccttttcatttcctatcgttatctgggacgacccggataaacgtcatctcattggggacggccccgcttccattagatatagggctaaaacatgtcttggttgatacttctcatggagagtctctctgaagttgtagtggtctgcgggtgttaagtatacccagggtttttgccgtttagagccgagtttgatcactgccagtgcgatggctatcagcgtagggttactggcttatgctatgaaaagtcttccggcaggaacagcctatgcgatttggacaggtgttggggcggtaccgcccagcgatttttgggattatggtattgggtgagtctgcaaatattgccagagtattaagccttggcggtattgtggttggcattattggcagtgaaacgtagccagctgatcttctgtaattcgttgattatcattataataaaacccagcattatgctgggttttattttgcctactttttttcataacgagaagtccatatctcttatggcgtcagccccagcgcggttgcgattagtcgctctccctttcggccagtgacgatgtagagcattagcaagtgatgatgatgccagccccgccgtacgtaagacttccgacaatgatgtgccacgtttctcccattcagcaatgatatcggccgagtgccactgtttatgttccatttataaaaaaaccggttacctgtcatttttcaaataaaaaccaatcattcatcagtagcctatg

SEQ ID NO: 373 - DNA, 4820 bp, Xenorhabdus sp.
  CDS (4530)..(4799)
tgctctaaagggatcttgtggtgtgaaggtaaagcgccctattcccatcgcaacaactaaagcaagaaagccgctcaatgcaatttgaatagccagatagttattattaccagatgttgtaatttggttactcatagtgattaaattttcatgtaatcgtttgttttaattgtcgtaatttagttatagcaaatcatggatatgatatacatcttttattagccaatccgcaccgctttcttttatccttcagcagtaatctggaatctatccggtataacaatttcccattaaaaggatctttgccataatgccaccatgctatttgccgcacattgggagttttcatggatcattgttatacctcaggcttaatttcactcgaacaggcgttagaaaaactactgtcccagactgcctctctctccgaaaccgaaacaatctgcctgatgcactcagcaggccgtattactgccacagatattatttccccaattaatgttcccccttttgataactcagcgatggatggttacgccattcgccttgccgatttgaacgaaacacagactttaccgcaggccgggaaagcgctggctggtgttccatttcagggggaatggcccgcaggtacctgcatccgcattatgactggcgcccccatccccacgggtaccgatgccgttgttatgcaagagcacacagaaacaacggaaacaggcatccggtttactcatccggttcgtcagggacagaacatccgcactattggcgaagatattgcccaaaatacagctgtcctgccacaaggcactaagttatctacagcacaattgcctctgcttgcctcgctggggattgcaaaggttgaagtgttccgcaaattaaaagttgctgttttttctaccggcgatgaactacaagccattggtaagccactgcaatccggacaaatttatgacacaaaccgttttgctgttcgcctgatgctggaaaaactggattgtgaagttatcgacctcggtgttattccggatgatcctgatgccctgcgccacgcttttattcaggctaatgaccttgctgatctggttatcagcagtggtggtgtttccgttggtgaagccgattacactaaacagattctagatgagatgggccagattagcttctggaaattagccattaaacccggtaaaccttttgctttcggcaagctggaaaaagcgtggttttgtggcctgccgggcaatccggtatccgcagttctgaccttctatcagttagtacagcctctgattgcacacttgtccggcttcagttcatggcagcctcctcttcggcttaatgccaaagtggttacaccgctgaaaaaatcgcccggcaggctggatttccaacgcgggatcgcgggattgaatgaacagggtgaattagaagtaaaaacaaccggtcatcagggctcccatattttcagttcatatagtctcggcaattgttttattgtacttgaaagggaacgcggctctgttgcagcgggggaaacagtacagatagaatttttcaaccagctgctgaaaaatcaataaatgattaaagaaatgactagtgaactcacagataaagaaatgcttcgttacaatcggcagattgtcctgcggggtttcgattttgacggtcaggaaaaattaaaatcatccaacgtgttaatagtcggtctgggaggtctcggctgtgccgcttcccaatatctggccgcagcgggggtgggaacaatcacattattggattttgatactgtttccctgtctaatttacagcgccaaatcctgcatcgtgatgagcgtattggtatggctaaggttcattccgctgcgctgacactgcgggagataaacccgcatattactgtccgtccggttgaaggattattagatgatccagctctaagtcagttgattatccagcatgatgttgtgctggattgtaccgataatgtcgccatccgcgaacagcttaaccgtctgtgttaccagcataaaacggccttagtttccggggctgccatacgaatggaagggcaactgtcagtctttacctatcatgaggaagagccctgttaccgttgtcttagccgattattcggtgaaaatagcctgacctgtgttgaagcgggtgtcatggcaccacttgtaggtacaatcggctcattacaggctatggagacaattaaactgctgactcagtacgggaaagttgctcgaagcagagttctactgtttgatgcgatgacaatgcagtttcgcgaaataaaactagtgaaagaccctaggtgtgaaatctgccaacgatcattataaacctaaatatctattaatggttattcactcactactcatcatcaggatcaaaaaaggccccttcaggagccttttttgagaaatattaccccgaccatcacaacaagtaggggtgggtgattacacaagtagagtttcctctggtcgaaaattatataacacacatcaatgtatataaatggtcatgttcagggcgaataggtctaacttgaacaataagctggaatgtctttagcatataaaagaggatttgatgattgcttgtgctttataatcaattttctctcaatagtaaccataacaaactactatgaaagcaaccaccctcagtattacacctatagataattaccgagacaaatttaataacagccaaatattagtttgagctataacatagcagtagtttgaaagacaaagagtattgcatcatttaatactccatcaaaatagcggtactttgccaaccagcaccaaccgaccaaaaaacgattaagtcacctcgtgcaatttctttcctttccaacgcttcataaagtgcaacaaatggactattagtcgcagtataaccatacttatcaccaataaataatgccttactctgatccacgccaaggactttacaaagtagcctaatgttacttatagaaaactgtgaaaacataaatcccttaatatcttcaataattaaattatttcgtgaaagtaataattgtattgatccgactgcaacatcgatacaaatggaatcatcaaaaggtgtgaatttcacttgtgctgaaatattatgttgatgaatattagataatccacactctggaaaaagtgaattgttaattactgaagtttgtatccgattttctgaatctataaagccatttccttgttcagttttatgaagaataacagcaacagcagcctcagaaaaacatgaatgatagacaggtgaatgactactgtgagcgccaagataatccccacctacaactagtgcaagctgacaggaagggtgcaccatcattactctggaaaccgtttctaccgctactaatagccctgcacaatttgcattaatgtcaaacgcctaggctctttccccgcctccaatggcatgatgtattttgagcgctgttgaaggaataagatattctggtgtctgtgaagcaaatacaactaaatccagatcattagcctgacaaccgagttgtcggatagcattattagaagctgcaactgacattgtcagtgttgtatcagatgagtcacggataagataacggtttttataaccaagactattcagtaatcctctaacatcaataccttgttcagcgtaatactctataaaccaattattatcaactacagttgaaggatgccaaattcctagcgctgcaattgctactcttgtcataatttttcctgtttataaccatagtttattatagttatttaatttaataataataactgctgataatgaaggacaatgtagtgcttgatgaatactctctgtatctgtacctaaaccactggttccagcgtaaagacgatgcttttcatcgaagatcccttttcctcgtggagtcgatattacctgcgaatttgtttttacagctatctgagttatcaaattggaggcattccgagcaccaaatcctgtccaaaaaatagcatttttattcataactgtgaaaaataatcagtatgtaaaaatggacgtgaagaccacgcgctagaaatctagcgggaataatcattgaattaataaaggtacttatcattagattttcatctatataaattagaccagtttatcctgttggatctgtgaatctgaacgaaacaagcggtatactgtgccaaattcacaaaggactccgtcagataatggctattgaagcaattacccaatcactttctgcctccagattttccacttatcagtcaccgttttttggcgggaaatcccctgaacaatgcttaggagtttatctatagaataaacaactggccagtattttcttacctatattataactcattgaaatttcattacgtaacgccggttatgatatcaatttattgatcatgcataatctttctattatgcgcatgtcgtcccggaacccataagcaaatcgtcgatatggccatgaatggcatgggatgtcgggcgacagcgcggatgatggggattggcctaaataccgtgcttcgccacttaaaaagctcagacccaaatcggtaacagaagccattgcactcggcaccgaagtgattatctgctgtgaaatggatgaacaatggtcgtatgtgaagtcaaagaaacagccacgctggctcttttacgtctacgacaggacaagacgaaaagtgatgaaaaaacattggcagggaaactgcatgtggtcagtaagcgttataccccacgtatagggaggcacactttagggcccc

SEQ ID NO: 374 - DNA, 4404 bp, Xenorhabdus sp.
  CDS (1201)..(1638)
ggccgggtgattcaggaactgctttttggaagtaccagtgccatcgttactgaaaaacgtgcccgtaccgtacaaagcccaggcggaacaggcgcactgcgtactgccgctgattttattgccaagcaaactaatgccaaacgtgtttggatcagtaacccaacctggccaaaccataaaggtgttttttccagcgcaggtttagagatccgcgaatataactattacgatgcagaaaaacacgctctgaatttcgaaggcatgctggcaagcctgtctgaagcacaagcgggtgatgttgttctgttgcacggttgctgccataacccgaccggtatcgatcctactccagaacagtggcaaaaactggcagatttatctgcggcaaatggctggctgcctgtattcgatttcgcttatcagggctttgctaaaggtctggatgaagatgcggaaggtctgcgcatttttgccaaaaaccataatgaattgatcgttgccagctcttactccaaaaactttggcctgtacaatgagcgtgttggtgcctgtactattgttgcagcagacagcgataccgcagagaaagcgtttagtcaggctaaatttattgtacgtaccaactattctaacccaccggctcatggtgcttctgttgttacgacaattctgtccaacgaagaactgaaagcagagtggattcaggaactggcaacaatgcgtgagcgcattcagcgtatgcgccaattgttcgtcaacaccttacaagaaaaaggtgcaaaacaggatttcagcttcatctgtgctcaaaatggtatgttctcattcagcggtctgactaaagaacaagttgaacgcctgcgtgaagaatacgctgtttatgcagtcagctccggccgtattaacgtcgctggtttaacactggagaacatggttcctctgtgtgaagcgattgttgctgtactgtaagttgcattagtacacaatcctatattgatattaaagccgctgaaaaagcggcttttatttatggctttagccagtttaagtcgcgttagcgtcttaaacataaaaccacccgctttgcgggtggagttcaaaggttataccaagaaaaacacctttccgttacgatatagatgttcaagctaatattcgtaactcaaataaggaaaggtgtttatgggcattaaagcacaaagctcagcgcatacaaagtggctgtgtaaataccatatcgtcttttcgccgaaatatagacggaaagtgatttttaataatattcgttcaagtgtgggagagatcctcagagacctttgtaagtataaaggtgtggaaataatcgaaggtcatctcatgccagctcatgttcatatgttggtgagtattccaccaaagctaagcgtttcaagctttatgggatatttgaagggtaaaagttcgttgatgatctttgatagacacgccaatttaaaatataaatttggcaacagaaagttttgggcggaagggttctatgtcagtacggtagggctaaatgaagcgacaattcaaaagtatatcagagagcaagaaaagtcggatttaatctcggataaattgagtagtaaagagcatgtagaccccttcaaggggtaggccaaagcagcaaagacacttagcttgaacgaagagaaagcagcgtcatttaggcgcagtcggtaacaagcccttatagggcaagagcaaaccacccgttatacgggtggttatgatttttaattgggtgaagaattattgcataacgttatgatgtctatcaccgcacagaaataacgtctaataattcaattactcttacagcaatagagatatagtgatgaaatattatgcaaaagtaattgctctaaatgaacacattgaagaagaagttactttatcatttggagaacaaaaaatatgttgctttatcaatgaatttaaagagcagttgtatattggtaacacttatttagttgaacttggattgatatttttagatgagataaaaatagagacatcaaaaaatacacaattctcattacagcaaataaataatacatttgcttatgaaataaatggttacttattcgaaaataaaataatcatgtctaatttaacattcaaagacgatattttgtataatcattcatactttgaaaatgaatatgtcaaaatttatacagatagaatcactgttgattttatttaaaaatgttcaatgtattttattattcccataacctataacagcataaaaacctataaaaaggatttatatctcttgctttcaaatcatatctcctaccgctaaagcgatgtaggagtttgctcttttcctgaaaaactaaaaccctttactgcatatttttccgaaaagttttatttttagggacctgtcgcaggttctgggattaaaattccacgttgcactgctggtctggctgcaattcgatgatgccattcgcttaagtttttataatggtgaaaatcaaagttgataatacgtgcaatatgcgtccagccaaaattcgcgatatcagcaattgaatactcttttccaccaaaatataaattattggctaaatgattatccatggttgaaaaagcccgctctgtcagcttcttatagcgctcagtggcttctttgttttttccctcatcaaaaatttcaaaattaactctctgacctataattgggccaacactggatgcatgaaaaatcagccactgaatcgcctgccaacgggcattatgctcagaaggaagtaatttatttgttttatccgctaaataaagaagaattgccgcagattcaaaaatagtcgtatttgtctcgctgtcagacaaaacgggaatacggccatgaggattaagctgtaaaaattctggtagtaagttttcacctttctcaatatgaacatggtttactacatatggaagctcaagctcttccagagcaatcgttatcttaaatccgttaggggaactgtcagtataaagactaatcatataattctccttgattgggataaggttagtctgctttttttatcgcttcagtttccttcggttcttccggcaatggccctgggcgcataatctggttaaagctatccctgagctgattcacatcaataatcgcttccccttttggctgcaccagaataaatgaagtttcctgagataacatctcttgcagttttttgtttaacacttgcggtgtgagggaagataaaaatatctgtctcagtctgctgtattgctcgggtgcaatatcaatcacattgttctgttgggaaatcaggcgctgattaatgagtacgtctgtgtctgtacgagcatagacggcgaaaagatgctgaagttgaatgcgcttctgcttgtacaattcatcaaactgctcttgtggtaacccgctttcacgtagtgatgccagggcggaagccagataaagtgtggaatcagtcagtttgcctgatggggcgttcaagtttaagtagcagtttgcccgttgatacacaacccgacaatccaaatccaatttggcgttattttgattttcttccagcttcagttgcaaataatggtaaagggcctcacgggcaagttcattagaccagtgctgaaatagtgtctgagaatcattaatcggctgccagttcaggttccaggctaaagaaagcctgtcctgtatggctttctcactttctactcccagtgtttctgtttttaatggcagcaggataggaaccgcaacaggggtctgacgtttaccttctaatgatgaaaatacctgattaaggcgctctggcaatatccggctatccacattacccgcaatatataaagtcattgcatccggcgtataccactgccgataaaatgcttcgacttttttgacatcgacagggattgatacattcgctccgggatcatgaccaatcagcgttgaaccctgtaatcgtgtacgccatacaggatcatgtatgtctgatggtaaagttgctaccagatgctccgatgttttcatcgccggagttaatgtttgcggtgtgaatacagcaccacctgcaatatcggatagccatatcagtgcatcctgcaataattcaggcttattattcggtaagctaaggctataaagggtgaaatcataggaaactatggctggtgggaaagggtttttgctatcaactgcgttgtgccacagattttccagtttttgtgaggataaatctttactggaagagagaacgattttgggtatgaggtaagtataaccctgctgatagcttttctccgccagagatccggtttttaccattaagcgcaactgtattctgtcgttcggccgttgtggggtttgcaggattttttgggcct

SEQ ID NO: 375 - DNA, 5537 bp, Xenorhabdus sp.
  CDS (2949)..(3347)
ttaaagaattcacgaaaaataagtttaactaatgtattgttgattttgatttctttctgatatttaaattagttatgactcataaggttcctgttacttagggtgctatggcttgcttgtgttttaaagctacgttttctgagtaatcaggaaatgattgagagcaagaaagtcattgctattggacagcggacagccacgtgttttaaaggacaaaaaccatgtcagacagtttccagaatgaagttcccaaggctcgcgttaatattaagctcgatttacacacgggcggggcacaaaagaaagtggaattacccctgaaattattagtgatgggtgattatagcaatggccaagaacagcgccccctttctgagcgtgaaaaaatcaacattaacaaaaacaactttaacagtgtacttgctgactttcagcccggcgttaaattaactgttgagaacactctggcgggagatgggagcgaagaaaacgtggccctgagcttcaaggacatgaaggattttgagcctgaacaagtagcccgtcaaatcccacagctgcgcgctatgttagcgatgcgtaatctgctacgcgaccttaaatctaatctactggataacgtagagttccgacgtgaactggaagtaattttgaaagactcatctctgagtgacgaactacgcagtgaattggccggtctggccccgaaacatgattaatttaatggataccttgactacaggattatgctgatgtctgtaaatactgaaactatgcaaggggcacaagagacggtgctggctcagggaacggtgccagaaggtgtatatgcggcgctgtttgagaaaatcaacttgaacccggtttcaacactgggggatatcaatgtatatcaggataatgcggctctggcggatgcgacagcggatgagcgcgtgacggcagcggtgcaggtatttctggagcgtctgaagtctgcgggtcagaaagtggaacgactggataaaaccttgctggatcaccatattgcggagctggatcagcaaattagccatcagttggatgtggtaatgcatcatccggaatttcagaaagtagaatcagcgtggcgtgggctgaaatttttggtggatcggacggactttcgccaaaacgtgaaaatagaagtgctggatgtggcgaaagatgacctgcgtcaagactttgaagatagtcctgaaatcattcaaagcggactgtatcaccacacctatattcaggagtatgacactccgggtggtgaaccgatagcagcgataatatccgactttgagtttaatcgtagcccgcaggatgtggctctgttacgtaatattgccaaagtgtctgcttcggcgcatatgccgtttattggctcagtagggcctgccttctttggcaaggaaacaatggaagaagtggcagccatcaaggatatcggtaactactttgaccgtgcagaatatctgaaatggaaagcattccgggattcagacgacgcacgctatatcgggctgactatgccacgagtattgggccgtctgccatatgggccggatacaattccagtacgtaatttcaactacgttgaacaagtaaaagggccggatcacgagaaatatttgtggactaacgcgacatttgcgtttgctgcaaatatggtgaaaagctttatcaataacggttggtgtgtacaaattcgcgggccacaggcgggcggtgcggtaaaagatctaccaatccatctgtacgatttaggtacgggcagtcaggtgaaaattccgtcagaagtgatgataccggaaacgcgcgagtttgaattttctagtctgggctttatcccgctgtcgtattacaaaaaccgcgattatgcatgtttcttctctgctaactccagccagaaaccagcactgtacgatacagcggatgcaacagccaacagtcgcattaactcgcgcctgccatacattttcctattatcacggatagcgcactatctgaaattgatccagcgtgaaaatatcggcacgacaaaagatcgccgtttgctggagttggagctgaataattgggtacgtgggctggtaacagaaatgactgacccgagtgatgacttacaggcatcgcatccgttgcgtgatgcgaaagtcgtagtagaagacattgacgataacccgggctttttccgtgtgaaactgtatgcagttcctcattttcaggttgagggaatggacattaatttgtcactggtttctcagatgccgaaagccaaagcgtaattaaagattgtacccagttgatttcaaggtgtggttagcaaagtcactgtttgaaaactgatagggatattacgaaaaatggacgcttatcatggatagatgagcaccttaataattttagtcattgcattcttaggaatggaactggctgaaattattaaagagcagtagaaactttactgacttactttgcaatacgggattacggttttgatgttgtccggttgcatttaaagatacggcatctgacaggaggttagttgttgtatcaacctattgtattaaaaattaatttgttattacaggttagccctgtcagataacaaatgaatgtcttcaccggaactttgtgaagaatttatttaaattatggagaaataaaaatggcaattcctgtctacctatggctgaaagatgatggcggtgcggatattaaaggctctgttgatgtgcaaagccgcgaaggcagtatcgaagttgttgcacaggatcataacctgtacattccaacggacaataataccggcaaactgacaggtactcgtatccacaccccatttatttttccatataaaaggttaaaaccaccgactttagtcggtcagctttagctgcgatactgtgttgcacgagaggtgcaatatggattacagatatggcagccacacggtatttcagattgagtatcattttgtgtgggtaacaaaatacaggcgcaaagtgctaacaggtgaagttggtttacgggtgagagagttagttcgtcagacctgtgaagcgttcgaaatcaggatagtagaaggggtcgtgagcaaagaccatgtacatatactggtgagttgtcctccgagcttagcgccctcagaaatcatgaggcgaataaagggaaggacagcaagtaagttgtttgaagagtttgctcacttgaaaaagcgttactggggtcagcatttttggggcagaggctatttttgtgcgacggtaggtcagttaacggaagagatgataaaggcctatctggcgcatcattttgaaccgaacccgaatgatcacttcaggctggataattgacgcatcgtttagccgatgcgtatccggactttcagtccgttaatcactaacccaccgactttagtcggtggttgttgagttttgttttaccattttctcctacccgtttattaatagaaaatacgtattacgttgatgataaattacgtgataaatcgatattaacgtcggaaattgctgaatatgcaaatcagcagggttggagattacgttctttagttcgagaagaatgcggatgtttacctattacattgatggggaataatccggaattctggcagagtttggaaggtcagcctgtaagtggcatgagggccatattatcacatccgactacaggctatacattacaacatgctgtcagattagcggacagaattgctaatttaccggtatttgatcatataaatttgtttttaactttaaaagaatattcaaatgctcaatggaagaggcagcgctttttccgtatgctaaatcggatgttttttttagctggcgaacaaaataatcgatgggtaataatgcaacgtttttataaattatcgccagaattaattagccgtttttactccggaaaaacaacgcgtattgacaaaatacgcatcttgctaggaaagccaccaattccgttggtgagtgctattagtgccattattaaacgacatccaaaacttaaaaattatcatcatgaatagaattccggttattggttcaggatttggcggtatcgccttagcgataagattacaagcagctaatatacccacattgcttctagataaaagggataagcctggcgggagggcatacgtttatcaggataaggggtttacatttgatgcgggaccaacagtaattactgatccttctgctattgaagaattatttttactcgctggcaagaaaatgtctgactatatagaattattaccaattagtcctttttatcgcttgcagtggcagtcgggagagatatttgattatggtggcgatcaagttaaattagagaaacaaatagctaggtttaatccaggtgatgtgcagggatatcgtgaatttattcgttattctaaggccgtttttaaaacgggttatttaaaatatggcatgtctcctttcttgtctttcaggagtatggtttgtgcaatgccttcgttggtacaattatctgcatggaagagtgtttatggtattgtttcgaaacatataaaaaacgagcatctgcggcaagctttttcatttcattctcttcttattggtggaaacccttttacaacatcatctatttacacgttgattcatactttggaaagagaaggtggtgtttggtttcctcgtggtggaacaggggccttagttaacgcattagttaaattattcattgatataggcggggtatgtaaattgaatacccaagtcgaaagttttatcacgaatgataatcagataactgctataaaattaaatgatcagcgtgaaatatattgtaaagcagcggcttcaaatgcagatgttatccatacttatgaaaagttattaggcaggcattgtgtgggtaagagacgttccgactcattgaaagaaaaaaagatgagtaattctttattcgttatttattttggtttgaataagttacacatccagttagctcatcataccatttgctttggtaatagatataaagaattactggatgatatttttgaagggaatagcattcctggtgatttttctctttatctccattcaccttctgtcacagacccgactttagcaccgcccgggtgtgcaagttattatgttcttgctcctgttcctcatctgggaaatgctcaaatcaattggcttgaagaaagtcctcgtttacgtgatcgtatattctcttatctggaaaaatattatattccggggttacgtgatcaattagttactcataagatttttactccatttgattttcgggacgagcttaatgcttatcacggttctgctttctctatagcgccattattactacaaagtgcttggtttcgccctcataatcgcgatagtgatattgaaaatttatatattgttggtgcaggaactcaccccggagcaggtattccgggagttcttgcctctgctaaaatcactgcgaatttaatgatagaggatttatgttaa

SEQ ID NO: 376 - DNA, 5194 bp, Xenorhabdus sp.
  CDS (834)..(1238)
tgtgcatattcagagaaaagcggcacgtaataagcccttatcacactgccaaaaaggccgaaataagaaaatagcgaaaactcgggcacgcgtagaacatatctttggctcactctctcagatgggtgaaaaaattattcggacgataggccagctgcgagccaattttgcgatgacgatgaaggcaacctgctatgatttgcaacgtttggtttatttcggaaaatcgggtattcatgctttttaatttcgagatgtgatgaaaaagtgatgcgtttgtttttttcccctgaacaagcaagaaaaagtcatacacaataaggtcagttattggtgagttcaaaattgatcttattttttgtattgagagtttttagaggttcccacctgattattaaccatcttggcgaaattctggccctcaaaatcacggctggaaatacggatgacaggaaagtggttcgggaattagcaaaagaattaatcggttccttgtatggcgacaaaggttatcttagtcaggaactggcaaacgatttagcacaaaacggtgtcactttcatcacgaaaaagcggagtaatattaaagcgagtgtgctggaagattgggataagataatgttatcaaggcgttttattatcgagacggttaatgggcaattgaaaaatatctgtcaaatagaacattctcgtcatcgaagtataaaagggtttctgttgactgttttaacggggttaattgcttattgtcataaaaagaagaaaccatcactgaaagttttctactcagaagaagaagatattccagtgacagcttaaacagaattggggttaaataccatatcgtcttttcgccgaaatatagacggaaagtgatttttaataatattcgttcaagtgtgggagagatcctcagagacctttgtaagtataaaggtgtggaaataatcgaaggtcatctcatgccagatcatgttcatatgttggtgagtattccaccaaagctaagcgtttcaagctttatgggatatttgaagggtaaaagttcgttgatgatctttgatagacacgccaatttaaaatataaatttggcaacagaaagttttgggcggaagggttctatgtcagtacggtagggctaaatgaagcgacaattcaaaagtatatcagagagcaagaaaagtcggatttaatctcggataaattgagtagtaaagagcatgtagaccccttcaaggggtaggccaaagcagcaaagacacttagcttgaacgaagagaaagcagcgtcatttaggcgcagtcggtaacaagcccttatagggcaagagcaaaccacccgttatacgggtggttatgattataaacaatgcaaatgtcccgcttctccaggattcaacgcgtcgtattgagctacacagcgctcatatgctgctgggtcgaccaactcagatctacaaaaccaagcataggtctgcactgaagtaaaaagagtcgtccctgcgattagggaaagaagaagatattttttcattttactatccacccataacgtgattatcaagaaatggataagcctaataaccttatctctatcgaataataaatgaatgattcttaataattagttaacccttgaaattaaaatcagtatttttcacccattcccttagtggttaaaggaatacgaataacccatgctcctgagaaaaacggggtatcatcagcaatatccgctgtaggcagacgaagtgatatgacaaccggcgagatagcctgtattgccgtaatgatttacgagttgtaacgctggataaaaaattttcctaccaaatattttctggctcaattttcttagtacaatctatccaattatcggtcgtcacaaaaaggatatttaaagtgcaaatacctttttcttgatatgatatttaataaacttatacgataaattgtattagtaactttcacattatttatattattcatgaaaccggtaggtgagtgattaagggtattaataaatttttattgcagtcataatttaatttgatattgtaaagcaaacactcaataaaataatagagtaaaatatgaaacaacagctatattggaaaaaagaaaattatcacgtatcaacagataaatctttgttagatgttacagcaatccatcagttccttacccaatcccattgggcgaaaggaatcgatattgaaactgttcagtgctcaattgaaaatagtctgacattcggattgtatgatgaggaaaatcaaatagggtttgctagattcgtgacagacttttcaacttttgggtatttatgtgatgtttatgtattggaaaaatatcaaaaacagcatctgggaagctggctaatggaatgttgccaatctcatcctgttattcagaaacttcgacgagttatgttggtaacttcatctgcacattggttatatgaaaaattgggttattcacctgttaatcgtgaaaattttgtttggcaaatatttcgcccggatatttatttaaaaaattagtaccggtttttaccgaagactgaatttattaggaaatatatcaatattttctgatgatagagtaaaagcagaacattgctgagaaaagtgaacgctgtcttccaactccattcctgccagccagcaatgagcaagccctgccatcataacgtcaccagcaccattggcattaacaacgttatttgttaatgcacgtgagtaaccggatttattatctagttcactgtaatagacgccttctgcatccatactcaaaattatccgttgaacaccttgctggtgaaaccaagaagcagcgagagtagcatcttccagtgtttcaattttgataccacttaacatctcagcttcagaacgattaggcttcagtgtatgaatataaggtagccagtgacggatattagatgctttgaatgtagaaactgtatcagcaaaaatcgggacattattggaattaagaaatatccactctaatgattcatgagataagttacaatcaataaccagtacactggcactctgaatcaatttcttggattgagagagtaatgatggattaagtttatcaagaatgctcatatcatttatcgaaataatacattttccattttcatcaataaatgaattacagactgatgttttttcatcatccagcttatgtaggtatttagtattaacaccggatgattttgttttttctgataatattttaccgtgttggtcattaccaacaacagaaatcaaatagctttcattttttaatgcagcaatgttttgtgcaatatttcttcctaccccaccgggggtggaaatgattttccctgggttggaatcattatatactagtttatcaaatgcataactggttatatctatattggttgctccaatagtaacagcataaacatcactggcaagaatataacctttaccttttatatagccttttttacttaggttcataatatgccctgcaacacaggaacgactaataccaagaatatctgcaatttcttgctgttgtataaaaggatccctctttaatatttgcagtatctgattttccctgtttgacatattgtggccttggctattttttgtgactatatttctattgtatatctatcaaacagtaaagactgatcttatgatttattctatttttgagaaagtgatcgtaagtttaataaaggttttttatgatcaataatgtgatctatatctaaaatattattctgataaagctttggtgtttaggataatgaaaagatttataatgtaaactatattttatcctgtataaagtatatttatatcaatgggttgtgatggtttttgttcttttcaaacaagtgtttggtttttagatattaatgcaataattatatgtaatttaagaaattatattatcaaggctaaactacaagttacatattttgaccagttaaatacagtagagaagttatttttattattttctataaaaaatatcggtttattcatttggatatatgactaaaaataattcattttttatttttatatttcatatggtgatgatgaaacatcttgtgaatgtgattttattaaatgacttggcggtgtttattttttgctcatgtttatgaagtgtttgtattctgactgtagggatatggcaatatgtgagtgataatttgatattaattaatctcactgaaaatattgaattactatgttaatgaaaattttatgattggtgttttatgattataaaaaacataggaatattattaatattatatgttcctttaacaatagcatctccggtaaattttaatgaaaacttaccttcattaaccatgaacgaagggattaataatttacagaatagcgaaagagagataaacaggttgattgaagaaaggcggcatcaggagatgattaaccgttcaaggcgatattctacaaaagaatcactcgtaaatctgaaaggtgagaaaaaatgcttgccaattagtgggatttatcttcaagggatatcattattatcatcatcggacttaaaaacattaagtccaatttctaatagctgtattaccagtaataatatcaatagattaacatctgaaattacgaacctttatgtccaaaaaggatatgttacagccagagtaaaattggttcctcctgactatgagaaaaaattagggattcatgttatagaagggtttatcgaagatattaggggaggaagtctctgggtaaacagtcagactctttttcctgatctaaagaatatgccattgaatatacatcaacttgaccaagggctagatcaggcaaatcgtttacaatcaaataaaacaacgctagatattttgcctggtacaattaatgggggatctattgtttttctgaataataaacatagttctccgtggaaagtttctttaacaacagataattatgggcaaaaaaatacaggaaaatgggtaggaagagtaaacacgagttttgatagcccgctggggttatctgattttgtcagccttagtggaagctctactttgaaaaaaggccaaaataaatataatcgaacttatattttcctttattcattgccatatggaaagtcacatttagcacattttatgttggttctaatatca

SEQ ID NO: 377 - DNA, 5194 bp, Xenorhabdus sp.; identical to SEQ ID NO: 376
  CDS (385)..(777)

SEQ ID NO: 378 - DNA, 4513 bp, Xenorhabdus sp.
  CDS (13)..(558)
gtgctctaaagatcggtcgccctgtattatgtgagttgtcaggaaaccaataacgataaagaactgagctggcacattttgacctcagaaccggtaacctgtaaagaagatgcccaccgtattctggattactatgaaaaacgttggctcattgaagagtttcacaaagcgtggaaaagtggcgggacacgggtcgaagcgctacggatgcaatgtaaagagaatctggaaaaaatggtggtgatcctggcgtttattgcggttcgtgttcatcagttacgctatgtgggactcaataaatcagaggcggagaaacaaagttgtgaaacgttattaagcccgttagcgtggaagttattgtggacaaagcaagagaagaaaaaactccctaagacagccccaagcgtttattgggcctatattaatttgggcaaactggcgggctggtatgactctaaacgaaatggccgagtaggatgggaaaggctgtgggaaggatggttcatgttacaaaccatccttgacggttatttactgtccaagtctcttgacctatgaaatatgatcaagagacagatgttgaatggggcttatttttttgaatcttaagtacaatcagaataaaacagtgtcggatctggaaaattccgtaaaagttttgtcttttagattatatattctatccgcggcagcaatcgtttcaggccgatgcgctacaaaaatgcgggtaatgggcatctgttttatagcgttattgatcttgcgttcattaaatacatcaaggtcactcgttgcttcatcaagaaaaaggattcgtgggcgcttataaagtgctctggccagagatacgcgttgcttctggcctcctgaaagaatacttcccatatcacctatcattgtttcgtactgcattggcatagctataatttcgttatggattgctgctgctttggcacactcatacatccattcaaggtcgggctgaggatcaaaagaggaaatattatccatcagggaggccgcaaaaagtttgtcttcctgcatcacaaatgcggtatgtcgccgatattcgtcaataccaatctgtcgtatgctggttccatcaatcaatacacttcctgattggggaatggctaagcccgccattattctgagaagagtggatttaccacaacccgacgacccgataattgcgatattttcacctgcattaatttccagattgatatctttaaaaataaatggttcagcttctccgtaacgataggagagattattgagcgttatccgaccttctacagcctcaagcggaattaagttttttgaataccaagcatcctctgtttctgcggttgcaacgtccgttaggcgatctgaatgtattgatataaggcgaaaattgaaaagtgaattgatcactttaatagagcgggtaaggaacatatcagcgtagagcataaaagcaaacagaatccctgttgtaattattccatgttccataagtttgccaccaaaaaacaaaattgttgctgatgagagcccggtgagaaaccctgacagggtttggtttataagatctatcttgaacaaatgcgctcgggcattagctgtgttgataactttattaagccatgtcatacgccgattttctgtcagggaaaagactttgacacatgccacattccgcacggtttcaaggaaatgtgatgactgtaatgcttcattgtgaatggcctcaattcgggcacttttgtatgtgttataaagggcaagttttacgctgagataaataaagataatgagcagggaattaagagccagaagcgcgctgtaacaaaacatcagagttatcagtgttagtagaatgagcacatcaagcaaggaagtcagcatttctgcggtgaaggcttctttaatttcattgagtgatgtcagccgggacgctatatctcctacgtgacgcttttcaaagaatgttaacggaaggctcagtagctggttaaaaaagcctatactccattgtattcccaaagagtagcgcatcgccatcagggtccaggcccggataatactgagtgcagagcggagaataagtagaaaaataacgccaataacaatcaaattcagcatttcgaagtcactggatcgcaaaacaatatcaataataaattgagaactgaggggaattgagagagcgagtccctcaataaaaagtgatatcagaatgatttttagcagcgtgattttaaggttagctacgccccggaacatatctgtgatagtgatactttcactcactttttcctttttaaaatcagatcgtggccatacttccagaactattcctgtgaatttatttgataattcttttagggaaatggtttttttccctaaggcaggatcatggatgatggcgtttttctttgtgattttttttagcacgacgaaatgattaaaggaccagtgcagaatacatggaagcctgacgtttctgagttctccgagatcaaggcgtatggctctggcattcatatttattctatctgctactgtgatgagttgtcttaatgacatgccgttgtttgatacgtcgaaaattttcctcatgctgtaaacatcagtttcccgttcgtgccagcttgcaatcatggctaaacaggctaatccgcactctgtcacctccgtttgcatgattacaggtagttttttagtgaaaaactcgaaaaagccactgattttatattgtgtatccttattgtgtgttgtcacatattctttcatataccctcttcactggcataaagagccattcgtaattctttctggttcttacatatatctctgtctctactttcatacccggcagaagagagagtgatttttgttgttctgtcataactggccgtaccgttatgcggaaaagtgctttaccttcactattggtctgagttgatgggggaatattgaccggggcttctgaaattgtttcgatgactcctgcaacctttccataccactgatatggatacgctgctatcctcatctttacctgttgtccatcagccacttcgccgagagaatcggatgaagaaagcagttcgatttttggccttgcagccagaggaacgatgacggcgacttgctggcctgtttttactctctcacctttatgggctgttacactggttatctttccattaaatggtgcaacaatcagatattctctttgcctttctatattcagaatcttttgttttatgcctgcgatttcagctgtaattaatttttttgctgaatccgactccctgtcagtggctgatattttatttttcaaatccagcaactctccttgcagggtaattatttttacccttgcagacgagagatttactatggctgaataataatccttcttcctgtcaataaattcagaatcacgtgcaaggccttttttacgtaactgctcatataagccggattttttttcgaaccatttcctctgttcttccgaattttttatcaggatatttaagccatttatttcctgttctttattttttattctctcaataaagtaagttttattttcatcagcttcggtggtgataatattcatttttttcaacagaatattctgttgttttttcaaactctcttctatttcaaatttggtagcaccgagattagtttcagtttcatcactcacagaaaaaataacttcaccttgcttaatgagttttttttctgaagcgactgaattagtaattatgccattgttttgtgcaatgagtgataccgccggagggtcataaatgacattaccggtggcgttaactctttcgctataagagccgaatataatgattgagacaataaaagcaacagtcagcatgcctgtcagaatacaaatggagaggctggatggaatatccagataagatacgccaagccatccctcctgtttatgttgtagagcttcggcacgatagattgagttttcatgcttttctgtgctcatcggaaaaaaagacctttttatttttaaaatctatgattaattttcggtttcggagaaagctgtttccgagaaggccatcaattttttccatatgctgaaaatgtccgtcaacaattacagccccgaactgttctgcttttccggttactgatttaactgtaagcattgcggcttcacatcctttattatccatttccggattaaccacgaggcaacttgttggcgtataagctttaagtctttcacgccatatcatagatacggtggcaccggtatccaggatcatgtggtatttatgaccagatagctcgacatcaaaaaccattccattggaagatctctggaaaggaagttctttaaacccttttggtggtttgtttttatcggtaacactattttttattgtgagtgaattagagatataatctaatattatttgtttatttttaaaagcatcaagacccacaacaggtttatcgggtaactttagagcac

SEQ ID NO: 379 - DNA, 3717 bp, Xenorhabdus sp.
  CDS (1353)..(1751)
atatctcccttatcgatcaatgccttgcctatactgcgataagcctgaccatttttcccgccataaccgaaaaacgttagcgggctgttatcaccaaaatccacataaccacttccttgcacttccatgaaaaaattatcaatcagggaattgctgtagccgatgatccattttttatcgagggccccattatagatagctgagcgatccggtaagcgggaaatcgatttatccggcattcggtacagaggatatttaaattccccttgcctgctgtggcgagcctgcaaaataggcgtatagtaaccggtaaatttgacattaccgtagttgtcttcgccttccatctgataagcaagcagaccaaactgatttaaattacggacatcaccaccatactgcgtccagttttcaatcgcatcaaaagttgcgcggtggctggcatatagtttgggagaggtttcactgattaatctcacctgagtggcaaaatcactgatattgacgggagagccttgcgtatttggtgtatcaaccagccggagatcctgaacaaaatggccatccttatactgctgcccttgcccagtttgctgcccttgttcagtcgggcgctgatgacaggcagataataaagatatggcgatgccacataaaaaatatttactccaaagtttcatattatgcttcatatcctgccatccctaatctgatagcgaacaatatcaaacctgtataaataataaaatgtagttagaaaaaaatagataatgctacttaaatcacgagtgaacaaaaacaaaacagagcgcttcgtttttaacccataagcaaacaaaattggtaaatatcaacaaaaaagcttgcaacggaaaggatccagagtatagtgtgcccacatcggacgcggggtggagcagcctggtagctcgtcgggctcataacccgaaggtcgtcggttcaaatccggcccccgcaaccaattcgatatcatatttatcgagacaatttagcatttgcagtagttagacggacgcggggtggagcagcctggtagctcgtcgggctcataacccgaaggtcgtcggttcaaatccggcccccgcaaccaattcgatatcatgtttatcgagacaattcagcatttgcaagcaattagacggacgcggggtggagcagcctggtagctcgtcgggctcataacccgaaggtcgtcggttcaaatccggcccccgcaaccaattctcagattcacatctttatttttccatataaaaggttaaaaccaccgactttagtcggtcagctttagctgcgatactgtgttgcacgagaggtgcaatatggattacagatatggcagccacacggtatttcagattgagtatcattttgtgtgggtaacaaaatacaggcgcaaagtgctaacaggtgaagttggtttacgggtgagagagttagttcgtcagacctgtgaagcgttcgaaatcaggatagtagaaggggtcgtgagcaaagaccatgtacatatactggtgagttgtcctccgagcttagcgccctcagaaatcatgaggcgaataaagggaaggacagcaagtaagttgtttgaagagtttgctcacttgaaaaagcgttactggggtcagcatttttggggcagaggctatttttgtgcgacggtaggtcagttaacggaagagatgataaaggcctatctggcgcatcattttgaaccgaacccgaatgatcacttcaggctggataattgacgcatcgtttagccgatgcgtatccggactttcagtccgttaatcactaacccaccgactttagtcggtggttgttgagtgggattttatgctcacataaacacgccaatgcttatgaaccacatcacaaaaccgtcaatgattgagcgccatttgattccatgtggcttatatttaatgcgctataatatcattgtttatatcggtatcctctttaggggagcagacgatatttaatatagaagccttaagggttgtagcccttgaggctttgctatttatgataatgaaaatagaaatggataaatccaattttatgataaatttaccttttatcctgtttttttactctttcagtagttaaaggttagagaaagatgtttgacggtacggggtagtgaattttttaacaaaaatgtattattgaatttatttgtgacttttattaattcagggccggttatattttctttccgcctttttatatttcacgttagaatttgattggcttaatattcatgagatatatcacaaaaaatggaataacttaatgtcactttacgcaacgtgatttagactaattgcgttatacttgacatgttctatgatataaactctcttgtttatggtagtagacgatttatagaagcctcaatggttgaaaccatcgaggcttcgccgtttatgatgatggaaatatacagcttcggatttgaactatctattgatcttagttttttcgctattgaattaataatgaaaaggattaaattgaaaaaaaacttaatatattctcaaatggattcaggaaaagtgatgagtgatagcaataaaaatgataagaaaaagaaaattcaaaaacgtcccagtcattttcttccttacaaaacgacgtatgatttgagtttacataaaagagaactcaatttaatcaacatactgatgcaggttcagggttatgaatatggtttttttactgtattaggtgttcgccctttatcacaacgggggaaccataaaaacagtgctatctatgttgtacggtgccggtgtggtaaatacgcagtcaggacactcaaggcaatcaaaaatccggtgaatgtggttgatatgtgtgagcattgtcttcatctgtacaacctgagacgcagaagcctctttctcacgacaggaaaatatgttgaattgccagaattaaccggcattaaatataaatccccgttagagattaaagtctaaggaagccgtgttcctgataggtgacggactctgaatttaagactgtattcaccctgatgttaggatgtttgcgctgaattttctcatcttctgttggaaagtggttcaccggcaaaacagctttctactgtccgctctgtccggttcagaaaaccacagtctgttgaatccagcaggctgtcagaataccgcagacgatttaatgacgggggaggcgttgtttattgtgttgttgatgatctggctgtatacactggtccgaagtttggatgagccaagctgtagagtatctcataaagctgcatcaaggggtgatgaacaaacgagtcattatgtttatcaagaaaaagaatggtacggtctttcccattttaatatcggacaaaaacttgacctcactcagcctaacctataaggtatttaacggttactcatgatctatcgcctgcaaggatcagcgtgaagcggcgaagtcaaaactcccgtagcctgcaagggagagcattacaatgcggtacatctgcgcacttttggaagcagatatccccggacacctaaccctccgtctgaggatgaaagtttcccggtgttattcaccggctattcacacagcagggtaaaacgaaccctgtcttacgctgaatgagactattctcatcagtacaacctttatctgcattttcagttcatcacggtaaacgtcccg

SEQ ID NO: 380 - DNA, 5944 bp, Xenorhabdus sp.
  CDS (5668)..(5928)
ctttaaaaattgcctgacgcaccacggaacggtgaacctgaaccgacacgcagggagttgttttaaaaaagactaaaaatgaataaaacaaacgcaaagtagcaggagaggcgagaatggcgcagaactcaacacgttcaaaggttgaacagttcagaaaagcatttattactcatgcctgacaggcgggcggaagttttgttacggtggcggatcgggcgcggattgcccggcagttcctcgattatctgaaagacaatggcatcaaactccgccaagtggatagcctgaaggtgaaatatattgagcgctacatcgctgaacgcaaagccaacaatctcagtcaccggacactgcaaaatgaaatgtcggtgctgcgagccattttagcgcaggcgggaaagcataagctggctgatcccaataatgcccgcctgagtaaccgggcactgggtattgtcgggacgagtcgcaagggaacgaaaatggcgctggctccggctgcattccgggacatttttcagcaggtggaacaaaaagaccggcgtgtcgcggctgtgatgcaactggcgtatgtgctgggactgcgtaccaaagaagcggtggaagcctacaaatcgttagcgacctggaagaaagcactggaaaacgggcatacgtctgtgcgggtggtgttcggtactaaaggtggacgcccccgacagacggtcatactggatcgggcagccctgcaacacgcgattgcttatgctgaacgcgagcaggccaggcgcagtggtaaactgattgataagccgacgatcacgcaggccatcgaccgttaccgctatattgtcagaagctcaggattgacgggtaagaacgccccgcacagtatgcgttaccattttgctcagcaatccggggagcattatatagcgcaaggattcagcgagcgggaagtgctggcactggtctcgatggatttagggcatggtgatgggcgcggacgttatattaagcaggtgtactaccagaatattgaaagtgaataaactgtattggatcacacccagtttgctgctttatatgagcaaagcaaccttgaatcttaggcgattattcctatgttacgctaactcacttttggacagaaatgcgttagcggcattgctttaactcaagtagtttggattaaaaagatgcaaaatttgaattaataacaacaaagtctctctgtcagtatgattttttcttgcaagcaggatgcgttcatatagtcaactatattgacaattacagcttctctaccaatgaacatttcaagatacaagagtacggcttggataataaatcaagcatattcaatggtgattggtatatgaatttacgaaattgaaagaataaaaatggtgtgaaaataataatttttatggtttttaatcttgatttgagagtgtaatgtttcaaataataaaataagggaattaaaatgctatgaaaatggtgagttttagatgtgtgactgtcaatttaataatgttaattcaaaggaaatgaaattcttgatcaattaatcggttaactatctatgtgataaaatgctttttaatattaatgggtgggtagtaattgtgacttattactataaataataacgttcatgataaaaaatattattttaatctttgagaaataaattaaattaaactatatggactggccttatggtttttttatcttttaaatatattagtgtgaattaatttccgtataaataagaataatttttattgtaaattattctgtaaatggaggtgtagtgaaaaaaataaacatcctaatcgttggctgtggttatgcagcagatttttatgtatcaaaccttaatagttatgagagactaaatattataggttgtgtcgatagagataataataggcttgaagctttctcaaactatcatggtttagattcttattcttctgtaagtgatgcattggaaaatataaattttgacatattgctaaatttgacaaatccagaagaacactacaaggtatcactggaagctataagtaatggaatttcagtatacagtgaaaaaccatttactatgagtatggcagaatcaaaaaaattggtagagattgccaaaaaaactaactgtattataacaagtgccccttctttattattaaacccgccaatgataaaggtaatggaaatattgatttctggcgaaattggagaaatacttttaattaagagttctatccatgagggaccagttcataaaatgaactttgatgattggattagtccttcaggcgcatcttggccggcaaaaaatgaattcgaagttggttgcgggtttgagcatggtccatacattattgacctaattttggctttaatgggtacgccagatagcataagatatagctctgctttgatttatccagataaaaaagttacaaattcacccgctccagattggattaatattactttcgagtattctgatagtaaaagagcaaatgttgagcttagtattgttgaaagtgaggagcattgctttcggataattggggataaaggtgaaataatagttaaagatttatggatggcgaattcagaaataattgtaagaaagaataaagaagatcaaataaatcgtccatcagaatatttttccttaaaaaaaacacttcatcctcacaagatagacagaagatataatgacactcattttattgatcaagctactggagtcttagacttagctacttctctaaattacaattttgaacctttgcttgatattaatcgatctttggaatccattaatataatagaaacaataatgacaaatagtaaatttagaccacttactaaaacgaatgaaactatattagacatagaattatttttatcaaggataaggaattttttcttatgataactctaggggttagcggtagtttcgaaacatttgaaacacctgttattggggatataccaaattggtttggtcatgatgcttcagctgcgatcatcaaagatggtaagatcgttgcagcagtggaacaagaacgtctggatagaattaagcattctaaccaatttcccattgaggctattgttgagtgcttgaaaatagcacagctaaaaataactgatgttgataaaattgcattttattttgaagagttaaatacagatacagggcttggattacaatatattgaaagaaaaaatcttgaggttgaacattctagaaatttaattaaaaaaatacttgtgagtaaatttggggaagtagttaaagatattccaattgaatatatacgtcatcatgatacccatgctatcatggcagcagaaaactcgggtttcgatagttcattggttattgtaatagacggaaatggggaagatgagtctacatcaatttactcatatatcgacggatttgttaaaaatatatatagatatcctgtctcttcatcattaggaagatattatctcgattgtatatctttactaggatatgaacgatttgatgaatataaggtcatgggattggcttcctatggaaaacaaaataaatttgatgagctttttgaaaaccttataaattttgaagaaaatggaaatatttcatttaatcatacaaatatacctgcttatcttttagataatggtatatcgccaagaagagaaaatgaacaaatttcagaaagtcatcaaaattttgcacattccatacaaaagtatctggagaagatggcattacatattatatctttctggtcaaaaaaattaggtcaaagaaacctatgtcttagtggcggagtagctttaaactgtacattaaatgggaaactcgccttcagtgggttgtttgacaacatatttgttcatcctgcttcacacgatggtggaagtgcggttggtgcagccatgtgtgcaatgtaccctgatgctaggattaatggaaataaactcgagaatgtttacttaggacctgatataaatagtaaatttgcatttgaaataatagaaagaaataaaaatattatagaggttgttaattctgaagatgaactccggtttcttgctaatgaaattagtaatggcaagataataggatgggcaagaggtcgaatggaatatggtccaagagctcttggtagtcgtagtatacttgctgatcctagacccattgaatcaaaatatagaactaatcaaattattaagcagagagagtcctatcgcccatttgctcctatggtattgttggaggaaatttcggattggttcttggtcccagattgtaaagttaatttagagtatatggtatttaaccttccggttattaaggaaaataaacaaaaacttgcagctataacacatgtagataacacagcaagagttcaagctgtaggaaaatataataaggatatctatcagctaataaagaactttaaagaaatcacaggagttcctattttattaaatacttcattcaatgtaaatgcagaaccaattgtatgtgatgcatatgatgctatacagtgttttctacttacagatctggactatttggttgttggtgatttcattattaagaaaagaatccatggtgataatctatataagttatttagaccaataaaaaaagagtttgtaactactattaaaaaagttacaaataaatctcgttcatattatatcaatacagcaacatacactgagagaattacagaagcagagttgtcctgttttgatgcttcagatgggattaaaacaattagtcaacttctactcgatgggaatattcgagaaggagatagcataagtgcctataaaagattattaagcaatagattgttaaatttggtgttataggaggatgcatgaaaccttttgagatgaattggcctgtgtgcgatgttgacctactaactgatgtagagagggcgctaagatctacacgttggacgttatcaggccaatctgaagtattgccatactttagtagtcttttttcaagaaggtgggcagattatataggtactaaacacgctattccatgcacttctggaaccgctgcgttatctatagctcttgaagccattgggattcttcctggagatgaagtaatagtaccaggtatgacttgggttgcagttgcccaagttgtgtataatctaggtgctattcctattttgactgatatcaatcctttaaccggacaaatagcagagaaggcaataagagaaaatattacccagaataccaaagctattattttagtacatgcttattgtggcatggcagatgtgaaaaaaattggtgctattgcagataagtatggtttaaaagttattgaggattgctcacaaagccacggtgcaacatggaaatcaaagaaggctggctctttttttgatatatctgtattttctactcagcaatctaaactactgactagtggagaaggtggagttattgctactagctcagatgattactattctaaagggaacctctaaaaacttttcacagccacaaaattgagtaaaatgtaggcacagtacctctctgcaaggtagcgccatcatgataccgcctcgttctgctttaaaaaaagacaaacaggcatccgaatatcaccgtcgaaaaatcgatgaattaggtgatccgctgcttgttcttgataaatatgttgatttctcggcactggctgacaccctagaccgtatcgtcccacgtattatttcccccaaagggggacgcccgccattcccgacggaggtgatggttcgcatcattatcctgaaacatttccataatctttccgatgaaaaaatggaatatcaattgcttgaccgaatgagctggcaacgtttttgtcgcttgaccgatgtcattaatctttagagcacatggaaggagc

SEQ ID NO: 381 - DNA, 4740 bp, Xenorhabdus sp.; identical to SEQ ID NO: 322
  CDS (2076)..(2507)

SEQ ID NO: 382 - DNA, 2365 bp, Xenorhabdus sp.
  CDS (2)..(421)
tttggccttgaaaggaaatcagggtgagttttacgacgatattaagctctttttggacaaccaattggcaaaggattttacgggcgttatccatggcacttaccgaagtacggatggcgatcatggtcgtatagaacagcgccagttgtggttaattaacgacgtgaattggctgcagaaacgtcatcctcagtggcacacgttggggggtatcgcggttgtggagtcatggcgggaagagcaaggtaaaacagagagttatgaaaggcgctactatattaccagccatcgtggtgcctcggcagaattccttgcgtgtgccatacgcagccattggcatattgaaaataaactgcactggcaattggatgtgagttttggtgaggatacccttgcccgtgagtcagcctcctcgccgtaaaaatctaactgcatggacagctcgacagaacgctgcgctgtgatggttgaggcttcgtgatggtagtaattagcggtatagtcaatatcgcgctcaaacagaacgtgcatcacaataccgctttcaggcactggcacgtcattctgatagccctgcatcacatcacatgaaaataacgcaataaggtactttcgcacctcggtaaaaatatcctcatgcgtgactgttattgtcgccatagcagcaccttgacccatgaggggtaagactctatcaccttggtgacattccactccgagacttcatcttccccgtaagcggcgaatttcatccggtctgaacctttctgctttgaacgccggatagcggagatttgccctttggcataagcataaatgtactgaccctgctggttaatcacgcccaaatgctctaaatcctgcgtactgaggctttggagctgcacagtgatgtcatgctcggtatatttggggatctgcctgccggaatcagtgacggtgtagccctcgtttgcgaacagaatcgcactgatattcgggttaacggtggtaatgaggttattggcgatagttctgacattaatcatttctcaccttttcgggtataaaaaacctccacaaaggaggtcattagtttgaatttaatatcagaggattatcattccccatttttaatgacttcataatcaatcgcccgttgcatactgccagtatccaccagcgtcttatcgggcgaggcgatcccttttttagcttttctggcgaccgttgccggggcattaggaggcggtaatgactgctcgatactgtctttaatatcgtcgaccattatcttacctaccgtttcaaatgcggcttcaatcccgcccgattcctgtaagcgtcctcggagttgagcaccaagcacccgaccccattcatcggactgattggcaatggtactgcgcataaaaggacgcggcggaatattgcgggtgccgtattcgttagccgccgcataaggggcgatcggctcaccggtcttttcgttagtggcgcctgccaatactcccgcacgaacctcaatggattgcgtacccgcaaggagtgctaatgcggccctgattttatccccacctttcatcaccatgattcacccccaaggatgataatgttttacggctgagtatcgcccaccaaccacatacttacgggtcgcttgccagtacatctgtccgcacggcgtgagcttaaaccacgatgcattagcggcatccggcacggcaaacgaaacactgaccgagccttctgtcgcactggcggctgggcctgcctgaccgttattcccccagagcgctaccgtagcaatatgacaggtcagcagatacagtaaggtcttgcgttcctgcgtgccgtcaggctcataagggatatttgaattatccgagttatcgagcagtaagcaggccacatcaaacgcctgctgtagctgtcctttcgtcaggacaccggcaaagcggggatacagttcaaggaaggcgccactgtcaaaggtgacgatggccatcaggtactctccttcaccggctccgtggctgttttgctagtatctacaggctcgcgcccgtggcgcagttcttttttctcgctggctttatcgttagcactggtcgttttctcatcccagacacacagctggtttttgaagatttccatctcgccataatgcgtcaggatgtaatcccacttgtccgcatctactcgcgtttcaccgaatagacctacggggagctttcctttttcctgcccaaagagataaaaggcgttccctttcaacaccacactggaaccgtccggcatgggaaattcaataccatgcggatgattcaggcggacactcacggtttttccttttgacatactgcttttctccgatataaaaaat

SEQ ID NO: 383 - DNA, 5722 bp, Xenorhabdus sp.
  CDS (1536)..(1973)
tgccctaaagtgaatgaattgttcgattttgaagcttctatctcttccggttaaataattcgttgttctgtttcttatatcattctgaaagtgaagttttatcacctttgagcttatacaactaactcaaaggtgattttagtctgtttgtcaggtagcttactcagtgatcagtctcaccaatattttttagggcatcgatgatcatccgccaaaatttggcctgatccagttttaccgcaacctgagtgtggcagtcctctgaaggcgggaagcgaaaatcagcaacagtcatacccgttgttaaggttccagacatttcgatattaacgggaactttttgtgtggtcatgacactgggatcaatcacataagcaacagcgcaaggatcatggacgggagggtagtcgaaaccccgctgtgtcatccgataactttttccataaaattgaagtaaatccaacacaaactgagcagggcgtgtatttattttggctatctcttcagtaacttccggtgttgccagtgcctgatgggtgagatctaatccgaccattgtcagcggccatttttcattgaaaacaatatgtgccgcttccgggtcgattaatatattgaattcggcaacagcactcctgtttccttcatgataaccacctcccattaatactatttcttttactctttccacaatttgtggtgccttacgcacagccaaagcaatattcgtcaagcctgcggttgggactaatgtgacgcttttgggcggatgttccatgatgatatcaataattaaatcaacggcatgacgagtgtctagttttatttccggttcaggcaaaatagggccatccagtcccgtttctccatgaatgtcaggagcggttttgatctctctgaccaacggccgatagcagccggcagcaaaaggaatattacggatattagcgatacgggcaatggaaagcgcattatgggtaactttatctaaagtttggttgcccacaacagtcgtcacagctaagagttcgatatcagggttgccatgagcaagtagcatagcaatggcatcatcatgaccagggtcgcaatcgagaataattttcttgggagacatattcattccttttatggttcctaaagtaaatatactcaccaagaataattcaccatcaataaaaattcctccgctgaccatcacaaaacgacatgataaaaaatgaaacctgttaataattgtttttattattgtgatttaattaacatataaacaacaaagggtttgagcattttaattgcgtatgattcatatataaatgataagaaatcgcagatggcaaatttgtgtgtttattaatttatttatggctttagccagtttaagtcgcgttagcgtcttaaacataaaaccacccgctttgcgggtggagttcaaaggttataccaagaaaaacacctttccgttacgatatagatgttcaagctaatattcgtaactcaaataaggaaaggtgtttatgggcattaaagcacaaagctcagcgcatacaaagtggctgtgtaaataccatatcgtcttttcgccgaaatatagacggaaagtgatttttaataatattcgttcaagtgtgggagagatcctcagagacctttgtaagtataaaggtgtggaaataatcgaaggtcatctcatgccagatcatgttcatatgttggtgagtattccaccaaagctaagcgtttcaagctttatgggatatttgaagggtaaaagttcgttgatgatctttgatagacacgccaatttaaaatataaatttggcaacagaaagttttgggcggaagggttctatgtcagtacggtagggctaaatgaagcgacaattcaaaagtatatcagagagcaagaaaagtcggatttaatctcggataaattgagtagtaaagagcatgtagaccccttcaaggggtaggccaaagcagcaaagacacttagcttgaacgaagagaaagcagcgtcatttaggcgcagtcggtaacaagcccttatagggcaagagcaaaccacccgttatacgggtggttatgatttattgattatttctttttctctacctgaaggaatggcataggagcaccgctgcctaaatattgaggcattacgccatcccatttatttacggcttccagttgcaaaacttctggatttttacggagagcttcaccgcgcaatgcgatggcatcagcttcagccagagcttttaacctgatggactccgcttggccgcgagcttcttcaatcattttatcggcttctgccttagagcgctcaacctcatttttacgcatttgcgcttcctggactgctctgtttttcttattgattgcatcaatcacttcatttggataatccattttaccaagccagctgactttctggatctcaatacctacaggctccaattgtttacgcaagtcagttgttactgactccagtaattgagtttttccaccggaagataatttatcaatatccatttttgagccatgattgattaaagagtcagcaattaattggcgaatattgctatctgtaatttctttaacgccagctcgataagtcttaaatacttcaacgactttgtcttctattacgcgatattctatgccaacagatgcgctgacagacatagaatcagaggtttgaaacaaaaatggatcttgatattggtgtaattgcttaaacagagggaacaaataaacttcctcgttccaacttagccaatattttcctgtacctaacttttcgttttgtactcccttatctgaaccatataaatcgactttgatccctacatttccggcaggtacttttgcccgctcacagccagccaatcctactgcaataagtgaaactaatattgttttaataattccttttctaatactcatttatttttactccattttattagttttttgatggtgaaataaaggattgcaggcaccacaaataaaataatgataattgctataactacagataaatcacttttagctgaaaatagtgttggagcgacaccaaagactaaaaataaagataataatagacttgtagttattaataggtattgcttcatattaaccttctccatgattaagcggctatatttttatacttttttatccataagtaaatggaaatgttaaatccagtttatgtcattttcttaaattaaaagaagtggaatttaaaaataaagaagcaacgatagagtgacaagatcaatcaagtctgattgaccttgaccataaatatacacttcgtctctcaagttgcctctttgttggctgcgctcgctcaccccagtcaccgtttttataaacatacggttatctatgctcccggggattcacccccttgccgccgcgacgcatcttgaaatccattgtgtatatcttcatttagttactccagtcttaattaatatattttgtctattttaattcagttaaataatgtgtttgttattacaccaaaataatagagatattaataattactatccaatacaaagaattcatgagtaattatcataatatactcgcttaaattaagaattagtggttgaacaaaatatgagcctatgtgcaggcaatcatcgcgctgataaagagtcatataaatgtgattaatactctgatatttagaaaatatttagctaattgatttgtcttgatggatgttcagattgttataattgtgcagctaatagctgataatgccactgtgatcaagcattattctttttctatctattaatcttgataaaaatgcggacatatcagaaaaattgactttttcataacgatttatcagcaaaaaattctgttcttgtgatttgcaatatgtcattttgaaaaatagttgtcatagttaataagttcgccaataaaatatttcgaatctatctatacacaatggatttcaagatgcgtcacggcggcaagggagagaatccccgggagcatagataactatgtgactggggtgagcgagcgcagccaacaaagaggcgacttgaaagacgaagtgtatatgacgcattgacagatttgaattcaggggaggggttaatgctaaaactggaaatttgctgttatagcgtaaattgtgcgcttattgcacaagaggcaggagctgatcgaatcgaattgtgtgcagggccattggaaggggggctgacccccagtatgggaatattaaaacaagcattgcaatgcttatctattcctgtacacccgattgttcggcccagaggcggggatttttgctacagtaaattcgattttgaagcgatgaaaaatgatgtttcctttatccgcgatatgggatttcccggtgtttctttcggtattttgaacgaagaagggaaagttgatatgttgcgcatgaggcaactgatgtctttggctggagatatggctgttacgttccatcgcgcttttgatatgtgttgtgatccgctatatacgctggagcagctgactgaactgggtgtaaagcggatattaacttctggtcagcaaagtagtgcagagttaggcttacatttattaaaagaattggcgcaggccagtcgtggcccgagtattatgccgggagcgggtgtccgggccagtaatattagtaagtttttagaaattggagtaaaggaagtgcacagctcagcaggtaaaattgtatcttctaaaatggtctaccgtaaggctggtgtaagaatgaattccgaggaccgtgagatggaggaatacacgaattatagtgtcgatcctgagttagtagaatccatgaaaggagtgatgatcctgattgataactaaatcccggctaaaatcacctctgaacattgaaggtgtgaactgccataacgagcaattcacacatcaatatttaaattttcaggttttaaggcttgcgggcaataagaacggcgcgcaatggtgccggatagccttcgattgttttgcgctgatctgacgggtcaaggaaatcagccaaagattcagttttcatccactctgtctgacgttgctcatccgtcgttgtcactgcctgatcaacgatcctgacatcgacaaaaccacatttttccagccatgttttcaacatttcagctgaaggaataaagtaaacattgcgcatttgcgcgtaacgttcacccgggattaggcattgatattcatctccctcaatgactaaactttccagaatcagctccccgcctgagactaactgatttttcaactgccacaaatggtcaagaggtgaacggcgatgataaagcacccccatggagaagacagtatcaaatgcttttaattcaggtaactgttcaatacccagtgggagcaggtgagcacgctggtcattacccaagagttttctgacggcttcaaactggcaaaggaaaagttgagtaggatcgataccgacaactaactccgcaccttcgccaaccatacgccacatgtgataaccactgccacaaccgacatcaagtatggtttttccttcgagaggggagaaatgtggtaaaacacgatcccatttccagtcagaacgccattcagtatcaatttcaacaccgtataacgaaaaaggccctttgcgccagggcatcaggattttcagaatattgcggatacgtgccttgtcacc

SEQ ID NO: 384 - DNA, 6114 bp, Xenorhabdus sp.
  CDS (1930)..(2367)
tgcctgtgctctaagggacactgaatatcgagcctgattctataacactgattcgttatctgggtagctgcctttttctggcggtaattatggcgacgctgatagtcaatgggatactggttatccagaaaaaacaaaaaaacaggcagcgtttgctgcggataaaacagcactacgatagttgcttcaatgtgaaacaaccaccaatgagttagcgataactcggtgggctatgctaccctgaacctgttttttgtcatctccgatcaggtattgttattacacattacccgttaatattgaaacagaacaatcagagagaacaatcatgcctgattcagacaacgatcaagctgttcgccttgataagtggctgtgggcagcccgtttttataaaacccgttccactgcgcgtgacatgattgatggaggaaaagtccattataatggtcagcgtggaaagccgagtaaactggttgagttgaatgctgtcattaaactgcgtcagggtagtgatgagagaacagtcattgttctggccctcagcagccaaaggcgtggtgctacagaagcccagcagctttatcaggaaacggaagaaagcattattaaacgggaaaaaatggcgttagcccgtaaaatgaatgctctaacgatgccacatcctgatcgtcgcccggacaagaaagagcggcgtacactgattaaattcaagaatacaaaattaaatgagtcgggacattcctaactaaattcgagttgcttcgtgctgccagcaaagcggcggcttgaacgataaagggaataaccgcctcagtgaaatgagagagatttatgatcaagcatgaccaattacaccgctttttatttgaaagtcattctgtcaggggtgaacttgttactgtcagtgagacttaccagcggatgttggaaaatcacgattttcctcaacctgtacagcagttactgggtgaattgttggtcgcaaccagcctgttgaccgcgaccctgaaattcaacggcgatattaccgtacaaattcagggcgacgggccagttaagctggcggttatcaatggtaataaccagcaacaaatgcgtggtactgcgcgtattgatggtgatatcagtgctgaaagcagcctgcgtgatatggttggtaatggttatatggtcattacagttacgccaacagaaggtgagcgctatcagggggttgtagcgctggaaggagagacgctggcggaatgtctggatgcttacttcaggcagtcagaacagttaccaaccagcttgttcatccgcacaggtgtacaggatggcaaaatggcggcgggtggtatgttattgcagagcttgccgagcgcgcaaaccggtgatgttgatatgcttgaccatctggttcagctcacgacaaccatcaaaggtgaagaactgtttacactggatatcaaagagattctgtatcgtctttaccatgaagaagatgtcaccctgtatgaacctcagcaggttgaattccgttgtggctgttctcatcaacgctgtgccgatactctggcaactttaccagaagaggatctgcaagatattctgcataaagatggcaaaattgacatggaatgtgagttctgtggaatgcattatattttcgatgaaaaagcgattaataaaataaaagaagtgaagtaataataattatattgattgtatttatgtattgattttggagggcgtatttatacgccctttttatttatggctttagccagtttaagtcgcgttagcgtcttaaacataaaaccacccgctttgcgggtggagttcaaaggttataccaagaaaaacacctttccgttacgatatagatgttcaagctaatattcgtaactcaaataaggaaaggtgtttatgggcattaaagcacaaagctcagcgcatacaaagtggctgtgtaaataccatatcgtcttttcgccgaaatatagacggaaagtgatttttaataatattcgttcaagtgtgggagagatcctcagagacctttgtaagtataaaggtgtggaaataatcgaaggtcatctcatgccagatcatgttcatatgttggtgagtattccaccaaagctaagcgtttcaagctttatgggatatttgaagggtaaaagttcgttgatgatctttgatagacacgccaatttaaaatataaatttggcaacagaaagttttgggcggaagggttctatgtcagtacggtagggctaaatgaagcgacaattcaaaagtatatcagagagcaagaaaagtcggatttaatctcggataaattgagtagtaaagagcatgtagaccccttcaaggggtaggccaaagcagcaaagacacttagcttgaacgaagagaaagcagcgtcatttaggcgcagtcggtaacaagcccttatagggcaagagcaaaccacccgttatacgggtggttatgattaataccagcggaaaattcgcattcctaatataaaagtcatgacaccaatgacaaccagtgcaatagatgcgggtacaacctgtaataattccccgccttcaataaatactttacgcatattatcagccagaatggttaacggcagatattcaacgatgttgaccatccactgtggaaagtgtttatagctgaaaaagatccccgataacaaaacctgtatcagaatcgaaacttccagtaagccattcgcagtctgagccttgcgtgcccgggatgctaccagcactgccacaccagaaaaacagatattcccggcaaagagtaaaagcaggaaggcgtaaaacgaaccctgtatttctatatcaaaatagatcttagcaaactgataaataatcagtatttcaacaaagttgatgataagacaggccagaatatgcgccatcagaaaggtggtcttacgcattggcgtgatacacatctgacgggtgacccgcgcgaggcgtttttctgccaatgcccagccgacagcaattaaacaggtttccattattgccatcgccagtaaccccggtatcagaaaatccagataacgcagccccggtgtttccagaatgaaaagatttttatctgttggttttccctcttgctgattgagcaaatagtaagtcagcagggcatcaccatcctgtggatcgagatagtgaatctgttttccctgtgcattctgttcaatgaacatctgaatatcaccccgtttcaacccgaggatcaccgcctcacggtcaggataatatttaatatgatatttgacctttaccagattatttcgtttgatttcatcctgattgataatgccggagatggtgtgttcatgcgctgtaaactgctctccccattgtttgatcttttgttgttccgcaacttctgctggcagaacaatgccgatatacctttcgggaatatcctgtgatgaaaacgaaagccctaatagccagaccagcaaaagcggaaaaccaaatgaccagaacagaatttccggctcacggatatattgcctgaattgtgttttcatcaggttgatcagtgcactattcatggaagcgtctccctgccagtaccatgaacaaatcatccagcgttttctttctgatcaccagttcattgatatcggtaccggcttttttggcacattcaaaaagctcagtcacaaagctggctgaatcgtcaattatcatacggatcctgttttttgattcatcgtattcataacttgatacccgattatgtaggctcagttcttgcaaacgttcagggaaccgggtcgtcagctcaatcagatcgccgttacagtattttttcagtaattcatccatgccaccctgtgcaataatttcccctttattcatgatacaaatccgatcacataaatactcagcttcctccatataatgcgttgtcagcagcatagtggatttcttttcccggttgagtttgcgcagaatgtcccatgtatcatgcgggaaacgcggatcaagccctgttgtcggctcatccagtatcaggatttccggttcattcataatggcaacacccagagccagccgctggcgctggcctcctgataacccttccacataagtccggtgtttttcgcttaattcaaccagttccatcacttcctgcacccggtgacgtgaacagccatagaaactaccgaacagagtaagcacttcttttactctgagtttgttgataaataacgtttcctgtaagactccgctgagacgccggcgcagataaggtgcatcatgctgccatgtttttcccaataccctgacagagcctgaatctgctttttttagcccttccagtatttcaaccagtgtcgtttttcccgcaccattcgggccaagcagaccaatgaactcaccacgataaacgtccagagaaatgcctttcaacgcctgataatctttgtaatgtttcctgacctgattaaactcaatcactttctcttcttgtttctgaatagccattctctgtatctcattcagtgataagttgggagagagaagatagtttttccttcagcaatccggtaaaataggccatccctgcctgattaaaacagcagcagttaatttgcatgattggtttgctatcttcagagagtgtgacgtagatattgatagagtcattttcccattgggtagaaatggcctgaccgggcagcgcctgatgttcccgatgttcacttttccagtagctgctcaggcgtaacccatccagcctgctacccgacgtctcagatttgaatacatcctgtaatatattaatgtttatcgttggttgtgaaatttctacgctgcgtctggctcggcgaatgatagattgcggtggtctgggttccataaacaaaaagtcagccaaaaaatgcgggtagagccgggcacgccggaataccttgctgtatagccagctacctgcacggattgccagagaataaataccggggctgcgatgccagcgctgttcagccagcacaccaaccggcaaactccacgggcattccatgtgatcataggccgataaaatcttttccctgacctgttccaataaagtaattgtcgtcgcctcattttttcctgttctatcctttaggctgtccagattgacaggcaccggcataacacgcagcatgggtgccatcaatgtttcacttccgggctgctccctgccttccagcactgaattcagcgagaaacgggactgcccggtcattgtataaatcacctcagcaaccagtgtcagaaaaaccatctgcaatgttgctttttgctgtttagccagcgtatccagcaagtcatagctattttcaggaaatggcaggtaaaactcgtgatcggtcagagtattctggttgagatagcgagccggaaaacgcgcataaggatatcccttcagatgctgccgccagaaagccaaatcttgctgaccatgttgatgatgggtttcccgttcataaacgacccattcatcaatttgcatctgatccgatacacctaactggagtttttttccgtggcatccctgttcataaagccgccatagctgttgctcaaacaggtgtatggccccgccatccgccacaatgtgaggaaaacataaaaacaataaatgttttgattctgccaatcggaaaatctgtgcccgcagatggggaggcgatttgaaattaaatggcgtatgcaggcatttttggctatgttcaatcacccgttgttcctgcttatcggcatcataagctgacaaatccaacaagggcagatcaaactcctgcatctgacaaagccgctgcattggtgcgtaatccagtatttccgtgcgcagggaaatatgtgactggattagcgtattgatagcctgttccagcaccgctatccgcagttctccttcaatcagaataccaacctgattgttagccgtatcccccagtgcggtggatacaaaccagaagcagtgctgggcatatcccaacgggaaccagtttccctagtggttattcccggtgccgtgcaaattccgggctgccttgcctctttgcattctggctatcatcgcctttcctc

SEQ ID NO: 385 - DNA, 5081 bp, Xenorhabdus sp.
  CDS (1657)..(2055)
cttgcacctgttaattaaaaccacagcactgtgcaaacacgaaagtggacgtatacggtgtgacgcctgcccggtgctggaaggttaattgatggggttatccgtaaggagaagctcttgatcgaagccccagtaaacggcggccgtaactataacggtcctaaggtagcgaaattccttgtcgggtaagttccgacctgcacgaatggcgtaatgatggccaggctgtctccacccgagactcagtgaaattgaactcgctgtgaagatgcagtgtacccgcggcaagacggaaagaccccgtgaacctttactatagcttgacactgaacactggtccttgatgtgtaggataggtgggaggcttggaagtgtggacgccagtctgcatggagccatccttgaaataccacccttgaatggctggtgttctaacgtaggcccgtcatccgggttgcggacagtgtctggtgggtagtttgactggggcggtctcctcccaaagcgtaacggaggagcacgaaggttagctaatcacggtcggacatcgtgaggttagtgcaaaggcataagctagcttgactgcgagcgtgacggcgcgagcaggtacgaaagtaggtcttagtgatccggtggttctgaatggaagggccatcgctcaacggataaaaggtactccggggataacaggctgataccgcccaagagttcatatcgacggcggtgtttggcacctcgatgtcggctcatcacatcctggggctgaagtaggtcccaagggtacggctgttcgccgtttaaagtggtacgcgagctgggtttagaacgtcgtgagacagttcggtccctatctgccgtgggcgttggaagattgaaaggggctgctcctagtacgagaggaccggagtggacgcaccactggtgttcgggttgtcatgccaatggcactgcccggtagctaagtgcggaagagataaccgctgaaagcatctaagcgggaaacttgccttgagatgagtcttccctgattcctagaggatcctgaaggaacgttcgagacgaggacgtagataggctgggtgtgtaagcgttgcgagacgttgagctaaccagtactaatgaaccgtgcggcttaacctgacaacaccgaaggtgttttgcggggattgagagcaagacgacaaaagtttcagatgaagagtgaccggaaaacagaaagtggccggtgacacagcttgttcgggattgaaaacaggatttgtctggcggcaatagcgcggtggtcccacctgaccccatgccgaactcagcagtgaaacgccgtagcgccgatggtagtgtggggtctccccatgtgagagtaggacactgccagacatcgatttagacgtgttgccggcccaaaaggcagcataaaacagcattcggtggtgcggtagttcagttggttagaataccggcctgtcacgccgggggtcgcgggttcgagtcccgtccgcaccgccaccgatttagataaacccctgagagaaatctcaggggttttttctatttcaggcatttttatttttccatatgaaaggttaaaaccaccgactttagtcggtcagctttagctgcgatactgtgttgcacgagaggtgcaatatggattacagatatggcagccacacggtatttcagattgagtatcattttgtgtgggtaacaaaatacagacacaaagtgctcacaggtgaagttggcttacgggtgagagagctagttcgtcagacctgtgaagcgtttgaaatcaggatagtagaaggggtcgtgagcaaagaccatgtgcatatactggtgagttgtcctccgagcttagcgccctcagaaatcatgaggcgaataaagggaaggacagcaagtaagttgtttgaagagtttgctcacttgaaaaagcgttactggggtcagcatttttggggcagaggctatttttgtgcgacggtaggtcagttaacggaagagatgataaaggcctatctggcgcatcattttgaaccgaacccgaatgatcacttcaggctggataattgacgcatcgttcagtcgatgcgtatccggactttcagtccgttaatcactaacccaccgactttagtcggtggttgttgagtccagcttgacaagcgcgataagaataatcgcgctggaaagtacgatgacaggataaacaacgataacgttggtgcccacctttgccaataccatgtttttttaatgttcttcgtctggtgacaaaattgacattttacttctactgtggccatgcatgttatctcgcaaaataagtattataggttaagaacaacgccttgaatacatgaccgtaaatacgattcgttacaaatattggcttaattctagaataattaagccagtttctttcaattattatcaggaattttttcgttaaatatacaatccattcttaatgctctcggcaagcattccggggtctccaatacctctaatattctttataaatggaaggtccagtttatctgccaacttatcaatattgataccctcttcaatagattgctcgaatgttaatctcgttatctggttccataaattgcctgcaaaccacgagcaatttgttataggtgtgtataccccatttttcatatcttcagaggtaagttgcatcagttttgccaactggttactttcatctattaacttaggtataattttcatttctattaattcagggtttatcgctttgctatcaacctttacacagcgctgaaggtggaattttctccctggagaatcattggtatattctgagttttttacgaatccatatcctgaatgaaaagcatatgatgtattatccccttctttttcactattgaagtaaataacccatgcatgaccaaaaccacctccgccaaagtcacttcccaatgctttaaatacttctttaattattgtgtctttctcactccaaggatactgttgccctatagccatagccttttctattattggcttcatattcgtacgatcagctgttctattggtccgaatacatatttgtgggtagccgacactttcatctccaaatggttgatacttgtctgccttgatcataattactgtatgaacgcctccccgtttgcaaggcttccgttgttttaacattgacgagtagttgcagctctgtatccggccttattgcagccagcgctgcgggccactatgagattcgctgacctgatccttattcctctggcgggctttatgccctggcaattattcaggtttctcaggtcacggtcttaccgtctttgtcatcactctggctgccatagcaactttttagcattcacccttttctaacgagttaatatttattttttataatgaaatgaacaccactgtatgacatatattacaattaccccataatggattgataatattcatcataaacaataataacttaaataatatcaaatagttattataatgataagaaacgtcaaccttaaaaaattaaaacaccaaaaatccttgcgaaaaatattataaggcgtaataaagtgaatggttattgaaaagtgatatatacttttattaatttaaataaacaactaaataaccaagatgtgtaatcattttaaataaacatgatgtaattaaaaaattatacatctttattttcactgcacctaaatcagattgaataatatataacgcaattatctgtaaaacattcaaaaagaaaaaatcgatatgctttatacatttcatgaatgaaatataagttaatattaattatacacccatgagtttttacttgtttattttataaatcatctatacttgattcagataataaccattaaaggtatataatcatggtaacaaaaaaagcacttataataactctggcaatgcctttctttatatatggttcattagccaaggcagatactcagactttcggcataggatattcaaatagtcaaatatcaacgcctgctaatacctatcttgatgggattaatattcattatcgttatgaatgggactcgccagtcagtattataggtacattcactcacatgagggggaacacagaccaagtcgtaaaatatacaaaccctacatctggcactcatcaaagcacactatctgagcaaccagtagcgtttaagtcaaaatacttttccctaatggtaggccctgcctatcgcatcaatgattatctgagtatttatagcctaattggtattgctcatgtaacaaatagtgcacataaaatctccatagatactaatgatgggtctgtgggtactggtggagttaatcccgctgcttctggtggttttgatattttaccgacctctgatgaaacgctgaagactaatgagcttgcttatggtgcagggattgaaattaatccggtgaaaaactttagtgtttatcttgcctatgaagttactaggtcaaaacatgctcctagaggatcgcgcaacgagggagtaaacaactttatcaatggatttaatgtcggtgtagggtatcggttttaagaaaaaatgagtgctcgtgctttagcctttattcacttttgtagaaacaaagcgctattcagggctaaatatcatttaatcctgaatagcgccttattactttatgacttaataagtactttcgttctgctggtctctatcttatggagtcagataattttctcaagaccgttatcccttaaaggtattgacttatattataatgaaggaagctcagataatggccagcgcgctttcacagtaacgcctaaattgttctttgttccgcttgccaaacggatcattccagcaaatgcgatcattgccccgttatcagtacaaaattcaggacgggcgtaaaaaacttcaccgcgcaatttttccgccatattttgcattctgatacgcaatgtgcgatttgcactcactcctcccgccataaccagccgtttgaagccagtctgctccaatgcccgtttacattttattaccagagtgtcaacctttagagca

SEQ ID NO: 386 - DNA, 8846 bp, Xenorhabdus sp.
  CDS (7396)..(7794)
gtgctctaaagctatttccgaaataaccgggaaagtccttgagcatatcatcataacaaatgtagatcctgacaatggtgagataagttattatataccatcagatgaaattgtgaataaacctgggtatgaatatggtgtagaacttcaggagctttatcagggtgaaatatttgatcaggaacaaacaatttcagtattaaacggaaaatccaaactccaatggaaagctgactggagcatgcggttactgcatagaaacatccactttgaaatgcatggggaagatctaatagattcagctacagttgttcgccagatttttagtgtcttaaatcgacctagccctcgcctttacaaatatgggttgtttcttgattcttccgggaaaaaaatatctaagtcaaaaggaaatggtttttctctgcaagatgccaaaagccttctgacacgagaagctatccagatttttttatcaaaagaccctaaaaaatccactaaattttatatagaacaatccaccagattaaatgatcaagttaatgtcttgaaaaaaaacaaaaaacgcctttcttttcttaagattgccagaatattaaaagcatcaaatcctataactcttctctcagcaaagaaatttcttgatttatacctaatcgatggggaagtgatatcagaagaagaattaactataagttataattattatttaaaaaccaataaaaatcgttatgctggtttagcaacagataaagaaagacagtacttttctattattacaaacttaatgaaaaaagaaatgtattttaataaagaagaagtgttcaaattgatatttgattcctatgaaaacatctttccagaaaaagatagcgcacaaatatggaatttactgtatagagggttgtttggcgatacctgtggccccagaattaaaacatggatagagttaaatgatgaaaaagatattattgactgttttagtaacccatatatacagaaaaaagaaaatgactcactagataatattgatattaaaacaaacccatcaaattcatccatagtgataaatatagataaaaatgaagagttacatatgccaaagttattcggtaaaattaactttaatcaagttaaggaaaagtgtcagatcctatcccgtgaattaaaaaaacagagtagttctttgatagaggcgctatctgaatatcaatgtaaagttgtcactgaagatgagatttcccgttcagttgatattctagaaaatattggggaaaatgaagcgtattttcaggaaaaaatttatggcattacatcatttctacctttgaatcagccaatttacgcatctgtatgttttggtttcataccttctcttatggctgaaaatgtttgtatacgtccacctacggcaatgcattaccattacaaaaaatttgaaaatgttattgatatgtcgaagatatctgaatccttttcagtttcttatgaagaaaaagaattatttttaagtcaaagagtgaaaataacagatgctgttatctttaccggtacgccagaaaatgcagttaaggtcagaaaacatttcagaaaaaacacattgtttatcttaaatggtgcagggcataaccctcttgttatatcaaaagatgcggatatagatttagctatcgaaagtacgaaacgggttgtgctttacaatcaaggtcaggattgtgctggtcctaattctatactagtacacagcgatatatatgatttattcagggataaattaatattaagtttaaaagaaatagaaggaaaggtaggttcttattctgattacaataatattgtaggtcctaacagtgatgttgatcatagtataaaaatagcctctctatttaaacttaatagaagttattgtacctatggtggggaaataaaccctatagatggcatgataaagccgacagtatttgaaaagcctctcgttttaggtggaaattacaaagagttttttgctcctgttttctttttgcaaagatatcagggcgatcaagagttggcagattatttttctcattcaaactattctgctaatgcgatgtatatttctttgtttggtacaagtgattatattagtcatcaattaaataaaaggttacacttaccagacagtatcctccttaatactgatttacatttagaagagcatggttatctcccatatggtggacagggacccgcagcatcatgcctttggcatgatggtaacagaattaatggaagtacattaccacaaagagatatataccaatatctagttgaaccatacaaaaggtaaaaagataaaaatgaatgccagctttaataaatcatatatggtttccatcatattgggtgcatcgctcgtaggattagcgatgggatatacattaccaatggtcagtctaaagctggcagagcaaaatcgtgcttcaacaataatgggtataatgtcagcattacctgcgctaggaatgctgatctcttccataattgttccaatacttactcgtttatttaacttaaataaattattgagttttagtttattattactggctgtttccacttttttttctacttatttaaatcaggtatattaccttactattccacgatttctgatggggtttgcttgtggtgtcattgtggttataggggaatcctggattagtgataataccagtggtaaatacaaagggacattcatggggctatacacttccgtcttcactgggtgtcaacttctggggccattgttaatttctatttttggtattgtctctctgatccctgcaattttactgagcatattttctactctttgccttgctcttatagtaagaaacccttcatcagcactatcacaacaaacagaacaaaatgaagaaataaaaggttctttcttaccacttctcatatcggcacccagccttatgattggtgttttttgtttttctttttttgattcagcaacgttatctatgttcccgatatatggtttatcattgggaatatccgaaaagatcaccattacattgataacattaatttttttaggagatgcaatcttccagatgcctataggttggctggcagataaaactaaccatcagaaaatgcacattatttgtggggtagtttttattcttactctattggcattgccatttagtataaactctatgtttttatgggttaatatcattattatgggtgcattcggaggtgggatttacaccttatcattggtgagagcaggaaaaaaatattcaggccagacattgattaccataaattctctatttggcattatttggggcattggcagtcttatggggcctttaataacaggtgtagcaatggatatattcaacgcaaaaggatttacaattatattgattactgttgggctcgtattcgtattttcatatttgcttcctaacaagtctgtacccaataaatcttaatattttgtatggcggcagagttagtgttgccgccaataaagcgtaaacttaaattcagagagtatgaatattgagtcatacctgcgtagtcagtttaatgcgtcgctccacccataacagcaatatctgatttattttcccaggccacttcaattgccgtttttaatgctgacgttattatctctaaagacatgctgggcatatttgtatattcagtggcttgctctggtaaataaggaacatggataaaccctccacgtgcggcagggtatttttgtgtaaggtaatgtaataagccatacattacatggttacagacaaacgtgccggctgtttgggaaacagtagcggggataccagacatatttaacgccctgaccatcgccttgataggcaagctggaaaaatacgcggcagggccaccgacaataataggtgtatcaatcggctgattacctgcattatcggcaattcttgcatcgttaatattaatggcaacccgttctactgtaatatcaggcctgcctcccgctaatccaacggaaatcactaattccggctgataattatcaataatggtataaagctgcgccagtgatgtatcaaagatacaggggagctgatgaacttcaatgtttgcatcagcaactcggttgccttgtagtcgcttaatcgcttcccatgaagggttggtggcatcgcctccaaaaggctcaaaagcagtcactaaaattgttttcatagctgtttcctgtcatttgttgtcagaacatcagaaaatagagcgaaaacacattggcgatcagcaaagtacatcccgtagggatctgtgccttgatgacggcatttcgatcaggtagctctaatagcgctgcgggaacaagattaaaatttgctgccattggtgtcatcaatgtaccgcagtaaccagaaaacatgccgattgctgccattacagccggattaccaccatgttgtagtacaagaataggtatcccaattccggctgttacgatagggaaggcggcaaaagcatttcccataatcatggtcaagagtgccatgcaaaagacataagccatgaccgcgataaaccgattatcaaccgccagataactctctgtcaggtaagagataattgttcccactccggctgctgtaaacagtaacccgagcgtagccagaatttgtggcagaatgaatacacagcctatagagtccagtaagcggcgagtctcctgcataggttgtataattttctcgcgagtgatacggatagcaattatcagtgcgataagacagccgagagtgatagagaagagggttgccagcgttgtatgattgccttcgccaaaaattgcacgttctaatccgggaatatggttaaacgcaagaaccccaaccatagtgataatcggaataagtaaggcgggtaaaaataaccgattaccgagacgggttgcactttcctgccgttgctctggcgttggctgatgataattacctaaacgaaccccgccaaatccagccagcagtgccatcacaaccactaaaatccctactccgatatgtacgattcttgttgccagaacttcattatcgagccagagatcagtcagacgatagctccagtttcctagcagaaaaataaagccgtaaagcccccagaatagccctgtagtcaaacgacggggattggctttatcacgccaggacatcactgtcacaataagcaaaatagcgcctgccagataatagagatactgtaactgaaacattatatagcctccttgctggcgtgttttttatggcttagggaggcaatttctttggcaagtttgttatccagcctatatagcctaactgaatgaatgaagaacgcacaaatcgcagtcggaattccccatagtgcaatatgtaggggttcagtctcaatacccgcggagttcaacataaaattgtgcataaaaataatggcgccgaatgcgacaaaaatatcttcgccaaaaaacaatccggtattatctgtcgcggcggacatagcgcggatccgatagcggacatttttgggtaaatcaccatattgattttcggcagccccttcagccattggcgccaataatggacgaaccatttgtggatgccctcccaggctggttaaccccagagcggcagagatttcacgtataaacagatagacaatcaataaacgcccggttgtggcacttttaatatgggcaatggcacgttgagcctgctcctttaaaccatgcctttccagcaatccaatgatgaccaaaggtaataaaatagtcagcgataggttcattgtattaagaaagccagagccgagcttttccagaatatcgagaagtggcatattggcagctaaccctgtgaccagccctgcaattgttacaaccagaacaggattaaacctgataataaaaccaatgatgatgactgcaatcccgattaggggccaaaaactgacagtatgctgcatattttacttccctctgcataaatggattgttgttttattgttgttttattgttgatttaatttgcattcattgttggctaatttttttttattgttgaacaataaatatattgcgttcaaagaatgatcaatgtaaatctgcattggattgtaaaaatggtaggtagatcactgattggatggatttcttatcggaatcattggaaatgaaaaagggttaaaccgatatttttaacgccatttatagcattatatggtgttaactatcggtattaatttaagatatttttactgtattttgaaattataattcaatttaacaattctacttttggatattattatttattgataatcaaattaagatacgacttccgggctgtaagaatttttctggtacgtaaagatcgaaattattcaatcggcagtattcttccagttgttgagcagagctgacaccaacttttttatatatttgggcggtgtagttttcaacggtacggtaggagatatttagtatctttccgatctgtttgctagtgtatttatgtaaagagaggaaaatcacatcccattctcgttgagtaaacaaattagttgggggctggaacataatagaagcaggcagtttcccatgatataagcgggtcagtgaaaagtcctgagctttccataaatgatagatgatccctatacagtcaccattatcatgataaataggtgacttttcacaaaagtaagatgataaagtttgagtctctccccaaacatgggtttctagtgaaacgtatgatttttcttctttcatgactttttggtcatgatgaatatacgcctcagcaaactctgcaccatcccagggaagttcgtgatcgtagagcccctcaaaatcaaatgaatctgaaaatcccttaatcttattcaatgcgttgttaccatagataaagcatgaatttttatccttgataccccaagggtcattacttattgctagcgtattaattatttgaggtgaaatgatcgacttcttactcatatcaatattccttttttatgtctgattaatataatcagttaaattttttactactaacggtgataaatctttcagggatataaagatcaaggtttttatatttacatcttttgaaatattaactaattgttattaaattatggctggctttaatttgaaccacgtaaatgatgtttatcaaagtattttatacgctttcaacgtttccaaaaatgaataaaatcattaattatcttgtttcgtcgccagctccagggaatttatttttccatataaaaggttaaaaccaccgactttagtcggtcagctttagctgcgatactgtgttgcacgagaggtgcaatatggattacagatatggcagccacacggtatttcagattgagtatcattttgtgtgggtaacaaaatacaggcacaaagtgctaataggtgaagttggtttacgggtgagagagttagttcgtcagacctgtgaagcgttcgaaatcaggatagtagaaggggtcgtgagcaaagaccatgtacatatactggtgagttgtcctccgagcttagcgccctcagaaatcatgaggcgaataaagggaaggacagcaagtaagttgtttgaagagtttgctcacttgaaaaagcgttactggggtcagcatttttggggcagaggctatttttgtgcgacggtaggtcagttaacggaagagatgataaaggcctatctggcgcatcattttgaaccgaacccgaatgatcacttcaggctggataattgacgcatcgtttagccgatgcgtatccggactttcagtccgttaatcactaacccaccgactttagtcggtggttgttgagttctatgactgttacatttcaaattttcattttgttgttgacttcgtacattcactctaattgctttatatagagagggttatttatttttattttttccttttctattattcaatgctttgaaatatatataatttatttttcttttttatatgaataagatttaagaaattacctttaaaaaataaaattatattataaaaaataataacgagatgaattaagcatccgttgacttgaataaacataagagtattattttttttggtctaattcaaattactataatgtagtttagttttattattactttccattagtaatgatttggaaagggatttgtcgagcttaaaatctggtttatgtgacttttatccgcagcaattgaatataatcattcgtataggaggtgattatttatgaagtggtatgttactgaatcattagaaatacataataaagttatccccgaaaaagaaattaatattggagctggatttggtccaacaggaattccacatataggaacgctttgtgaaattatccgaactggtttagttaaaaaagaactaactaatttaggaaggaaaaataatttttaccttatttcagatgatttggatccatttaggaaaataccgtctaacgtacctaatccagaaaaattaaaggactatctggggctgccggtaaacaaagttccagatccatttggggttttttcttcattctcagaaatggcagaaactcgattgttagagctcgctaaagaatatggtatagactgtaatatcataaaaaattcgctggcttataaaaatggtgattataacgattcaattaagttatttctgaaaaattttactactataaatcaaatatgcaaagaatctaccgggtttttgaggcagcgaacatataatataataatgcctacattataaccgtgcac

SEQ ID NO: 387 - DNA, 11162 bp, Xenorhabdus sp.; identical to SEQ ID NO: 65
  CDS (9094)..(9531)

SEQ ID NO: 388 - DNA, 10872 bp, Xenorhabdus sp.; identical to SEQ ID NO: 68
  CDS (4667)..(5065)

(The sequence listing continues in the following parts.)

1-64. (canceled)

65. An isolated nucleotide sequence encoding an insect inhibitory protein, wherein said insect inhibitory protein is XIP-7 and comprises an amino acid sequence set forth in SEQ ID NO: 4687.

66. The isolated nucleotide sequence of claim 65, wherein said insect is selected from the group consisting of a coleopteran insect pest, a dipteran insect pest and a hemipteran insect pest.

67. The isolated nucleotide sequence of claim 66, wherein said coleopteran insect pest is selected from the group consisting of cotton boll weevil and Western corn rootworm.

68. The isolated nucleotide sequence of claim 66, wherein said hemipteran insect pest comprises Western tarnished plant bug.

69. The isolated nucleotide sequence of claim 65 that is SEQ ID NO:428.

70. The isolated nucleotide sequence of claim 69, isolated from Xenorhabdus nematophila bacterium strain Xs85816, having an NRRL deposit number B-30306.

71. An isolated nucleotide sequence encoding an insect inhibitory protein, wherein said insect inhibitory protein comprises an amino acid sequence 95% identical to SEQ ID NO: 4687.
